United States Patent Application Publication US 2011/0183924 A1 - sequence listing, part 206

SEQ ID NO: 495358 - DNA, 157 bp, Homo sapiens
tcacatctgctggaaggtggagagcagaggcaggatagagcccccgatccagatctgagatacttccgtctctggggagagcaaataatctctgatctgtcatgggtgcgtgcgggtccagggcctgctcatctccattcttgcatcctgatatgca

SEQ ID NO: 495359 - DNA, 384 bp, Homo sapiens
aataattgtcgtgtgatgcagactgctattgggtgataggaatgctggacccgttggcgggactcttcggtgaattatgtagcttgtgggtgatagcataaacttgtaatctatcaatgtattctagtatagagtcagaggactgcattcacagcaacataatcctgcggttggtattgcaaacattcacgaggatcatgatctacagacatggctctctgcctcagcgtggtttcatgcgcgagatttgctgtattgccacagagctgatttgtgcagtcctgtttcggacgggctgtgatgttcgtgattggatccccttttcgcggctttaggggctcgggcaagcttttgaggtctgtaacttgttgaagacttgtggac

SEQ ID NO: 495360 - DNA, 273 bp, Homo sapiens
actgactacgcggcgtcttacacattgctatgactcttcgcgaagtcccacaataaccagtgtccgcgaccagcacttcaatctggcctctcacagtatccctgaggccacacctgacccccatgactggatctctctgatccacctgctattcaccccatttccctgtatttccttctttcctattcctcaccctgagcacgcttgatttattgatggcagttccaccaggcctaatcgccacataccagcaaatgcaggctatgctatagg

SEQ ID NO: 495361 - DNA, 121 bp, Homo sapiens
ttaccatagcatgtcttttttcttccgcttcctacttttcagggtttattatcttttttcttctaaaagtatgtttttatcttctaatttccctatcttctctgctattgaaacttctaaa

SEQ ID NO: 495362 - DNA, 478 bp, Homo sapiens
ggatcactttgtctgatactgtgatgctcaggtggacctgcccatggctgcagtggaggctataaacatagaccagctgggcgtgaatgatgtgatgctggagaagcctacgtgtggaaggccaggcgctggtgtgtgaactgtgctatgacaggaaagtagagaagaggtgtcagacctgcaaagccaacctctgccacttctgctgccaggctcataggcggcagaagaaaacgacttaccacaccatggttggccctaacaaggacttgaaaggctacagccggaattgggaaaggccaatcctgtgtcctgttcaccctgcagagggaactgaggctgtactgagagtactgtgaccggcccgtgtgccaggcattggagtgatgggggagcatcgggaacacccctgtgacttcaccatgcaatgtcatccactagcatggggacttctgtgttaggcatctcctcaaaaggt

SEQ ID NO: 495363 - DNA, 108 bp, Homo sapiens
ccgtgatttatgtagtatttccatttcttattatcaacaacttgtggttcttcccaatgagataaaatgaactcagaagtgacatacgtcacaaagaagattcctgta

SEQ ID NO: 495364 - DNA, 111 bp, Homo sapiens
cacgagggtaaagaacaagccaccattggggcctgaaactctcttgtacggttgagagtgcacacttttttctgattacacctagaggtggaaggagagatacattgtgtt

SEQ ID NO: 495365 - DNA, 1191 bp, Homo sapiens
agcgggggtgagagagaggagcgagagagtgtagagcgagaaagaataaaaggaaagaagatatctactatgtatataaagataggccacgtatagcaaacggacaggctgacaacgcaagcctcagtaccaacgggctacggcagcagcccgtatcagaagtcattgctgcggagaatcgtgatgagtctgcaaggtgagatgatcccgatgcaatctaggtccaaaaagaatcgcgaagtgcagacaaggctgaaacatgaagacaaacgttgtgcatgaaatcaaggatgagtaaagagagccatgaattgcctgcacgaattgaataagtgagtagacgagaggactaactactcagacataagacgatgggataacaatttatcacatggtcgatagttacgagaagacaatggggctagcctacagtccaacgaacaattacgttaagaaaacaagtggtcgatgaagaagctccagaaagctgcgctgaatggcagaatgctagtgaaaagagcgactatctccggatagacaagaggctctggatgctagactcgttgttataatatgcctaatcatggagcattgcgtaaataagtgccaaattggattagaatgagaattcaggcccgagcgaccgggaggtgtcgtcctttggcagtggaaaacaaaaaaatcagcgagaactaggaaaatcagaaattcggcgaactaaaagtctaattagtaccctatagggtaccggagcgcaaatcatccgggcgcaaagtgccgaatatcgccactttaaggaaacgcacgatcaagggaaaggggaaggcgaaccgaaactcaagtcacagaacttccgatgaatttggttggaaaccatagtgatgggacagggctactgctgaaagatgaacaaaacgaaacgacccgaactcgcggatcatccctaattctattcccccggtgagccctattcggatgctataggagtctgtcaaatacatcgatggcgaaattccgaaaattcaggaggcccagtaacaaatcccggcttttacccaatcgccgaatgggaggggtcaacatactacgattgccaataacaaccgcatttggcatgagggacacgccattcgaagaatctagtctcagattagcctcgtgcgaacaatttccatatccccaacaggaggc

SEQ ID NO: 495366 - DNA, 1255 bp, Homo sapiens
  misc_feature (629)..(629): n is a, c, g, or t
agcggacaggactcctactctgccacgccccgtcgtagctcgtgtctgctcgacgcttcgtgggagatatcgctatcggacttatatatcctccaatagttggtgatagaaggatactgtacaagtcgtaccaacattacttccacgaggcacctggagtcccctggaaggagcctggagaaccaaatcactaagatttttactaaccgaaattagatctacccttgttcaatggcacgatggtgatggacgcgttgacagacaagtgattgtgattgtagacggagattggggtgtgtgttgccatagtaacagatacacaaggagggcctcggggagaggacgaagagggagagaacgccttgcgccgtacctatgtcagcgagccctcaggaaacgggaggtgagtcggacctcgactaggacgacgggaggtgactaaagagtaaagggtcctcccggaaagacgcgaaaagcaagtgcaccgcgttaaggggctcccgcatggcatagtatatacaggaccacgttcccttagtacatgggcagcgtagggtaaatctcgtctgaatggaggatgaaccgttaacctgctttaaaggctccctagagggccacgttgaaatgcnccgtatacgcagtacaccccatgtgtggaacccacatgcgaactcgcgtaagaactggggcaccccagttcgtaccctcggggcggcaccgcacaaattacaccatgggtaaccgtccgtgatgcctcgaaattcagaaacgttcccatcgcggggaacatcgccatgtggtgggaccgccccaggaacaacgctctggtggaacaccccactgggcagatctccgtgtaacaaggaaaccctggtatgggtgaaccttcggtgcgttaccctgtgggtggacctctgtgtcgccatcaaaaatcaccgctatgcaacgctaggggggaaagacatcgctttaggttacgcgtagttccacctccccaacagggcataaggtgctaaccagagaccatttcgcgatgaggaagccgagccctaggccgaaaattcccattgggaatccggaccttatacctctggaaaattggcaacgcgagagagttgtttgtcccaatggaggaaattccggtcgcacttaaattccgtaggggttaccgattggacaccccacatgtgggaaaaacccgcgacacgaaatcgcggttggtgaaaccttccctaaacccccgaagtggaaaccg

SEQ ID NO: 495367 - DNA, 257 bp, Homo sapiens
tcaggaggttccgtccgaataacgttaggtggtagtgttactggccttggacagctgtgcatatgtttgaatgagctagatccaaacgtggtcgtgcttaaatcaaaaatgggataatttttaatattgatgtattaatcacacagtgtgctctctgaagttctcttaagccttcagtttatactcttaattttctttctgagctggggaactgactttgcacttgggttacacagaacattggtttccaatttagt

SEQ ID NO: 495368 - DNA, 247 bp, Homo sapiens
ccatggtttgctgtttgttactcatattaatgctgtcataggcaatagggaacttggtattcacttataagaagtaacagcaggtgcagggcatggtggtgtgtacctgtagtcccaggcgcctagagaggctggggcaggagggtcacttgagctcaggagatcgaggctgcagcaagctgttaccttgccactgcactctgcctgggacacacagtgagaccctgtttgaggggaaaagaccctg

SEQ ID NO: 495369 - DNA, 489 bp, Homo sapiens
  misc_feature (36)..(36): n is a, c, g, or t
  misc_feature (41)..(41): n is a, c, g, or t
  misc_feature (484)..(484): n is a, c, g, or t
catattttttatcactggagcacgcgccggttccgncccgnaaaaaagcaagtagcgccccccccaatagagccgcgaggtcactcctttaagctccccgggcttatcatttgtagaatcgggatcgtaaacggtgttgcaacggtgaagcagattacactttctctcagggaatagtttagcccatgatagggatttaaggccccctcgccaagggaatgtggccctggagggcaagcattcggcacaagggatggattctccttggattatatatggaaggcctggtgggctttggtagggggttacataagccctactgaggccttaaaaaaaaccatcctctcccttcctacaaaatgaggacaagatccccttacaagggaggaggggtgccctttcccatggtgtccgcccccctgtgatgtgaatataaaccgcccaaggtagggaataaacctggccctcggtcttgtggtttgtntgcct

SEQ ID NO: 495370 - DNA, 153 bp, Homo sapiens
tgatcgcgggcacagcgatctctagcgatagtcagtagaattagaattgtgaacgatataagtgtagagggaaggttaactgtttgatattgctatggtggcgcttccaattcggtgcattattcggtagcccgcaatcaagcctggaaaggc

SEQ ID NO: 495371 - DNA, 1497 bp, Homo sapiens
gacgtgggcgtcgttaagccaagtggtgccacccggtcatccgggcacgcgtcccgggtcatcagtgacactggatgcggtgcgccgagattctgtctgagtatgcgcggcgccttatcctgtacgggtgcacagtgtagccacctttcaatgtgcgagccccgtcggccgaccggaccccgattggggagacttagttccccgtccttcgcttgctcactggcctgcgggaccgtctcagtgtgctggcttgggttgtgtgggctcgatctagccgcgcttgatggcgttctttctgattcgatgttgcttgacttcaatggtcggtcccttaggtgcgaaaggctgttcgcaggacccttggcccgcggataacgtcatccggttgagcctcagtcagttgcattgacgcggcccccgaatgggttggtgccggcgttttcattcttttcacaacggcttgaggttccaggttgggggccaactctttttacggcgccctggctcggtcgttagctttgggtccctgtgtagtatggatacagctttggcggccgagttcgctgtgggttggctatgtgacccgccaacggcgctcgcgttagaccgggctcaccgggagcctggtgtgcttatggaggcttcgccattggattggacttagttggggtaccctggcccgttttaccatgccgaccatcgggggtttggttgccaggttaggcgagcaagcggctcacagtttggactccagcggcaaggtggcacccttagggacactttgggagcttaacaccaactcttggggattggcaccctttggcccgttgatgagaagcacgcaacattatggcttacagaacgtaactttgggctgtgcaaaggattcccgcgtcaaaagttgccgcatagcttcaaccgttaggagggttagagagagagggtctaggcgcccaaagagcaattttgccgttggtcactttgagacacgcgcagaccgcgcctagcgcgggagatttgtgcccggcccatactcccaaagggcgacgctgcgaaatagtggactttcccgatctggcggttatgattcgcccgcttttggttcgcgctgggaccccactttgtctttggtaacggcggctacagaggggggcgttaggaccattagttcgccttgagaggggtgtattagcggggggggactcagtttgagtgttgtgtcgcccacagccccgctttagaagtgggtgcgcggccgagcatgaggcgattgtgacctgagaccccaaagctgtctggtgcggtcaacgccccggactgtgtgtttcgcgacggctggtcatttcgtttgagacagcttctgcccccctgtttgtgaccaggttgctcctgtaggaccgcccctttatagttgccctttgggtctctccatacgcccatgtggcactgtcgtgtgcgtatggccgcacgacgtcacagcgtgcggcaactccaggg

SEQ ID NO: 495372 - DNA, 160 bp, Homo sapiens
gagtgtgatcgggcgtcgagtagaatgggggaagaatggaagacagggagacgggataagagtctggagccctgtatgctaggagctctgtgatcttaaggtgaaatatttaacatgtgaaagcatctgtaaaatatgtctaataaatacccactgtctt

SEQ ID NO: 495373 - DNA, 392 bp, Homo sapiens
gctcggcctgttgtagcacaatcttggctcactacagatctctgcctcaggctcaaaggatccttccatctcagactcaggattagctgggacaacaggcacataccatcatgcccaggtaaattttgtattttattggtagagatgggatttcatcatgttgcctaggctggtctctaatttctaggctccagcgatccaccctcctcagcctcccagagtgctgggattacaagtgtgagccaccatgtgtggcctgaaattatattcttagtaactattgtcatcctacagtgatatagaaaactagaacttcttattcttatctagctgtaattttataacctttaacaaatctctccttatccatcccttctccctatcattcccag

SEQ ID NO: 495374 - DNA, 756 bp, Homo sapiens
  misc_feature (454)..(454): n is a, c, g, or t
  misc_feature (466)..(466): n is a, c, g, or t
  misc_feature (485)..(485): n is a, c, g, or t
  misc_feature (498)..(498): n is a, c, g, or t
  misc_feature (528)..(528): n is a, c, g, or t
  misc_feature (540)..(540): n is a, c, g, or t
  misc_feature (559)..(559): n is a, c, g, or t
  misc_feature (592)..(592): n is a, c, g, or t
  misc_feature (600)..(600): n is a, c, g, or t
  misc_feature (604)..(604): n is a, c, g, or t
  misc_feature (606)..(606): n is a, c, g, or t
  misc_feature (608)..(608): n is a, c, g, or t
  misc_feature (631)..(631): n is a, c, g, or t
  misc_feature (633)..(633): n is a, c, g, or t
  misc_feature (641)..(641): n is a, c, g, or t
gacacggctgtgcccacaggaacaatggacgaataccagttcgtgctgtgcccaagcacagacgctgcaagatcttcaacctcgtatcgcggcaaggaaagaacatctgtgggtctgacagcgacttcgtcatctgggatcaagatgctgtgaagatcgtctctgccaagaaccaccagtctgcggcagagtacaacatctttgaagggatggagctgcgcggggctcctctggttgtcatctgccagggcaagatcatgctggaagatggcaacctgcacgtgacccagtggttcactgacttctagtctgtgaaaatatgcattttatagtaatatgtatagacttatgttacttagaagatggcagacgtgcatgccgtcccaaggggcatgtacgatgggcctgtgtttgacctgaccaccacccccaaaggtggcacccccgcaggctntgctcggggctntcctactcggccgaacccncctgtgaggaatnttcatcagtcgggatttagcctgtcaggcncccaagtggatnagggggttcgctcagccancaagcgcatcgtggcgcccccaggcggccgttntaatatcncatntntnagttaagcaagccttcctcaaananaggggcanaagcaaaaaaagattgtttttaagccaaaatggtccccccatatttaaaaaggaaagaccaagatcataaatattaatggtgaaaaccctgtagtaataaactttcatatgccca

SEQ ID NO: 495375 - DNA, 96 bp, Homo sapiens
agcgacatcatggtattccccttactaaaaaaagtgtgtatctcggcggaggagcgtggaataaaagaggaaagaaggaaaaaaaaaagaattaaa

SEQ ID NO: 495376 - DNA, 115 bp, Homo sapiens
  misc_feature (20)..(20): n is a, c, g, or t
  misc_feature (66)..(66): n is a, c, g, or t
  misc_feature (82)..(82): n is a, c, g, or t
ccctttttacccaagcagcngcggtgtggagaagtaggtacattccgtttcctgtgacttaacganggaacattccacaacnccttcctttccattcattgcatccacaagggag

SEQ ID NO: 495377 - DNA, 166 bp, Homo sapiens
ttttttttatttaacttttttaatgggttttaaaattcttttacaaatttttggtcaagttgtttccattaaaaaggactgattttaaaactaataacttaaaactgccacacggaaaatggggaaccaaagtggtccacaagacattctcctttccttctgaggg

SEQ ID NO: 495378 - DNA, 140 bp, Homo sapiens
gtgtatacacagacacccgggttattaaaagaaaatgagattgtgagttctgttatggctcagtgggctaaggacctgatatagtgtccgtgaggatgagggtttaatccgtggcctcaggttaaggagtctcacggaga

SEQ ID NO: 495379 - DNA, 358 bp, Homo sapiens
catttcctctcctgtgtattgcctactcataaatctttccattttttttcttttttgtaattggggttgctctatttttctgctctattattggggttgatatgcaggacttccttttctttcctaggtcagggaccaggaagctatggccccctagatcaattctggcctgcctcctgtttctataaatcaagttgtattacagcacaatcacacccagccgggctcagtggttcatgcctgtaatcccagcactttgggaggctgaggcaggagactcacttgaacccaggaggtggaggttgcagtaagctgagatcacaccactgcactctagcctgggtgacagagtgagact

SEQ ID NO: 495380 - DNA, 1279 bp, Homo sapiens
tggggattctcaaatgctggctttattcttacacaatcctggtgacaaaattaatataaaaaaggtgagcatggctccagtcttttccctcttatctacaatacaaaagggtttggtctggaacaagtctgggtgttttttctctttttacaaatggtcccttagctggcgatcaacgggagtaacgatgggagaaaaagtctcaccatttacacaaaataatatttaggggagaaataaacaccgtttaaggcatctctctctccgccagttaaacggggggggtgaagtcccaaggtgcgggaagcttccttggggcgctcccttatttgtgcccacagagaaacttgtgcaggcggggccccccgggcggggcctctgggcgtgggcgccagtgggcaagaggggcgcgagctcccggcctccgggggccggctcagggtcctgagagggtattgggggtcagtaggctggaggttctcttccccggcgccccgggggcgagaggctgtaatacccgggacagactctggggtgagtcccccgaggggagccggcgcagaaaacgggggcgggtctgtggggacacacatggcctttagaaaaaaatctgcgcggggagggccgggggccaaaggtcccccccggggtagaacctgggtgtccccagcggcggcgggggtcgccacgctatcccacgttagcttcacgcgcagagaaggtgtcccacccaaaaccttttcgtggggggggatcctccccgggggggttggcgcccgtttgtagggcctttggtcccaggggcctcctttggcgcccccggggcgaatgtttttgtgagcacgccactcgcgccagaattacggggaacccggggaaaaaacaccgaggcaccggggccccccttattggcgggaggaccatttaacccccgaggaggggggccaagacagacgagagaacatgcctggagaaacatcacggagaggccaccgcgaaagtggccgaagatagactaagccactggagccggcataaaaaaatacccctagggggccccaaggttaagcgggaccccccttctttgtcaacaggggccccaaaggaggcgccaaaaaagcaggcgcgcgcccgtaaaacagctggcggggaaacacccgcgggcacttcggagagcacccgcgtgggcaacatgaaaccaccagagatgtccgggcaacacaaaaacgaaagtaggaaccaatgcggaagttagtacaaactacaaatagtactacaa

SEQ ID NO: 495381 - DNA, 966 bp, Homo sapiens
  misc_feature (1)..(1): n is a, c, g, or t
  misc_feature (120)..(120): n is a, c, g, or t
  misc_feature (122)..(123): n is a, c, g, or t
  misc_feature (125)..(126): n is a, c, g, or t
  misc_feature (128)..(130): n is a, c, g, or t
  misc_feature (132)..(132): n is a, c, g, or t
  misc_feature (135)..(135): n is a, c, g, or t
  misc_feature (137)..(138): n is a, c, g, or t
  misc_feature (141)..(141): n is a, c, g, or t
  misc_feature (143)..(144): n is a, c, g, or t
  misc_feature (148)..(148): n is a, c, g, or t
  misc_feature (159)..(159): n is a, c, g, or t
  misc_feature (165)..(165): n is a, c, g, or t
  misc_feature (180)..(180): n is a, c, g, or t
  misc_feature (189)..(189): n is a, c, g, or t
  misc_feature (191)..(191): n is a, c, g, or t
  misc_feature (203)..(203): n is a, c, g, or t
  misc_feature (212)..(213): n is a, c, g, or t
  misc_feature (215)..(215): n is a, c, g, or t
  misc_feature (219)..(219): n is a, c, g, or t
  misc_feature (233)..(233): n is a, c, g, or t
  misc_feature (250)..(250): n is a, c, g, or t
  misc_feature (259)..(259): n is a, c, g, or t
  misc_feature (284)..(284): n is a, c, g, or t
  misc_feature (311)..(311): n is a, c, g, or t
  misc_feature (314)..(314): n is a, c, g, or t
  misc_feature (318)..(318): n is a, c, g, or t
  misc_feature (321)..(323): n is a, c, g, or t
  misc_feature (333)..(333): n is a, c, g, or t
  misc_feature (338)..(338): n is a, c, g, or t
  misc_feature (348)..(348): n is a, c, g, or t
  misc_feature (359)..(360): n is a, c, g, or t
  misc_feature (363)..(363): n is a, c, g, or t
  misc_feature (368)..(368): n is a, c, g, or t
  misc_feature (373)..(374): n is a, c, g, or t
  misc_feature (376)..(376): n is a, c, g, or t
  misc_feature (383)..(384): n is a, c, g, or t
  misc_feature (429)..(429): n is a, c, g, or t
  misc_feature (434)..(434): n is a, c, g, or t
  misc_feature (467)..(467): n is a, c, g, or t
  misc_feature (535)..(535): n is a, c, g, or t
  misc_feature (581)..(581): n is a, c, g, or t
  misc_feature (679)..(679): n is a, c, g, or t
  misc_feature (694)..(694): n is a, c, g, or t
  misc_feature (696)..(697): n is a, c, g, or t
  misc_feature (782)..(782): n is a, c, g, or t
  misc_feature (788)..(788): n is a, c, g, or t
  misc_feature (790)..(790): n is a, c, g, or t
  misc_feature (792)..(795): n is a, c, g, or t
  misc_feature (798)..(798): n is a, c, g, or t
  misc_feature (800)..(800): n is a, c, g, or t
  misc_feature (873)..(873): n is a, c, g, or t
  misc_feature (920)..(920): n is a, c, g, or t
naattcccgggatcgctcatatagcggctcccgggggcgcagggaccgtgctccgccgtctccgccgcatcttccaccctcgccgccgccgcagctccccgcgctcgtgccaccgccgcngnntnnannntnaangnnaangnnatgngggaaaaagtnaaaatnaaggaaggaaaatgnggaaaaaananaggggaaaagtnttgggaggnnanaaanaaaaaaaatggaanaaaaaaaaaaggaaaanaaaatgggnaaagtaaaataaaaatggaaagganaaaagtgaaaaaaaaaaaggaaaaaanagnaaanaannnaaaaaaaaangtganggtaaaaatngaaaaaggaannatngaatntgtanntnatggaannttaggtaaaatatttaggaaggaaaaattagtgtttggccaatanggagnaggaaaaaactgcggcaaaggcgcgcactacanggagggcgcagagctggtggcacgctgtcctggacgtagtcggaaggaggccgagagctgcgactgcnttcagggcttccagctgacccactcgctgggggggtggcacggggnccggaatgggcacgctgctcatcagtaagatccgcgaggagttcccagaccgcatcatgaacaccttcagcgtggtgccctcgcccaaagtgtcaganacggggggggggggngnnaacgccacgctgtctgtgcaccagctggtggagaatacggatgagacatactgcatcgacaacgaggcactctacgacatctgtntccgcncncnnnngcngnccacccccacctacggggactcaaccacctggtgtcggccacatgagcggggtcacacctgcctgcgcttccngggcagctgaacgccgactgcgcaactggcccgtcaacatggttccntttctcgcctgcacttcttcatgcccggcttcgcaccctgaacagc

SEQ ID NO: 495382 - DNA, 370 bp, Homo sapiens
ttttattaattctttaaaaatcaccctattacttatagagattaattatcctcattctcgattaccctcatacatgtcttatgtttgattctgtatattaaattctgtgaatcattatttaatcaaatctactaaagattagaaaaaattctagcaagacttataatcattgaaatacagaattaaaagtttatacctacctaaaagtcctatggcctattatttagctgtgaattagacacgtcaggagttataaatctgcacttttagaactgtatattaaatatgctaattgcaggaagcgaaatagtgaaggaatactggggttagtaaaagattaatttaatatataaaatttatggaaaaagga

SEQ ID NO: 495383 - DNA, 310 bp, Homo sapiens
tcgtttatactggggtctcactctgtcgccgagccgggagtgcagtagcgtggttatagcttactgccatcacaccatccagctaaatcttcggctttaagggtgtgtattctaatagaattttactggttcttcggaattggacttacataccctaatttccacttatgcttctcctttcttggcctcctaaaagtgagtagcatgattttagcttacaattagttgattcgtacggttctcagctaatttggatgttatgatcagccaggcatggtggttcacacctgtagtcctagcactgtgctcg

SEQ ID NO: 495384 - DNA, 209 bp, Homo sapiens
cggcgcccagccctatctctgcatcttcaagtattttttgcaagtagtatagttcaacactacccaggggtagggtataaatgataaaaatatactcactatatgaacatacactgtatatcaagaattcatacataatatcaggggctggtattctatacatttatcccttaaaatatttcacaggtcatgcacattaatgcaaagcc

SEQ ID NO: 495385 - DNA, 867 bp, Homo sapiens
gggtttttccccccaccacgctttttgacccaccgcacagaaaccattggcgcccctctgcgtcgtggttgaaccctcctgcgggcgggatgtttttacagacctcactgcacctgcgttcgtggggacccacaacaagcctcatgctggttcgccgttcttgtggtttatttctttgtagtcgccagacgcacgccaatgacacccgctgcaggtgggtacaggaccacctttttgtctgcaccacaacgcaccgccgaggtggtgtgattcccggcggggccagcacatttgttttccaattcgctgcccccgcgcgtttgatcaattcctcctcttatgagtttgttcgtccgtcgcgagctaccctactttgcttggtgagtgctctcttctccacccgtggctcgactagtatagtactctctcttcttcgatgaggagttcgccattctgtttgttgtctactacacactaaatatgattttttgagttgagttctttttacaaaaccacctcttaatatactgtgctgctgacccccacctccttctatactccatcctggtggaaaaaatctttcgtctgctgtatgaaaacaacaaggctgtttcttgctacaacaaataacaattctctcctcctactaccagccgcgggccaacataatctttttcaccacaccccataatcactcttcttaaaaagtttgtaccaccacaccaacacaatgcgggggttcctccccccccccccccctcacaacaacccctttttccccgaccacaccccctttttttaccctccctttcccccttttccttcttttcccccccccccccaacttttccgggtttttttttttta

SEQ ID NO: 495386 - DNA, 786 bp, Homo sapiens
  misc_feature (419)..(419): n is a, c, g, or t
ggggggccacgtttgcgtccgcgccatcaggcccgagatagcggggaggtccgtttttcagtgtatggttttccctgccaaacggttctagtcttggtgccatcctatggagggcgtgcagcatgaggatcttttcctagccggcacttggcttgccgagcctgagaccagaatggctgcatggctagttgcgatcggattcagcccgaggagaaggcagcgcattgggcacagttcgtctttgcccgggactgctataggctaggcaattggctggtctgtctgatgataaggaagattatgttgcgggacgcaaagattggaaatatacccattggaactcactatttccgtgttggcgataacgaactagcagaagagggatagaagcccgagtgtcttgcaaatatggatctcantcggaatccttacccgaatgttcaagcttgtatacatctctcagtcaacggaggactatagcatgtgcgttgcgtgcgtggaatccgtggagctgcaatgttggagacttgactatatttgaagactagttgaccaggtcgtggttcaattccagaattctttcatattagtgaccacagaaagtgtagcaagcgaagaatgggaaacacaagtcagaagctttaaggatgagtggactcggtggatatgttcatacggaattgggcactttgagggaaggcttcctaataagcccattggtgtaggccctagggatttgcattagagcggtttgaaatgtgatctatctccattaaacttgggtta

SEQ ID NO: 495387 - DNA, 351 bp, Homo sapiens
gaagggatgaacgtctaaggcagaatagggaattaggataaccacgggttaaggcacaagcataagaacagcaggggcagccacttctaggcaacattaggcagcatccaggccacatcctccctcctataataacaagacagaagtttccacttcagcctctgattggtcatgggctgtctccacttcagcctctgattggtcctgggctgtctccacttcagcctctgattggtcacagggccacccttcatagggtgtagccaattagaggcctctaaagggcacctgaggtgttgccaaattattctagcttaataaaaacctcagttggggtgctcttgaccactt

SEQ ID NO: 495388 - DNA, 266 bp, Homo sapiens
  misc_feature (15)..(15): n is a, c, g, or t
  misc_feature (46)..(46): n is a, c, g, or t
  misc_feature (106)..(106): n is a, c, g, or t
  misc_feature (121)..(121): n is a, c, g, or t
  misc_feature (129)..(129): n is a, c, g, or t
  misc_feature (183)..(183): n is a, c, g, or t
  misc_feature (245)..(245): n is a, c, g, or t
gattgcaggcatganccactgcgcccagtcgagtggtaatatgttnaaaggaaacctttttctgagcaggtctcaaaagagaggttaaaatactgagtagaccatnctgtaaacagatgtnctgttatncgggctttcatattccatttataaagcacaggcagagctcagagtagatttaangtaactctgaagggcactaggattttcagaatggtaaataagcattggcttcaccttaaatncaaatctgcattgggcttgta

SEQ ID NO: 495389 - DNA, 133 bp, Homo sapiens
  misc_feature (44)..(44): n is a, c, g, or t
tactttccacagggtctgagaaggcacacagtcgtttcttcccnttctgtcagacataattcctcggtttggccttctgacctctatatagtctgataatggaccggccttcattagtcaggtcacgtaagca

SEQ ID NO: 495390 - DNA, 387 bp, Homo sapiens
tcccgacagaccaacagccatagttagggtcaattttacacccaaggccagcaggaagtagttggaggataagacccctgccctagtgccaaaaacttgtcattgttgttttgtcaaaggggaaaaggggagtttaaggaaggattcccaggtgggggagggtcccctgtggggagaaacaataaccagttttttttaaaaaagggctaatcacaaacaacccatggtcacagtgcccttgttccacaaatagccccctccagcatgaccctataaattttccctccagtccctcattttttggcaaaaagccccttttttattgtactgtttgttgtaaccttgcaatgtatttaaaactttttttagtaaatctcccttgcttta

SEQ ID NO: 495391 - DNA, 1000 bp, Homo sapiens
  misc_feature (296)..(296): n is a, c, g, or t
  misc_feature (391)..(391): n is a, c, g, or t
  misc_feature (840)..(840): n is a, c, g, or t
gctgatgcaggcgctcttagctcggagcgggccgatggagaatccggtggaggaacgcgccggcgatgctaccatcatgtcctgggcacttacaggaaggcttcggctgcttgttcaccaaccgattcgatgcagttatttgacgtacgaatcaggaccccgttcgaggtgcgtgaaggctagtcagagaacacatgaaaataagatagcccggcaggaggagcggcgttgaggggccacttggagagccttagatgagcagctaggctctaggccgatggggcctatacctatgnttcctaatcgctggctagtgtcaaatacatgcatgcagcgaacggaagtcccgaaaaaggaccgggagagtaacccgagtgtgccagcgcattgngcgtttggacagctgtgttgatctagatgcaaaggagcgaggaccgacatactcgagcacgtgaggcagcgttaccagagagacgaacgcgtacactaaggaacgtagctctggaaaggaacgtaccgtgtatcggacatgggtgtctagcgggatgcacatggggggagaagacttaccttgtggaactacgcattcgcatcacgaggcactaatgggagacttgcatcacaatcgtctcgtccacgcagttgtatagtggcgcaccaaaagttccccacgtttgtacaggtagaccattcgtgctagagatgcaagggcagacagttgggtccggcatttagaaagtacggaaaggggaattgatattggggaaaaaggaaccttaatctcggtgggggttccaataggggctggaggtggatgtgcgaagagcaagaggatgggangaggaggaacacggttgagaacggatgggtgtattttagggttaaagacagaggaagaggcattgggagattcataggattttctccgaagtggcataaaaatagttgacaagatagttggcataggagaaaataaggtgtgtgtacaagtgttcgagtt

SEQ ID NO: 495392 - DNA, 251 bp, Homo sapiens
aaaatttttcaggggggggcccccccaaagccaaaccttggggtgggttttttccctttaaaaaatttggataaaactggaagggggggggggggggcctgggggccccttttattaaaaaaaagccttttattgttaaaaaaggggaggttaattttcccttatggttgggggggaaaggtttaagctgggatttttttttaaaatggtaaacccttaattttttataaaaaactattttgggtttttga

SEQ ID NO: 495393 - DNA, 222 bp, Homo sapiens
atcttgctcgtcgcccaagctggtagtgcactgccacgatggcggctcatggcaactcagccaacccctcaagtgatcctcctgcctcagcctcctgagtagctgggagtgcaggtgtgcgccaccattcccagctaattaaaaatttttttttggtagagagagggtctccctatgttgctcaggctggtctcaaactcctgggctcaagtgatcctcctg

SEQ ID NO: 495394 - DNA, 238 bp, Homo sapiens
tttggggggggggggggggggggggtgggtcccccccccccaaaatggtttttggccatcgggggggttgtttaaaaaccattaagggtttcctttcccagaacttttttttttttcctttttttcccggaaaaagtttatgaattttttcgtcccaacccaagattttgggaaaagggaaaaaaaaaaagtttattaattttttttgggcctttttttaaaaatttaggggtttcca

SEQ ID NO: 495395 - DNA, 640 bp, Homo sapiens
  misc_feature (436)..(436): n is a, c, g, or t
gaccttagctgctgaatcagctttctggttactatgggcaacagccttgttttctttttgatgtcctttgcagtggatcacagctacctgctgagccactcccctgcttctcaccttgaacacagatggcagctcttcccatcattccaaaccttggggattgtccagccaaattttcttcagacaccatagcttcacccgccctcttcagggagaagatgcaagggcagctgagatctttggaagcccaaatctggcctctctttggggtggactgagagtgggaactcgactctcttttccaagtgtcatgtttatcttgttcatcgttatattacctccagtgcctggcacatagtaggcactacagactggcacatcgtaggtgctattagtgtctgtataatgggactcttgaggttgaagcaattagcanaaacctgccaagcaaaaggatggaaaactgaccaccaagaaagaaagaaagaaagaaagaaagcaattgtggctttgagctctaaacgcataaggcaagggccccagtttgggcaattttaatacaacagccattttgctccaaacaaactggcactggaaacttcctctgcctcttgacaaccggttctctttctctgtgggc

SEQ ID NO: 495396 - DNA, 483 bp, Homo sapiens
gaactgggactaccactctttgcagttcccaatgttttccatgaatgatgcaattcatgtacaagttgttaggtaaaacatcggtgagtttgcaaattaggtactattaccttatttctgtattatgtagaaaatcaggagccatgccctctagttcctttcagcttaggctacactgcaaatgatactgatgacttcaacaatgatgatgaaaaatgaagacagtgggtccagaagaaaacaacaaagaacattaaaaggaatcacttttccttcctgtatgttttcatgaagatatgagagcactgaagaatagcaattgcagagtgactgaggatggtggattcagttggggcaagataaagtttgtaacacttctattgattcttcatcggtgacttgttaacagacaaatggaaaatgtcttcttattagatagggacctggaagggtccataaataaataatttgtctttgaaacgc

SEQ ID NO: 495397 - DNA, 965 bp, Homo sapiens
agaagaactacggctaagagagtctgggtttcatcggagaggcatgagccagctgtttacacctgcctgtgctggtagttggagtgccgggagagtggtcctgtagcctgtgccgccctgccccgccatggggctcctgtcggaccctggttcgccggcgcgcgctctgcccggcctagtgctgcgcctcaactgcgccgttgtgctgtgctgagctacgtggctgggcatcagcctggtacttggctgctggttttaccctgcctgctgacccagctgcacttacattgtcggagaacgccatgggctccaccatggtggagtgatgcagttatgcgggcgggagaccgtgcccgggcttttgccctgtggacttcgccgcccaccgcaagaatgtcggtgggctctgccagtgtgcctggcttgaacgtgacgatgcgtgtcatatagggctgggaggtctacacgcagagattatctcccggaaactgcccttcccagaatgagacccacgagctgctatatggtgtcgtggcaccaaacgtgtacggcaatcctgcggggcccggcgatgctgccagcaccgagtcgcttgtgcataaccgatgccctgtggctctgactctaccaacagccaggctgtggggctgctgctggcactggctgaccacttccgggggcagatatattgggccaaaagatatcgtcttccatggtaacagacaccatgaccgtactgggcactgaggcttggttgaagcctacaaagaatgtcatgtcactggcattgcaagtcgtatcctctagctggcgagctgaggcattcaggaagccgttgacctgactgagcttagattgtcacaacccaaagtgcggggggttacggaagctcacatgcggatatatacaacttcaagtgtgttgcacatgagccagcgagaaatgtgcgcaggaaaattacattg

SEQ ID NO: 495398 - DNA, 955 bp, Homo sapiens
  misc_feature (8)..(8): n is a, c, g, or t
  misc_feature (45)..(45): n is a, c, g, or t
  misc_feature (55)..(55): n is a, c, g, or t
  misc_feature (193)..(193): n is a, c, g, or t
  misc_feature (244)..(244): n is a, c, g, or t
  misc_feature (255)..(255): n is a, c, g, or t
  misc_feature (270)..(270): n is a, c, g, or t
  misc_feature (273)..(273): n is a, c, g, or t
  misc_feature (288)..(288): n is a, c, g, or t
  misc_feature (290)..(290): n is a, c, g, or t
  misc_feature (335)..(335): n is a, c, g, or t
  misc_feature (343)..(343): n is a, c, g, or t
  misc_feature (357)..(357): n is a, c, g, or t
  misc_feature (372)..(372): n is a, c, g, or t
  misc_feature (382)..(383): n is a, c, g, or t
  misc_feature (401)..(401): n is a, c, g, or t
  misc_feature (422)..(423): n is a, c, g, or t
  misc_feature (486)..(486): n is a, c, g, or t
  misc_feature (491)..(491): n is a, c, g, or t
  misc_feature (503)..(503): n is a, c, g, or t
  misc_feature (508)..(508): n is a, c, g, or t
  misc_feature (535)..(535): n is a, c, g, or t
  misc_feature (556)..(556): n is a, c, g, or t
  misc_feature (559)..(559): n is a, c, g, or t
  misc_feature (561)..(561): n is a, c, g, or t
  misc_feature (566)..(566): n is a, c, g, or t
  misc_feature (572)..(572): n is a, c, g, or t
  misc_feature (576)..(576): n is a, c, g, or t
  misc_feature (579)..(579): n is a, c, g, or t
  misc_feature (597)..(597): n is a, c, g, or t
  misc_feature (603)..(603): n is a, c, g, or t
  misc_feature (605)..(605): n is a, c, g, or t
  misc_feature (612)..(612): n is a, c, g, or t
  misc_feature (622)..(622): n is a, c, g, or t
  misc_feature (632)..(633): n is a, c, g, or t
  misc_feature (638)..(638): n is a, c, g, or t
  misc_feature (651)..(651): n is a, c, g, or t
  misc_feature (654)..(655): n is a, c, g, or t
  misc_feature (665)..(665): n is a, c, g, or t
  misc_feature (675)..(675): n is a, c, g, or t
  misc_feature (678)..(678): n is a, c, g, or t
  misc_feature (696)..(696): n is a, c, g, or t
  misc_feature (805)..(805): n is a, c, g, or t
  misc_feature (810)..(810): n is a, c, g, or t
  misc_feature (817)..(817): n is a, c, g, or t
  misc_feature (822)..(822): n is a, c, g, or t
  misc_feature (862)..(862): n is a, c, g, or t
  misc_feature (876)..(876): n is a, c, g, or t
  misc_feature (933)..(933): n is a, c, g, or t
agcctgangccccagcccacaccttcaccagggcccaggagccancatgtggcantgtccactggggctactgctgttgctgccgctggctggccacttggctctgggtgcccagcagggtcgtgggcgccgggagctagcaccgggtctgcacctgcggggcatccgggacgcgggaggccggtactgccangagcaggacctgtgctgccgcggccgtgccgacgactgtgccctgccctanttgggcgccanatgttactgtgaccnctnctgcaaccgcacggncnccgactgctgccctgacttctgggacttctgcctcggcgtgccancccctttncccccgatccaagnatgtatgcatggagntcgtatctannccagtattgggaacgtanatgggacaactgtaaccgttnnacctgccaggagaacaggcagtggcagtgtgaccaagaaccatgccttggttgggttcccagnacatngatacaatagcncatcnaactcaggggcaacttattggctcggncaggcttggggaaccaacagncgncnttttngggggncatnganccccgggatggaggggcntttcgntnaccggcntggggcaccnacccgccctnntttcnttcggttctaagnaannagctatgtanttttatacantgntgaacccaggggaggtgnttcccacagccttcgaggcctctgagaagtggcccaacctgattcatgagcctcttgaccaaggcaactgtgcaggctcctgggccttctccacagcagctgtggcatncgatngtgtctnaatcnattctctggacacaataacgcctttcctttgccccagaanccttctgtcttgtnacacccaccagcagcagggctgccgcggtgggcgtctcgatggtgcctggtggttcntgcgtcgcgaagggtggtgtct

SEQ ID NO: 495399 - DNA, 370 bp, Homo sapiens
  misc_feature (2)..(2): n is a, c, g, or t
gnttccgtcaaaagaccaagacgaccccggccaacacagcgaaaccccgtctccaccaaatacacaaaaaagcagccggacatggtgggggggtgcccgcagtcccagccacccggtaggccgaggcaggagaatggcacgaacccgggaggcagaacttgcagtgagccgaaaccacaccactgcactctgcactccagcctgggcgacagagcgagaccccgtcccaaaaaaaaaaaaaggcctatcctccctaagcttcaagccgtggtttttcccacattaatagacaaacccaggaaaaggagctgttccccctcgggcttttgatgggcctcaataagacctgccaaaagccggggcggcattg

SEQ ID NO: 495400 - DNA, 914 bp, Homo sapiens
  misc_feature (8)..(8): n is a, c, g, or t
  misc_feature (45)..(45): n is a, c, g, or t
  misc_feature (55)..(55): n is a, c, g, or t
  misc_feature (193)..(193): n is a, c, g, or t
  misc_feature (244)..(244): n is a, c, g, or t
  misc_feature (255)..(255): n is a, c, g, or t
  misc_feature (270)..(270): n is a, c, g, or t
  misc_feature (273)..(273): n is a, c, g, or t
  misc_feature (288)..(288): n is a, c, g, or t
  misc_feature (290)..(290): n is a, c, g, or t
  misc_feature (335)..(335): n is a, c, g, or t
  misc_feature (343)..(343): n is a, c, g, or t
  misc_feature (357)..(357): n is a, c, g, or t
  misc_feature (372)..(372): n is a, c, g, or t
  misc_feature (382)..(383): n is a, c, g, or t
  misc_feature (401)..(401): n is a, c, g, or t
  misc_feature (422)..(423): n is a, c, g, or t
  misc_feature (483)..(483): n is a, c, g, or t
  misc_feature (488)..(488): n is a, c, g, or t
  misc_feature (495)..(495): n is a, c, g, or t
  misc_feature (498)..(498): n is a, c, g, or t
  misc_feature (520)..(520): n is a, c, g, or t
  misc_feature (534)..(534): n is a, c, g, or t
  misc_feature (554)..(554): n is a, c, g, or t
  misc_feature (587)..(587): n is a, c, g, or t
  misc_feature (634)..(634): n is a, c, g, or t
  misc_feature (637)..(637): n is a, c, g, or t
  misc_feature (655)..(655): n is a, c, g, or t
  misc_feature (764)..(764): n is a, c, g, or t
  misc_feature (769)..(769): n is a, c, g, or t
  misc_feature (776)..(776): n is a, c, g, or t
  misc_feature (781)..(781): n is a, c, g, or t
  misc_feature (821)..(821): n is a, c, g, or t
  misc_feature (835)..(835): n is a, c, g, or t
  misc_feature (892)..(892): n is a, c, g, or t
agcctgangccccagcccacaccttcaccagggcccaggagccancatgtggcantgtccactggggctactgctgttgctgccgctggctggccacttggctctgggtgcccagcagggtcgtgggcgccgggagctagcaccgggtctgcacctgcggggcatccgggacgcgggaggccggtactgccangagcaggacctgtgctgccgcggccgtgccgacgactgtgccctgccctanttgggcgccanatgttactgtgaccnctnctgcaaccgcacggncnccgactgctgccctgacttctgggacttctgcctcggcgtgccancccctttncccccgatccaagnatgtatgcatggagntcgtatctannccagtattgggaacgtanatgggacaactgtaaccgttnnacctgccaggagaacaggcagtggcagtgtgaccaagaaccatgcctggtggatccaganatganaaaaganatnaacaagggaaactatagctggnaggctgggaaccanagcgccttctggggcatgancctgaatgagggcattcgctaccgcctgggcancatccgcccatcttcctcggtcatgaacatgcatgaaatttatacantgntgaacccaggggaggtgnttcccacagccttcgaggcctctgagaagtggcccaacctgattcatgagcctcttgaccaaggcaactgtgcaggctcctgggccttctccacagcagctgtggcatncgatngtgtctnaatcnattctctggacacaataacgcctttcctttgccccagaanccttctgtcttgtnacacccaccagcagcagggctgccgcggtgggcgtctcgatggtgcctggtggttcntgcgtcgcgaagggtggtgtct

SEQ ID NO: 495401 - DNA, 194 bp, Homo sapiens
ctgacaccaaaataggagattactgctgtataccttacaaaaccaaatgtaattacattatcttggtaaattaattagaagtatggaaagtacgataaggccttctgtaagacaacacaaaattaatattcaggaagctgtttgaatcatgagcgttgctgtcttgaaaatgaacacccttctgtcgtcttctc

SEQ ID NO: 495402 - DNA, 225 bp, Homo sapiens
  misc_feature (162)..(162): n is a, c, g, or t
cgctgggtgatctagaggatccgactgatctgtgctctagagtctaatttcctttatttttttttgagaagtgtttgtctgtactcaagcagtggatgatgaggcttgactcctgggtcaagcaatcgtccatgttagctgggacacaggtatgcgccacgnatctggttaatttttaaatgttttctgtagagatggggtctcggcagagggacagattggagt

SEQ ID NO: 495403 - DNA, 223 bp, Homo sapiens
gtaaatcatttaccttatcttagaaattaccaggttggataattactatatgagttcgtgtcttggttggaataaccatttgcttatattaagtaaaagttcagctgaagtgacaatcaacctttaatcttgtcaagcttctgtgtgagatattttctatctctaacatgcctaacatgcatattatactgagtttgtttgcatgcgagttctgtgccccttt

SEQ ID NO: 495404 - DNA, 231 bp, Homo sapiens
gggtcatccagaggttacttatcgtgttgcaccgcgagcttctatcacaaactggaggtacttcttcaaggtccacccgtgctggccagctgtccagaagggggatcgctgaggaggcagatggagaatgagcccccagttccaggtggccatcatatgcaggctttccggaacagtccttttcttccaggcccggagatccaaccttttttaaacacaaatctccttctt

SEQ ID NO: 495405 - DNA, 93 bp, Homo sapiens
agccccaaccagacctctctgtacttctgtgccagctctggactaggcaacaatgagcagttcttcgggccagggacacggctcaccgtgcta

SEQ ID NO: 495406 - DNA, 120 bp, Homo sapiens
caggagatggcagtctcactctggtccacccagtgctggagttaggctggcacgcatcttgactcgctgcaacctcctactcccaggtacaagcgatactcctgcctcagcctcccaagt

SEQ ID NO: 495407 - DNA, 386 bp, Homo sapiens
agctcccctgtatatgtatggatctgagtttatatatcacagtgagaattctattatggaccatgtcacgaacaatgccacagggatacaatattatggagaagtagtctagcttatagaagcttagggagagctgggttgtttgggttgtgactcagtgtcagttcgagataataacttcttggtctacggcacataatacttgttgtggggaagagactgataaataacaggtggatgcgacaaatggattctcccatcatgcggggtctgagtttaatattgttagggttaacgagggtggctaaggatggcggggaattagggaagctcagggttagggtggtcatagtactgtgcatggttatggataggccgcatctatt

SEQ ID NO: 495408 - DNA, 760 bp, Homo sapiens
cttagatggtgctctggttctggaggtcgatgagagggaccaagatgacgaggaagccaggcgtgagatggcaaggattctgaaggaacttaagcagaagcctaagtcagcagcaaaagagccgagcattttaccgaattcaagctactcgcctgatgactggagctggtaacattttgaagaggcatgcagctgaccaagcgaggaaggctgtcagcatgcatgaagtcaacatggatgtggttgaaaatgacccagtcagtaaggtcttctttgagcaagggacataccagtgtctagaaaactgtggtactgtggccctcaccattattcgaagagggggtgacttgaccaacactgtgtttgttgacttcaggacggaagatggcacagccaatgctgggtctgattatgagttcacggaagggactgtgattttcaaacctggggagacccagaaggaaatcagagttggcatcattgatgatgatatctttgaagaagatgaaaactttcttgtgcatcttagcaacgtcagggtctcttcagaagtctcggaagatggcatactagactccaatcacgtgtctcggattgcttgtctcgggtcacccaacactgccaccataaccatttttgatgatgaccacgcgggcatctttactttcgaggaacccgtgactcacgtgagcgagagcattggcatcatggaggtgaaggtgctgagaacctcaggagctcgaggaaatgttatcgttcc

SEQ ID NO: 495409 - DNA, 458 bp, Homo sapiens
aaccccatgaaagcggaaactctctggttgtttactactgactgagtctctggaacctagaacagtgcttggcatatagtaggtattcagtgaatttttattgatagacagtttgagtgaaatggatggcaataggactgttttatttatttctatttaaacatggtttgtaggagcatcatcaggaaatattagggtcaaattttccattggtttattataattacaaagatttataactttgtcataatggaaaaatttataaactactatgttccttacagtatttaaataagctattacctaaactttttgttacttatgcacctacatcattaaaatcagaataatgtttttgaaaatacatattttaaaatacagcagctcacaaaaatctgatgtggttatggttatatagctttatgtttagatctcaaactgttaataattcacaatga

SEQ ID NO: 495410 - DNA, 421 bp, Homo sapiens
ggccgggggcgaggctgggggaaacggggcccaaatacggaacccgggagttacaggggccgacgggaggtcgcttctctggggcccagctcccttcctgggctgagacaagctctgggggtggcgggggcccccacacgcggctcccgctccaccctgcccggggggctgctctgggcccgcgggcagagccctggtgggggaggatgtggcccccctgagacccggaggagacgggcgtctgcctgggtttgcggagagccgcttatgggtgtgggccggccagacaccttgtttcaagggggaagggcgtgagcgggccaacaaagcaaccccaccgctgagcaagaactttttcttgtttttaaaccaccacgtcctcatttcacattggaataaagtgagtttttgaaacctgcga

SEQ ID NO: 495411 - DNA, 480 bp, Homo sapiens
tggtaatactatgactcttaccaaagtgtgcagctggctgcagtctgcattctggcttcacaagtgtggctgagatttaactctagactaggtagtcagccacatatacagctttatcgatcttaaataatcagtgaacagcattgccatatattacaataaatgtaatcagcgcacacttatgtgtaatatttcaagtgccctaaaagtcaggctttgcctccagcgaaggggctacctcatgctggaatcaaaatttggcccaggcaggtacaatcctactgtagtgtcaggtagctatgccgtcagatcgtttgagtttgacactaggggctgtgatgaactctggggtaagattatatgatgtatgtgtagaatttgaacgttcaattactacaccaaatgtctgaacctgcggatcttctcgtactgagcaggattaccatggcaaaaacacatcatcagtagggtaaactaacc

SEQ ID NO: 495412 - DNA, 548 bp, Homo sapiens
caaaaaggaggaagtgatctagtagtaaagatttgctaaggaactatatctaataaaaaacaaaacaagccagacagaaaatactgaaataaataactaattcttcaatgcaaatactagaataaataactaatccttcagtgcaaaaaccatgacctttccaaagagacagagcaacaattcagtcactagccttaagtgatgatttgtaagatctgtgacctagcattcaaaatggcaattttaaggaaactcagtgatcaccatcataacaaagaagagcaattcagaaatttatcagagaagtttagcaaagattgaaataacaaaaaattaaatggaaattttagaactaaagaatacctttcctgaacagaagacttcattaaaggctctcaacagtagaatggactaaacagaggaaaaaaaaaatcagtgagttcaaagactgtctgaaaatacacagagaagtctgggtgtggtggctcatgcctgtaatcccagcactttaggaggccaaggtgggtggatcacttgaggtcaggagt

SEQ ID NO: 495413 - DNA, 121 bp, Homo sapiens
ggagcccgccctcaagaactccccagtcgggatcagccccacagccaaagcgcacccaaagcacatcaccatagcccagcacgcagctggtcttcctagagggccgcaagaagcagctcct

SEQ ID NO: 495414 - DNA, 109 bp, Homo sapiens
atgatgagggggcccctaaacccagtagctcacccctattcatgcattgacctcttcaactgcattgcagcgagtagagatggtgaaaggtcacgggaggtttagaaga

SEQ ID NO: 495415 - DNA, 844 bp, Homo sapiens
agcatacatcattattctcgcacggactacaaccacgacaatgatatgaaaaaccatcgttgtatttcaactacaagaacaccaatgaccccaatacgcaaaattaaccccctaataaaattaattaaccgctcattcatcgacctccccaccccatccaacatctccgcatgatgaaacttcggctcactccttggcgcctgctgatcctccaaatcaccacaggactattcctagccatgcactactcatcagacggccgtcaaccgccgttctctatcaattcgtcgacatacactcgagcacgtacgttatggctggctgatctcgaccacgttccacttcacgccaatggcgccatcaattattctgtatctgcctcttcctacacactcgggcgaggcctatatacggatcatttctctactcagaaacctgaaacatcggcatgatcctcctgctgcaactatagcaccagcctccataggctatgtcctcccgtgaggcaaatatcatccctgagggcaccagtaatcacaaacttactatccgcatcccatacatggggcagacctaagctcaatgaatctgaggagggcactcacatagaccagcccacccttaacaagaattcttagccttccacttcatactgggccttaattacctggagcctagaagaactcacctcataattttgacgaagggatcaaaaaccctaggaattcacctcccttagaaaaatccttcacctatacaaacaaaagcccggtaaaaccactcctcctaggaacactattacagctaggacacacatacccacaactaaccccatcccagatta

SEQ ID NO: 495416 - DNA, 126 bp, Homo sapiens
tcgttacaccgctaggcaacacctgctagtgtaacacccctgctactggaacaccccgctacggaacacctgtacggtgggcaagtctctgatcgagcacccgtgacgttaggcggagcgcccgcg

SEQ ID NO: 495417 - DNA, 305 bp, Homo sapiens
  misc_feature (22)..(22): n is a, c, g, or t
  misc_feature (39)..(39): n is a, c, g, or t
  misc_feature (53)..(53): n is a, c, g, or t
  misc_feature (82)..(82): n is a, c, g, or t
  misc_feature (182)..(182): n is a, c, g, or t
  misc_feature (191)..(191): n is a, c, g, or t
  misc_feature (195)..(195): n is a, c, g, or t
  misc_feature (211)..(211): n is a, c, g, or t
  misc_feature (227)..(227): n is a, c, g, or t
  misc_feature (235)..(235): n is a, c, g, or t
  misc_feature (237)..(237): n is a, c, g, or t
  misc_feature (256)..(256): n is a, c, g, or t
  misc_feature (262)..(262): n is a, c, g, or t
  misc_feature (294)..(294): n is a, c, g, or t
tgaacccgatttttccaaaaancagcctccaatttgtgncccccccaaaatgngccctgatggcagctgaagtttgattcanatgggccctttttttccccttcccggcctagtttccttttgttccttggggccccgcagaattccattttttggtcagcagacaggcttaagctaaagtnttgcctttntttngtaaagttttggacanagttcccaagcttttncagggggngntttttgctcttgtcctganaaaaancagggctgttttaaaaaacatttgaaataaancccgcccccca

SEQ ID NO: 495418 - DNA, 197 bp, Homo sapiens
agcctctatggccttttcctgctatctatactcctctatttcctatcatttatatatatcaccatgcgaggcctctggaataaaacatacaggtagtctgtctctgctatgcgaatgccccatggggtcatctactagtgtacttatatgtttaacggtttcctacaaagctgtagatttttctagaagcacaatca

SEQ ID NO: 495419 - DNA, 111 bp, Homo sapiens
ggtgcttactgaggcagctttctgcacacgaggcatactgttgaggtttatttcacagagcagtgtacattcttgtcttccagggcagcaccaactccctgcacaggatga

SEQ ID NO: 495420 - DNA, 184 bp, Homo sapiens
ccattccattccattccattccataccattccattccattccattctattcaggttgattccagtccattcctttctattccattccattccattcaattccattccattccattccattccgttccattccattccattatattcctcctgagttgtttccattgcatcccattccattccat

SEQ ID NO: 495421 - DNA, 262 bp, Homo sapiens
ctagaggatccccgccataaggtgtgccagagttacattatgtccatataaaattctagcccagaagtctcatctggggtagacttttgggccttcagaaagaccaattgggtgatgtctgggagacatgtggggttgtcaaaactggggtggggaacaaggttgctactgtgcaatgcataattaattttattacgggggttaattttggcgtattgggggtcagtgggcacacatttactggacggggtacctgagctcg

SEQ ID NO: 495422 - DNA, 360 bp, Homo sapiens
gcgagccctgacactcggtatcccaaaaacctcagctgagacatctacagggcagcttcactgttgctcccgagcctgggtattgtagccgactggaggagcaggtagtccctaatgtactcccatgttcttcacatccgccagaatcccatctatgcttgtctccagcaaatggaggtggcccctctgctgccgtgccctctcctccagctctgacatcatgggccgcagtaggctgttgatctgggtcttgtgctcgggaaagcttctgctccagtaagaccagcccctcttcatctacactgggaggctggtccatcagatgcaggaggccgtctcatgtgttgcagtgtgcttccg

SEQ ID NO: 495423 - DNA, 134 bp, Homo sapiens
agagcagaaagaaggccaagctcagaatcttcctggtcctcgaagagggaactagaatttctgctgtaggaggtacttatgcagtaatctcgttgggaggcgagcacggagttggagtcttaagagttgtgttt

SEQ ID NO: 495424 - DNA, 276 bp, Homo sapiens
gcagcggctttctggtacggttcagcattttacacatttctagggtcacgctggagaagtttacaaaataagctgatcttaagacaaagtgaaatgccttttaatcagttctgtgagacctgtcatgttcaacgcctcgggagcatggatgggaaataaagaactcagggagggctgaggggatgaaggtgtctggcctgccacttgggagctcctgaaaatcaaactcccacttagttgtttggggtctttggtatgtcacgtctctgtaaaaaa

SEQ ID NO: 495425 - DNA, 719 bp, Homo sapiens
  misc_feature (6)..(6): n is a, c, g, or t
  misc_feature (131)..(131): n is a, c, g, or t
  misc_feature (141)..(141): n is a, c, g, or t
  misc_feature (164)..(164): n is a, c, g, or t
  misc_feature (168)..(168): n is a, c, g, or t
  misc_feature (174)..(174): n is a, c, g, or t
  misc_feature (180)..(180): n is a, c, g, or t
  misc_feature (187)..(187): n is a, c, g, or t
  misc_feature (189)..(189): n is a, c, g, or t
  misc_feature (218)..(218): n is a, c, g, or t
  misc_feature (311)..(311): n is a, c, g, or t
  misc_feature (314)..(314): n is a, c, g, or t
  misc_feature (321)..(321): n is a, c, g, or t
  misc_feature (368)..(368): n is a, c, g, or t
  misc_feature (415)..(415): n is a, c, g, or t
  misc_feature (458)..(458): n is a, c, g, or t
  misc_feature (495)..(495): n is a, c, g, or t
  misc_feature (525)..(525): n is a, c, g, or t
  misc_feature (530)..(530): n is a, c, g, or t
  misc_feature (610)..(610): n is a, c, g, or t
  misc_feature (623)..(623): n is a, c, g, or t
  misc_feature (632)..(632): n is a, c, g, or t
  misc_feature (649)..(649): n is a, c, g, or t
  misc_feature (688)..(688): n is a, c, g, or t
cttccnccgcgccgccgccaccctcccagagagcactggccaccgctccaccatcacttacccaaaatttggaccaccgcccgccgccaccagcccagagagcatcggcccctgtctgctgctcgcgcctngagatttcanaggtccccgttaactcgcgtctngctngtactnctcctnctgactntncaggtcggcgtgacagccggcgctccgtngcagttcgcgccctgctccgccgaaaagctcgcgctctgcccgccggtgtccgcctcgttctcggaggtcacccggtccgccggctgcggctnttncccgatnttcgccctgcctcttggcgccgcgtgcggcgttgcgactgcacgctncgcccggggactcattttccgcgcgcttccgggggatcagcaacctntgcacgccctcacccgcggccaaggcgccttctttcatgattnttacgcctccgctccccattcttcagaggcagggagncctgaaagcccagagagcacggagataacngaggnggagctcctggataatttccatctgatggccccttctgaagaggatcattccatcctttgggacgccatcagtacctatnatggctcgaaggntctccatgncaccaacatcaaaaaanggaaggagccctgccgaatagaactctacagagtcgtanagagtttagccaaggcacaggagacatcagg

SEQ ID NO: 495426 - DNA, 253 bp, Homo sapiens
aaggatcccgcattgagattcgcatctgcatgaaatgcctggtgtaatacctgcacatatgactcctcctttacttcatcatgacttgaagactcagaatatcttattgggccatggatttccatgtaacgattgcagattttggtttatcaaagtggcgcatgatgtccctctcacagtcacgaagtagcaaatcttgcagcagaaggagggacccttatctatatgccacctgaaaactatgaacctggac

SEQ ID NO: 495427 - DNA, 241 bp, Homo sapiens
ttttattttaaaaaaatttttttcttttccccggaaacagggtggttttttaagaaggggggtttttaaaaaaaaaaaagcccaaagggttttttaaaaaaagccccccccccccccggggttgggaaaaaggccgcttttttgggggcccatggtttgttttttcccaagaaaaggggaaaattcgggttcagggggggggttagcgggccctttcccaaaaaaatgggggaagcttcca

SEQ ID NO: 495428 - DNA, 4310 bp, Homo sapiens
agcggactcgtcactgcgcagccaatcggcaggcgggaagcactccggcccgaacgtgcgggcggggcagggtggcggccccgcacggtaggggagcagagtgggcaggccgggggtgagggctcgcgctccgggagctgcacggggctgcgtggaaagagcgccgagcggtggcgtcgttgtcgccccctcctcgtcgggaagaatcgtttggtctcctgccgtgcccggccggtgctgctgtcgctgctgctgcccgcgcgggttgtggatgttgtcggctccgtgttgtgatgacaggagaatgtgtgtgtgtcccgggcccagacgaattggaatcccagtcagaagttccagcctgccactgttctctgatgccatgccagcaccaactcaactgttttttcctctcatccgtaactgtgaactgagcaggatctatggcactgcatgttactgccaccacaaacatctctgttgttcctcatcgtacattcctcagagtcgactgagatacacacctcatccagcatatgctaccttttgcaggccaaaggagaactggtggcagtacacccaaggaaggagatatgcttccacaccacagaaattttacctcacacctccacaagtcaatagcatccttaaagctaatgaatacagtttcaaagtgccagaatttgacggcaaaaatgtcagttctatccttggatttgacagcaatcagctgcctgcaaatgcacccattgaggaccggagaagtgcagcaacctgcttgcagaccagagggatgcttttgggggtttttgatggccatgcaggttgtgcttggtcccaggcagtcagtgaaagactcttttattatattgctggctctttggtaccccatgagactttgctagagattgaaaatgcagtggagagcggccgggcactgctacccattctccagtggcacaagcaccccaatgattactttagtaaggaggcatccaaattgtactttaacagcttgaggacttactggcaagagcttatagacctcaacactggtgagtcgactgatattgatgttaaggaggctctaattaatgccttcaagaggcttgataatgacatctccttggaggcgcaagttggtgatcctaattcttttctcaactacctggtgcttcgagtggcattttctggagccactgcttgtgtggcccatgtggatggtgttgaccttcatgtggccaatactggcgatagcagagccatgctgggtgtgcaggaagaggacggctcatggtcagcagtcacgctgtctaatgaccacaatgctcaaaatgaaagagaactagaacggctgaaattggaacatccaaagagtgaggccaagagtgtcgtgaaacaggatcggctgcttggcttgctgatgccatttagggcatttggagatgtaaagttcaaatggagcattgaccttcaaaagagagtgatagaatctggcccagaccagttgaatgacaatgaatataccaagtttattcctcctaattatcacacacctccttatctcactgctgagccagaggtaacttaccaccgattaaggccacaggataagtttctggtgttggctactgatgggttgtgggagactatgcataggcaggatgtggttaggattgtgggtgagtacctaactggcatgcatcaccaacagccaatagctgttggtggctacaaggtgactctgggacagatgcatggccttttaacagaaaggagaaccaaaatgtcctcggtatttgaggatcagaacgcagcaacccatctcattcgccacgctgtgggcaacaacgagtttgggactgttgatcatgagcgcctctctaaaatgcttagtcttcctgaagagcttgctcgaatgtacagagatgacattacaatcattgtagttcagttcaattctcatgttgtaggggcgtatcaaaaccaagaatagtgagtggctctttcactggcaattctcaaatgatatacatttaaagggcagattttttaaaaagatactactataataaacatttccagttggtcattctaagcatttacccttttgatactctagctagtcaggtactccaaattgactttgcagcagggtggcagggtcaggagagtctggtcctgcctagctcagatttcatggcacctgcacttgaagcaagtcacttctttatcacaggtgtcttgaaacattagcttcttttaccaacctgagaaaattaggatgacctggcaaataagatcttgaataggccaaaagcaagtatcttgctgtgtgtagtctcttggttaaagtgaagaaacagtactgttcacacctttcttcactgagattccagtgtacatgagaacatatatttattgcatgattttctagatacacagtctatgcattattcatatacatttattttagcctaaagtggttttcaaatccagttcttcaagccataaatgaccaagatccaagcaatctgaatttgtttttgtgattatttgactggaatgcttcttaagtggaataactatactccgttatccacccgatttcctaatgtaattgaaagattttctattttgccacacacttggagacaataagggtttttagttttatctactcttctattgaagttaaagaaagaaaaaaagatttttttatttgtattaatgaaaagctttagtttaaaataaggagatccagaataaaaagaagagactgatctcttcaattattgtcatctgtagccaccagcacatcactcttatgtaatccccaaaggcttggcatgccgtaagtgtgtggtgggtagactgctgccggggaatcgtacttcttatttagtaatgataagacttttcattatttttggaattttaaagatgacataaataagtttaaatatcaatttggggagtaaggtttaatattgccatcgggtattgagacaggaggaagtttctgtttttctccatttagacataggtcaattaaaatatttgggtttaaaatgactaaatgctttaaacatattgtagcttaagatatatgtgttaagatatatacatgagaaactttaaaaggtaactactgtgcatgcctgatgcttaatagaatacttagtggcatcaaatgtttgcagcagtctccataattatattcagtcccttctaatactgtatcaatgtaaatgaaataaatatattcaaattggctttttgatatgcatcaagtggcattttgttcctgtgtttaatagtgatctgtatacagctgtgcacatattgtcatcacttattctagcatcactgttaaggctgtgattatgtttgatattcacctggattttaatacaagccaatatcagcttcccattgtgtaataacttgggtgtttaggagtcttttcacattttttggggatatgaactagatgttcaagaactccttctggactgtggatactgaatcagtgtactattggctgcagaatttgtttcaattgaaaatagactcaggaagattgctgctcagaatatcatataatgtttattttttgaggtgtttttgtttttatttgtgtgtttttttttttttaagtcagcttggaacttttttcctgggtagtatttgggagagggaaaggctgtactatatatttatttctaaatgttttgactgggcatttttcttttaatgaaatatgtggactgctctagcaaaccctattttcagctactatttgaatattcttgaacaccaccactgaagagtttcatatacaccaaataatgtctcatctctatagtacagggaatataaaattggtttcctgtggtcatgatcaagatagtagtattattacacaagaaacttggtctgcagtctggaagcttgtctgctctatagaaatgaaaatgcgcatgaagttgacatgtgtggaccatcgaacagtaacttgggtattcagaaatctgaaagtcagtgtcatctaaaagcaatggtggatttccatggtaatgggtgtgtcccctgttggacgggggtctcagaattcaaggaattccgtgtaactttcatggtatttaagctttcttaacatttttttaaaatttaaatttctaactatgtttcacgtctgtttcacattaacagggtcagttattaaaaacgctaatagtatggcagtgggcgcagagtcacactgggagaaaggctttacaattttttgagacacagttggcacacagggg

SEQ ID NO: 495429 - DNA, 224 bp, Homo sapiens
acgcaccatgagcgattttatgtctgtttgtcgtaagcatatgagcttgttataattatgcctcatagggcatataccaggcaatgggtaggctatgtgttagtcaggggttgcataatgagtgtgagtgagggttttatgttgttacatgtggtgattgaatagaccccattgtgttgtggtaaatatgtagagggagtatagggctgtgactagtatgttga

SEQ ID NO: 495430 - DNA, 856 bp, Homo sapiens
agcggactcgtcactgcgcagccaatcggcaggcgggaagcactccggcccgaacgtgcgggcggggcagggtggcggccccgcacggtaggggagcagagtgggcaggccgggggtgagggctcgcgctccgggagctgcacggggctgcgtggaaagagcgccgagcggtggcgtcgttgtcgccccctcctcgtcgggaagaatcgtttggtctcctgccgtgcccggaatcccagtcagaagttccagcctgccactgttctctgatgccatgccagcaccaactcaactgttttttcctctcatccgtaactgtgaactgagcaggatctatggcactgcatgttactgccaccacaaacatctctgttgttcctcatcgtacattcctcagagtcgactgagatacacacctcatccagcatatgctaccttttgcaggccaaaggagaactggtggcagtacacccaaggaaggagatatgcttccacaccacagaaattttacctcacacctccacaagtcaatagcatccttaaagctaatgaatacagtttcaaagtgccagaatttgacggcaaaaatgtcagttctatccttggatttgacagcaatcagctgcctgcaaatgcacccattgaggaccggagaagtgcagcaacctgcttgcagaccagagggatgcttttgggggtttttgatggccatgcaggttgtgcttggtcccaggcagtcagtgaaagactcttttattatattgctggctctttggtaccccatgagactttgctagagattgatgattcttttgtaggagggtcccaatgggctttaaacttggggcttcctggg

SEQ ID NO: 495431 - DNA, 147 bp, Homo sapiens
agctcgccgcgcagcggcctgctatttgtcggcctgctgccgaactaggccgcttggggcactccagctctaccctggccgcagccgcacggggcagaaaatctcgcaaccagttggagcgccactcgttaacctggcatcccagca

SEQ ID NO: 495432 - DNA, 333 bp, Homo sapiens
gtgtccatgaacagtttttaaatctttataagttaaagcaaataggccaggtgggtggctcatgcctgtaaatcccagcactttgggaggtggaggtggggagatcgcttgagctcaggagtttgagcttagcctaagcaacatagccaatccccgtctctacaaaaattaaccaggcgcatggtgtgtgcatacctgtggtcctagctaccggaccaggagtgagatgggcaggatatgcttgagacccaggaggtataaggcatctagtgagcctagattccacccgcactccagacctagtgtatcaatagagaaaatccttgtctttat

SEQ ID NO: 495433 - DNA, 4205 bp, Homo sapiens
agcggactcgtcactgcgcagccaatcggcaggcgggaagcactccggcccgaacgtgcgggcggggcagggtggcggccccgcacggtaggggagcagagtgggcaggccgggggtgagggctcgcgctccgggagctgcacggggctgcgtggaaagagcgccgagcggtggcgtcgttgtcgccccctcctcgtcgggaagaatcgtttggtctcctgccgtgcccggaatcccagtcagaagttccagcctgccactgttctctgatgccatgccagcaccaactcaactgttttttcctctcatccgtaactgtgaactgagcaggatctatggcactgcatgttactgccaccacaaacatctctgttgttcctcatcgtacattcctcagagtcgactgagatacacacctcatccagcatatgctaccttttgcaggccaaaggagaactggtggcagtacacccaaggaaggagatatgcttccacaccacagaaattttacctcacacctccacaagtcaatagcatccttaaagctaatgaatacagtttcaaagtgccagaatttgacggcaaaaatgtcagttctatccttggatttgacagcaatcagctgcctgcaaatgcacccattgaggaccggagaagtgcagcaacctgcttgcagaccagagggatgcttttgggggtttttgatggccatgcaggttgtgcttggtcccaggcagtcagtgaaagactcttttattatattgctggctctttggtaccccatgagactttgctagagattgaaaatgcagtggagagcggccgggcactgctacccattctccagtggcacaagcaccccaatgattactttagtaaggaggcatccaaattgtactttaacagcttgaggacttactggcaagagcttatagacctcaacactggtgagtcgactgatattgatgttaaggaggctctaattaatgccttcaagaggcttgataatgacatctccttggaggcgcaagttggtgatcctaattcttttctcaactacctggtgcttcgagtggcattttctggagccactgcttgtgtggcccatgtggatggtgttgaccttcatgtggccaatactggcgatagcagagccatgctgggtgtgcaggaagaggacggctcatggtcagcagtcacgctgtctaatgaccacaatgctcaaaatgaaagagaactagaacggctgaaattggaacatccaaagagtgaggccaagagtgtcgtgaaacaggatcggctgcttggcttgctgatgccatttagggcatttggagatgtaaagttcaaatggagcattgaccttcaaaagagagtgatagaatctggcccagaccagttgaatgacaatgaatataccaagtttattcctcctaattatcacacacctccttatctcactgctgagccagaggtaacttaccaccgattaaggccacaggataagtttctggtgttggctactgatgggttgtgggagactatgcataggcaggatgtggttaggattgtgggtgagtacctaactggcatgcatcaccaacagccaatagctgttggtggctacaaggtgactctgggacagatgcatggccttttaacagaaaggagaaccaaaatgtcctcggtatttgaggatcagaacgcagcaacccatctcattcgccacgctgtgggcaacaacgagtttgggactgttgatcatgagcgcctctctaaaatgcttagtcttcctgaagagcttgctcgaatgtacagagatgacattacaatcattgtagttcagttcaattctcatgttgtaggggcgtatcaaaaccaagaatagtgagtggctctttcactggcaattctcaaatgatatacatttaaagggcagattttttaaaaagatactactataataaacatttccagttggtcattctaagcatttacccttttgatactctagctagtcaggtactccaaattgactttgcagcagggtggcagggtcaggagagtctggtcctgcctagctcagatttcatggcacctgcacttgaagcaagtcacttctttatcacaggtgtcttgaaacattagcttcttttaccaacctgagaaaattaggatgacctggcaaataagatcttgaataggccaaaagcaagtatcttgctgtgtgtagtctcttggttaaagtgaagaaacagtactgttcacacctttcttcactgagattccagtgtacatgagaacatatatttattgcatgattttctagatacacagtctatgcattattcatatacatttattttagcctaaagtggttttcaaatccagttcttcaagccataaatgaccaagatccaagcaatctgaatttgtttttgtgattatttgactggaatgcttcttaagtggaataactatactccgttatccacccgatttcctaatgtaattgaaagattttctattttgccacacacttggagacaataagggtttttagttttatctactcttctattgaagttaaagaaagaaaaaaagatttttttatttgtattaatgaaaagctttagtttaaaataaggagatccagaataaaaagaagagactgatctcttcaattattgtcatctgtagccaccagcacatcactcttatgtaatccccaaaggcttggcatgccgtaagtgtgtggtgggtagactgctgccggggaatcgtacttcttatttagtaatgataagacttttcattatttttggaattttaaagatgacataaataagtttaaatatcaatttggggagtaaggtttaatattgccatcgggtattgagacaggaggaagtttctgtttttctccatttagacataggtcaattaaaatatttgggtttaaaatgactaaatgctttaaacatattgtagcttaagatatatgtgttaagatatatacatgagaaactttaaaaggtaactactgtgcatgcctgatgcttaatagaatacttagtggcatcaaatgtttgcagcagtctccataattatattcagtcccttctaatactgtatcaatgtaaatgaaataaatatattcaaattggctttttgatatgcatcaagtggcattttgttcctgtgtttaatagtgatctgtatacagctgtgcacatattgtcatcacttattctagcatcactgttaaggctgtgattatgtttgatattcacctggattttaatacaagccaatatcagcttcccattgtgtaataacttgggtgtttaggagtcttttcacattttttggggatatgaactagatgttcaagaactccttctggactgtggatactgaatcagtgtactattggctgcagaatttgtttcaattgaaaatagactcaggaagattgctgctcagaatatcatataatgtttattttttgaggtgtttttgtttttatttgtgtgtttttttttttttaagtcagcttggaacttttttcctgggtagtatttgggagagggaaaggctgtactatatatttatttctaaatgttttgactgggcatttttcttttaatgaaatatgtggactgctctagcaaaccctattttcagctactatttgaatattcttgaacaccaccactgaagagtttcatatacaccaaataatgtctcatctctatagtacagggaatataaaattggtttcctgtggtcatgatcaagatagtagtattattacacaagaaacttggtctgcagtctggaagcttgtctgctctatagaaatgaaaatgcgcatgaagttgacatgtgtggaccatcgaacagtaacttgggtattcagaaatctgaaagtcagtgtcatctaaaagcaatggtggatttccatggtaatgggtgtgtcccctgttggacgggggtctcagaattcaaggaattccgtgtaactttcatggtatttaagctttcttaacatttttttaaaatttaaatttctaactatgtttcacgtctgtttcacattaacagggtcagttattaaaaacgctaatagtatggcagtgggcgcagagtcacactgggagaaaggctttacaattttttgagacacagttggcacacagggg

SEQ ID NO: 495434 - DNA, 944 bp, Homo sapiens
  misc_feature (944)..(944): n is a, c, g, or t
gggacagcattgtaacaggaacaggtctctttgggcagaccaactactgcattgggtgctgtgggttcgaccctgtttgcagtaacaagcttactacattttgcaagcagcaccacccagtgccaccttcattgggtgtgggcacaaataccagtgggaatagtatttaggaagtaaaccagacacctgtgactctttggaactggggcttgtacgcaggcattcggaccagagacccgagttctctcgtttgccaggtggaagtacaatgggtgtgatctcagctcatgccaaactccgcctcctgggtccaagtggatcctcttgcctcagcctcccatgtagctggagattgcagtgcatgtgccactgcaacccggcataacctgtagtattcataagtcacagatggggtttacaccattgttgggccaagggctgtgatcagacttcctgacctaaagtgagtccaccaagactcggactccaaaatgtgctggggatacacagacgtgaccttttgtgccgggccttttaaatcaattgatcaatacttcatgtattgagcgagctgcttcaatagggatagccaaaggagggactgggcactgcgcgggtacaaccacgggccccacgagcaagccccgaacaccgtgattatgcccatttattcatttctcaagccctccaggaagcttggaattatgggcagcaacggtaccgtgaatagatgtaattaagaacaaaggggttcactgtaaacctggtgggtcactcctgcacttagttcacccgctgagccccagtgggatcagcggtaaacacgccgggcatttaatgtaagactcgggtgggcacctggacaatgagatgagaacatttccaacggttgtatctccgattgtcaccaaaaaatgcggttggcgagtatgtgcaactccaan

SEQ ID NO: 495435 - DNA, 471 bp, Homo sapiens
ctcctgcgtcacacatacatcagaatttgctgttggattatttgtgtgtttgtgagaattataaaggcattaatgaatgtcttatatacttgatttgttatatcattatctcatttctttgtaagcaatgggttttctttgaaatcacctgtgtgattttgctaatttcagcagagcaggctgacttttgttaaaagtggggaatcctccacagatcatctcacattcttcttttgccacccaaataagacatatttgtcttactgctactgtattttattactactaatagtttttcttcctataagcatatgaatgatatcagtaagcgcaatttggttttaaaaatcaacattctacgtgtgggtttctctagtaatttgttagtttattttagtttcgctttcctggtttcacttaccacaatttcacttaccagaagtcagctgcggtctgaaaatatgaaatgga

SEQ ID NO: 495436 - DNA, 4150 bp, Homo sapiens
agcggactcgtcactgcgcagccaatcggcaggcgggaagcactccggcccgaacgtgcgggcggggcagggtggcggccccgcacggtaggggagcagagtgggcaggccgggggtgagggctcgcgctccgggagctgcacggggctgcgtggaaagagcgccgagcggtggcgtcgttgtcgccccctcctcgtcgggaagaatcgtttggtctcctgccgtgcccggaatcccagtcagaagttccagcctgccactgttctctgatgccatgccagcaccaactcaactgttttttcctctcatccgtaactgtgaactgagcaggatctatggcactgcatgttactgccaccacaaacatctctgttgttcctcatcgtacattcctcagagtcgactgagatacacacctcatccagcatatgctaccttttgcaggccaaaggagaactggtggcagtacacccaaggaaggagatatgcttccacaccacagaaattttacctcacacctccacaagtcaatagcatccttaaagctaatgaatacagtttcaaagtgccagaatttgacggcaaaaatgtcagttctatccttggatttgacagcaatcagctgcctgcaaatgcacccattgaggaccggagaagtgcagcaacctgcttgcagaccagagggatgcttttgggggtttttgatggccatgcaggttgtgcttggtcccaggcagtcagtgaaagactcttttattatattgctggctctttggtaccccatgagactttgctagagattgaaaatgcagtggagagcggccgggcactgctacccattctccagtggcacaagcaccccaatgattactttagtaaggaggcatccaaattgtactttaacagcttgaggacttactggcaagagcttatagacctcaacactggtgagtcgactgatattgatgttaaggaggctctaattaatgccttcaagaggcttgataatgacatctccttggaggcgcaagttggtgatcctaattcttttctcaactacctggtgcttcgagtggcattttctggagccactgcttgtgtggcccatgtggatggtgttgaccttcatgtggccaatactggcgatagcagagccatgctgggtgtgcaggaagaggacggctcatggtcagcagtcacgctgtctaatgaccacaatgctcaaaatgaaagagaactagaacggctgaaattggaacatccaaagagtgaggccaagagtgtcgtgaaacaggatcggctgcttggcttgctgatgccatttagggcatttggagatgtaaagttcaaatggagcattgaccttcaaaagagagtgatagaatctggcccagaccagttgaatgacaatgaatataccaagtttattcctcctaattatcacacacctccttatctcactgctgagccagaggtaacttaccaccgattaaggccacaggataagtttctggtgttggctactgatgggttgtgggagactatgcataggcaggatgtggttaggattgtgggtgagtacctaactggcatgcatcaccaacagccaatagctgttggtggctacaaggtgactctgggacagatgcatggccttttaacagaaaggagaaccaaaatgtcctcggtatttgaggatcagaacgcagcaacccatctcattcgccacgctgtgggcaacaacgagtttgggactgttgatcatgagcgcctctctaaaatgcttagtcttcctgaagagcttgctcgaatgtacagagatgacattacaatcattgtagttcagttcaattctcatgttgtaggggcgtatcaaaaccaagaatagtgagtggctctttcactggcaattctcaaatgatatacatttaaagggcagattttttattgatactctagctagtcaggtactccaaattgactttgcagcagggtggcagggtcaggagagtctggtcctgcctagctcagatttcatggcacctgcacttgaagcaagtcacttctttatcacaggtgtcttgaaacattagcttcttttaccaacctgagaaaattaggatgacctggcaaataagatcttgaataggccaaaagcaagtatcttgctgtgtgtagtctcttggttaaagtgaagaaacagtactgttcacacctttcttcactgagattccagtgtacatgagaacatatatttattgcatgattttctagatacacagtctatgcattattcatatacatttattttagcctaaagtggttttcaaatccagttcttcaagccataaatgaccaagatccaagcaatctgaatttgtttttgtgattatttgactggaatgcttcttaagtggaataactatactccgttatccacccgatttcctaatgtaattgaaagattttctattttgccacacacttggagacaataagggtttttagttttatctactcttctattgaagttaaagaaagaaaaaaagatttttttatttgtattaatgaaaagctttagtttaaaataaggagatccagaataaaaagaagagactgatctcttcaattattgtcatctgtagccaccagcacatcactcttatgtaatccccaaaggcttggcatgccgtaagtgtgtggtgggtagactgctgccggggaatcgtacttcttatttagtaatgataagacttttcattatttttggaattttaaagatgacataaataagtttaaatatcaatttggggagtaaggtttaatattgccatcgggtattgagacaggaggaagtttctgtttttctccatttagacataggtcaattaaaatatttgggtttaaaatgactaaatgctttaaacatattgtagcttaagatatatgtgttaagatatatacatgagaaactttaaaaggtaactactgtgcatgcctgatgcttaatagaatacttagtggcatcaaatgtttgcagcagtctccataattatattcagtcccttctaatactgtatcaatgtaaatgaaataaatatattcaaattggctttttgatatgcatcaagtggcattttgttcctgtgtttaatagtgatctgtatacagctgtgcacatattgtcatcacttattctagcatcactgttaaggctgtgattatgtttgatattcacctggattttaatacaagccaatatcagcttcccattgtgtaataacttgggtgtttaggagtcttttcacattttttggggatatgaactagatgttcaagaactccttctggactgtggatactgaatcagtgtactattggctgcagaatttgtttcaattgaaaatagactcaggaagattgctgctcagaatatcatataatgtttattttttgaggtgtttttgtttttatttgtgtgtttttttttttttaagtcagcttggaacttttttcctgggtagtatttgggagagggaaaggctgtactatatatttatttctaaatgttttgactgggcatttttcttttaatgaaatatgtggactgctctagcaaaccctattttcagctactatttgaatattcttgaacaccaccactgaagagtttcatatacaccaaataatgtctcatctctatagtacagggaatataaaattggtttcctgtggtcatgatcaagatagtagtattattacacaagaaacttggtctgcagtctggaagcttgtctgctctatagaaatgaaaatgcgcatgaagttgacatgtgtggaccatcgaacagtaacttgggtattcagaaatctgaaagtcagtgtcatctaaaagcaatggtggatttccatggtaatgggtgtgtcccctgttggacgggggtctcagaattcaaggaattccgtgtaactttcatggtatttaagctttcttaacatttttttaaaatttaaatttctaactatgtttcacgtctgtttcacattaacagggtcagttattaaaaacgctaatagtatggcagtgggcgcagagtcacactgggagaaaggctttacaattttttgagacacagttggcacacagggg

SEQ ID NO: 495437 - DNA, 548 bp, Homo sapiens
  misc_feature (121)..(121): n is a, c, g, or t
  misc_feature (381)..(382): n is a, c, g, or t
  misc_feature (393)..(394): n is a, c, g, or t
  misc_feature (413)..(414): n is a, c, g, or t
  misc_feature (457)..(457): n is a, c, g, or t
tgctgtaatctatcagtggctgagttatggatgaacagacctaaacccctctatatgttttagtgatttgggggataaagcacacttgtgctgattgctggaacttcccatcaatcagccnagaatgctctgccagtgggtgagagtctgtgaggcaggagagattggggaattcccctgtatggtaataggtgtatgaggaagaaatggtgggggcatccaggccatctggagcaaagagaataaagtcacaggtgacattgtcagagggaagggaaaatcctggtctgtggaagggccacagtgaccctgtgagccaagtcgcaacactgaagtcccagccaaatccccgctgtgttcactgatctggagcctgagacnntcacctgtttnncccatcacaagctgtggannctgagtctcccatgacaggagcagcctcttttctcctattgtngatcaagcctagcctactctggtttgcctggggcagaaaatcatggccaggtttgatgtctagggtatgctctgatagggatcctctagga

SEQ ID NO: 495438 - DNA, 1320 bp, Homo sapiens
  misc_feature (1)..(1): n is a, c, g, or t
nagtggttcgtctggtgagtgatagagtgatggttaggttaggtctgagtatgtctgtagtgtgttggtttgtgtgtgttttgagtcgtgtgtgtgtgtatgtgaggagtggggtatgtcgtggttggagggacggtgtgggagtttgttgtaagtgcgatcgtcgcgtgtcggtgtgggaaaacatgcgtttttggccgcctgagttctccggagcgcccaccccgcggtggcggcgccccaatagaaaccccgggccgtatacgccttccgggttttagtatatgcccgcggggccgtgtatcacagtggtacaccccggggaaccgcctttgtcccccttagtcccttttttggggcccagctttgaggagaagagtgttgcccacggagacccgagggtgggttgccggttcggggattttccccggggatttttggtgggacgccccaggggttccgggggtttttcccacggcacgccaactggggagattgtgagggacgggggcaagagcttgcctttccctcgagatgggggtcccggggagacccctggaggcccccggggccaaggcctaaacctgggggagggacaaccccccccccacaacacggggggcaaacacctgacacccctcaaccacacgggctggggggaacccccacaccaggaccctggcaactctgaaggggtcccctgtgctcgttaaaaagggggaagacttgaccaacccggaaagggagcattccccccccccctgagccactcctcgtattttccccacttcactcccaaagagccccacaaggtgagattaaaacccccccaagattgggggaaaaaccacggaaccacggaaaaactgggggaaacttctgaaaaaagcacgaggcgcctccttcctccctccacaaggggaacccacgtttcctcacccacgccaccaggacccaaagctcggagtggagagaacggagcttttgaccgaggctcgaggagataagaaaggcttcacgagcgagtccacattaactttgaggctacccggagggacacttccacacccaaggccaaagagaagttggaaaactttgagaaaaaattttatagagaagagaatgtattataactatgagaataacccatacaagagaagtgcttaaaggagctgatggagctggaaacccaggctcgagaactatagtgaagaatgccagaagccttccggagccgatagcgatccaactggaagaaaagggtgatccagcgatggaaggtgaagtgaatgaaatgaagtgagaagagaagtttagaga

SEQ ID NO: 495439 - DNA, 1445 bp, Homo sapiens
agcggactcgtcactgcgcagccaatcggcaggcgggaagcactccggcccgaacgtgcgggcggggcagggtggcggccccgcacggtaggggagcagagtgggcaggccgggggtgagggctcgcgctccgggagctgcacggggctgcgtggaaagagcgccgagcggtggcgtcgttgtcgccccctcctcgtcgggaagaatcgtttggtctcctgccgtgcccggaatcccagtcagaagttccagcctgccactgttctctgatgccatgccagcaccaactcaactgttttttcctctcatccgtaactgtgaactgagcaggatctatggcactgcatgttactgccaccacaaacatctctgttgttcctcatcgtacattcctcagagtcgactgagatacacacctcatccagcatatgctaccttttgcaggccaaaggagaactggtggcagtacacccaaggaaggagatatgcttccacaccacagaaattttacctcacacctccacaagtcaatagcatccttaaagctaatgaatacagtttcaaagtgccagaatttgacggcaaaaatgtcagttctatccttggatttgacagcaatcagctgcctgcaaatgcacccattgaggaccggagaagtgcagcaacctgcttgcagaccagagggatgcttttgggggtttttgatggccatgcaggttgtgcttggtcccaggcagtcagtgaaagactcttttattatattgctggctctttggtaccccatgagactttgctagagattgaaaatgcagtggagagcggccgggcactgctacccattctccagtggcacaagcaccccaatgattactttagtaaggaggcatccaaattgtactttaacagcttgaggacttactggcaagagcttatagacctcaacactggtgagtcgactgatattgatgttaaggaggctctaattaatgccttcaagaggcttgataatgacatctccttggaggcgcaagttggtgatcctaattcttttctcaactacctggtgcttcgagtggcattttctggagccactgcttgtgtggcccatgtggatggtgttgaccttcatgtggccaatactggcgatagcagagccatgctgggtgtgcaggaagaggacggctcatggtcagcagtcacgctgtctaatgaccacaatgctcaaaatgaaagagaactagaacggctgaaattggaacatccaaagagtgaggccaagagtgtcgtgaaacaggatcggctgcttggcttgctgatgccatttagggcatttggagatgtaaagttcaaatggagcattgaccttcaaaagagagtgatagaatctggcccactacccgggcgccagggaccacagcactggtgtggaccgttctcttcatcgt

SEQ ID NO: 495440 - DNA, 126 bp, Homo sapiens
catcagtgcttacatatattcacaaggttgtgcaatcaccacgtatcatctaattccagaacatattttatcataccctaaaagaaaccttaaaaccattagcagacacccgattatttccgtcct

SEQ ID NO: 495441 - DNA, 819 bp, Homo sapiens
actagtaaacaaacggtgtattgtcatcatgtgagttgaaaaaaaagttaaggtataccctggcacctggcggaagagcaggctgtccacatgcatgacccccggctgataccactaaaaaccatgacgtctgacattttaaagatgcagctttacgtggaagagcgcgctcataaaggcagctgatggggcactcgcaccccactgatgcccaaactgtcagactttgggggatccacgcctagggcagtgctgcatggctgccctgattccaagagctcttactcgctctgagtgtggatcgtccgccccaacagggatctcgttcacgtctgctttgatggatgcctcccccaagacggcattgagggatgccgcatcctaaaaagcacaagattctggggatccgcccactaaaactgtatgtataaaacactgcgctgcaaatagcaacaacaacggggtcccaacggaaaaataatattttatcgggccacgctgacccaagcgagggatactcttgtggcagctccatttagtgaggcactcatctcatgaaactatataacgaatatcaagatacatatgtgatacaaaaatgagaaaaataaatcataatacctacacggtggtaatagtaccttacaacaaattcaccgggaaaaccacctgacatactcttcgatctctctgcccactggtagcctaaaaacgtaagaatcacacgtcgactaccattcacctactcaatttaccgcgtggaggcagcctaatcttacctaacgatttatttcctcctcattatgattaatcaaatat

SEQ ID NO: 495442 - DNA, 99 bp, Homo sapiens
tattcccagcccacttgccatccttgttccttttcattagctgggactttcacctgatcctatcacgggcggtgttcacgagtgtcgttactggttttt

SEQ ID NO: 495443 - DNA, 294 bp, Homo sapiens
aacgcaagtcccaggtcatgagagaatgggaagaggcagacacgtcaagcaaagaacatggcctaaagctgataagaaggcagatatccagacattacaggagaaagtggacgtcttggaacaggaagcaagccaacgagagacagcagagggtggagacacacatggccagagatggaagccatgctcaatgaccgccgccgccaggcccgggagaactacatcaccgctcagcaggctgttcctcctcggcctcgtcaagtgttcaatatgctaaagaagtatgtccgcgca

SEQ ID NO: 495444 - DNA, 410 bp, Homo sapiens
  misc_feature (22)..(22): n is a, c, g, or t
  misc_feature (146)..(146): n is a, c, g, or t
  misc_feature (151)..(151): n is a, c, g, or t
  misc_feature (180)..(180): n is a, c, g, or t
  misc_feature (194)..(194): n is a, c, g, or t
  misc_feature (210)..(210): n is a, c, g, or t
  misc_feature (242)..(242): n is a, c, g, or t
  misc_feature (247)..(247): n is a, c, g, or t
  misc_feature (261)..(261): n is a, c, g, or t
  misc_feature (270)..(270): n is a, c, g, or t
  misc_feature (274)..(274): n is a, c, g, or t
  misc_feature (279)..(279): n is a, c, g, or t
  misc_feature (296)..(296): n is a, c, g, or t
  misc_feature (299)..(299): n is a, c, g, or t
  misc_feature (333)..(333): n is a, c, g, or t
  misc_feature (340)..(340): n is a, c, g, or t
  misc_feature (373)..(373): n is a, c, g, or t
catgtccccaaagcccctaganggtgttctctgaagaacccacagggccaaatcctaccaaaatgtcttgaagctggattctcccttctgcctgcccccactctgaggtcccggggggtccagggggggcccgtcgtcaatggctnctganaagggtggcacagacgcacctcacctgcnaaggaccaccctgnaaaagtctgtggccanagctccttgaccacttgtcaccccttcctcanatggnagggtggaggcatnggactcaanctancaacngaagcaaacctggatcnttnccagtactctctgtaaggatctggaacttccatncagtcanactccatgccgtaaatagggaggaaggttgtgntggacgaagacactcatcaacctgctcataaccatgg

SEQ ID NO: 495445 - DNA, 649 bp, Homo sapiens
ccggggtcacccgggattcgtggccagggtccctggggattcctggctcccctgtgtccccccaggcccagttccttgtgttttataggttgcccccccgttttttaccctggtgtggcctgtcctttctgatggcctaaattcacgtttctcggattggaggggcccacctaaatttcagattaagccccagggtttgttcaacccttggattggttcccagccgtgatcccattcccacgggagtttaagggttggagttcttcgcttctgttcaccccagggccttggagttgccaggtggcgcccattcttcggcttcactgccaagcttctcccttcccgggtttcacgcccatttctccttcccattcttcttctggaacttcacgtccagttaggtttttccttttccagccaatcccttggaaataacctttcttttatttatttaattttatttaattttatttatttaatatttatttgtagtctgctgccacccagttgccgccacccatgcccacgcctctccccgtgggaagaccggacacatctatttaatttattaatttattttgggtcctcccctgtggaagccggaaacatctattttatttatttatttatttggagaccctggttcttt

SEQ ID NO: 495446 - DNA, 509 bp, Homo sapiens
agcggagcggacaccagctgctccccgcgccgggcgccgcgcgccgctgctccgccgctcggcccctcggctgctgctccgccggcgctgcctccctcgccccgcaggctcccccttgcaacttggcgggcctccatcccttatagtccggcccggcccggccgccgccaccccccgatgcccggagccagagctcccggggtctcctgggccggctgtcggtgcctggcagggacgcggagggggctgtggggcccgcggctcgtcacaccccgacggatagagccgccgacaggaacggggcgcgggacggaacgatggaactccacaatcctggagacaccggctgcaagattgccagacatcgccaaggagaagtatcccgctgttcagctaacggctgatcaagacttgccttccctgtcctccaagaccagatgatgattattctccaccgtctaagagaccaaaggccaatgagctaccggaagccgccagtcccggaaccg

SEQ ID NO: 495447 - DNA, 110 bp, Homo sapiens
atctccaccatcctctttggcgctgcgtacacctgcttggaggctggacatcactggagaggaaacccactcaacaggctccggtgaagattgaaccaggcgttgacccg

SEQ ID NO: 495448 - DNA, 206 bp, Homo sapiens
aggctcctgtatgttttgcttgtcttgtgggcgttatgtgaggaggtgtgcggtagaacaacgctagctcgcatgtgcaccatgtgccgcttcccacgctgacctgtgctccctccccaatcatctttcctgttccagagaggtggggctgaggtgtctccatctctgcctcaacttcatggtgcactgagctgtacctcaccgta

SEQ ID NO: 495449 - DNA, 1057 bp, Homo sapiens
  misc_feature (424)..(424): n is a, c, g, or t
ggagccagcgaggcctctccattcactctccgcgcccgttctccgagctgtcctcccgttccggcatgtgcgaccatgcacagcgatgacaggaacaggccatctccattcgccaaagacttctttgggcggaggcatcgccggcggcatctccaagacggccggggctccgatcgagcgggtcaaagctgcgtgctgcaggatccagtcaagtccagacaagtcagattctgccgtgcgaccaagcatgtatcacagggcagtcgttggagcgtgcatttgatcctgcagtcccacaaggacgcaggggactgtgcttgtccattcgtggacgggcgcaacgcgtgtggccaacggtgcagtctcgcctacattaccaccagtcataggcctttcaagcattctgaccattcaagggtataangtagcaagagcagattcgttcctggcgcgggcgtggaacgaggagctacgacgctagattcgtggtaggatacgtttgacgggcataccatggacctcgcgagcggttgccggtccggtggacgagcgtccgctcgtgcgttcggtgtaccccgcttaggagtttcagccagaatcccgcgctggcgagcgagacgctggcgcaaagtcatggcacacgagcgcgagttcctgagggccctggggagactggcgctggtgaacgaatcaccaagatccagaacggcatccggggccctggtaccagggcttcaagttgtctccgtgcagggcatcatcatctaacgggccggctactttcggcgtgtacgatacaggcaaagggccatgctccccgaacccgaaagaaacacgcacaatcggggaggaggctgggatggatcgggcaaaacccggtgaacgggccgtgcggcctgtccgttggttgttccttaaccccgtttcgacaacaggtagccgcacgggcgcattgatgattccggtccgcgcggcaaaagaaggtgaacctccatgtacaccgggccccggacatcgctggagcgacgaacttccaaaataaggcgcgccaggccat

SEQ ID NO: 495450 - DNA, 655 bp, Homo sapiens
  misc_feature (655)..(655): n is a, c, g, or t
atttaacaaaggctactggttccacttatgaatgtgcttactgaaacagtaaacaacaacaaaattcagtgattctaataaataccaccctgtgatgtaacacacctttgtcatgtcctgtgaggtgaattggaaaatactcataaatacactccctggctgaattatgaacaacatgatagtggcttcagggaaaagctcttgggtgtagagagtggcaagctgagcctacacacttactgttccacagattcacaccatttttaccttgaccagaccatttttaacaacactgattcatcagcctaggtagtcagggagccatgtttcttgaaacactgcagctttgtcactttcaacgaccacacttccacagtatttggtggccacatgcattaataatccaggcttttcttaattcacaaaaattagatctttcgtggaacactctttgtacattgctaaccatgaagtttgacacaaaattctttccctgtagagcatggctgctgattatcatcaacatgtggtttcctgcatattgtataactgcactggggcccactattgaacagatcttgcatagttcagtgaggccaggatttccacattgaccaagcatgttatataagctcattttggacaacactctggn

SEQ ID NO: 495451 - DNA, 992 bp, Homo sapiens
taacccctccttagttttttgcgctcaaaaaccaaataaaacccccccccccttgtaacgggggggcggggaaaaaacacaaaaacgcatcaaacccggctcgtgaagaccccctagttttctcttgccccctcgccattttattccgccctggtattggagtttttggtttctcactcgtgctcctcgtgcaggcatggggtgagagtgaggggggtggacgccctcctggggtggtgcactgggccatcatagacgcccccttgtggttcggatgtctcagagaggggagattaggggatgaaggtgcgccatctttgctccgtggccttcggcttctttggggtgcacctgttgttgtggggctccccaagaatgctccttgaggtggctgggaggtgggcggtggatgtgggcagggggctcttcctcacaggggggtgtcagcggaggtggcttgctcgagaggcgccccagtgagaggtggtgcggctccttgggtggtgcgccatgagggggttgcctcgtgagggggtgacagtggtgtgccaatcctggtgtgttgtttgtacacccgagaggggggtgtcacccaatcagtggcttggggtgagcaggggggagggcgccagccatctccagcactctttggtttgagaagcgccgtactcccctatgatcctcctctggggtgacacttctgtggtccctgtgccccgtttaatgaacaccctgtgtgtcctattcggctctccccgagggggagagctcgccagaagcgactcctagtgggggggcaccccttcctctgggtgggggcccagtgtgctagggtgtgttagtagctcccggtgcgaactaatagaggaggcgtctacggcgggtggtctgatgatcccctactaggttcagtgcaactacttgtcctgggttctgtcgccgtccctggacctgtgttgttttgttcctccggatacccccggtgttgtttt

SEQ ID NO: 495452 - DNA, 510 bp, Homo sapiens
ctggttggcacatgtgttatctagagagattttacataaatgtacatttccttgcttctcttgaagagtggaagcttggcctggtgcagggctcactcctgtagtcccagcactttgggaagccgaggcgggcagatcacctgagctcaagagctcgagaccagcctggccaatatgatgaaactttgtctccatggaaaatacaaaaaattagccaggcatggtggcatgcacctgtagtcccagctactcaggaggcagaggcacgagaattgcttgaacctgggaggtggaggtggcagtgagccgagattgtgccattgcactccagcctgggtgacaagaggaaaactctgtctcaaaaaaaaaaaaaaaaaaaaaaggggggaaactcacgcttgctaagactttgattggcttacaaacaacccctgtggtcggggttcggccccaaaaagaccttgatttgtttcccattcctttctttgggacccaggcaaccccggggga

SEQ ID NO: 495453 - DNA, 135 bp, Homo sapiens
gacacacgccgagtctccatacgcggtaataacgacatcataatggacgaagttgttgcgcaacaacttcgtccatactgacctgaccttaagaagtgtgttggaccttcggacgtgtgggagtaccgatgctcg

SEQ ID NO: 495454 - DNA, 1069 bp, Homo sapiens
cattctagtaggaaaggacaataagatttttctatcaaacatgtgtcatgccagtaagagatgttatattctttatctcatttcattccccacccaaaacataagctaccatatagcttataagtctcaaatttttgccttttactaaacatgtgattgtttctattcacttgtgtactgcttcatcaccgtactattaggcaacttccattatttttcccttgctgctaaggtaaagatttaatctaaataatttctggcctctcatagttttctctactctttacacagagacataaatacgagggccaggtgctggtggctcacgcctgtgatcccagcactttgggaggccaagcacgggcggatcatgaggtcaagcacatcaagatcatcctggacaacatggtgaaaaccctgtctctactcaccacatacacaaaatgagctgggcatgcgtgagggcgtgccctgctagctcccactgtactttgggaggctgacggcaggaaacattctcgacacccaggacacggaagctagcagtgagctgagatcacaccatgcactccacgccggtgacagagcacgacatccggctcttaaaaacaaaacaaacccaaacaaagggacaccgcccacaaacaaccacccaagggaacccaccgcataacagcacacaaccacactaggcccacaatgcgccacacacccagaagaacgacacagaaaggcccaccccgtccgaatcaacaaaacgtacggaaaggtaaataagtacatggcaacaagaccaagaacaactaaatagcgggactacaacccaggaagcaaaccaaaaacaaataacagctccaggctacctctacggaagagaacggcggaccacaacgccaacataaaccgagcgctcaacaaccggctgcacagtcactcacaaaaggacaaaggcgacaacagacccacccacgacccagcgccacagcgcacaagaggtgcacgctactgaccaccacgcacaggcatcacccgaccaaaacgccagacacaacccgaccagaaacttgag

SEQ ID NO: 495455 - DNA, 137 bp, Homo sapiens
gatgggactgttgtcatctctgagctcttctttatttctgactgtgatttatttggagtggaggcttgtttttaagaaatgcatgtcttgttggttgtctacgaataacatgcatttaacatctccgtgcactcgtg

SEQ ID NO: 495456 - DNA, 1728 bp, Homo sapiens
attcagtgtttctgtgtagttgtgtattctgtgtttgtgtgtttgttcattagttgattgctgagcatagtttgatcgtgtttttccaccatttgtgtctgttatcaatcacgaatcgatgagaaaaacaaaaaagcatgcataaaagtgagacgcaaaagaagaagaaggtgtgatcgtacacttatcatcatttgtagtctatctctgagtttgttcagcctatcgttgttggctctctgttggttggtagtgcttctacgtgtgtctttgtgttggttctcttgttgcgttgctagctagtatggtctcggcggcttgtgggtagctagcttggtgttttgggggtagtgttcttgtggactgtgctggtgtctaactcttgtgttgtggctgctctgtagtaatctagcccccctgtggttgttgttacgccaacgagcccgttggttgttttttgcgcacgcgctgctgtttgtttcgcttttggtggggtcccccctccctctcgcgaagtggtgggttctgctcatcgtggtcgcggcagtgatacttgtgtggggtgcttgcccggcatgcactatcttccgggtggggcgtgcgactcaactagatgttgtgtagtgtatggattggtcgtgtagtcagcgcagctaggtttccgctcgacagcgtttgtctccgcgccagcagtagtattaaagacgccggtgtcggtgtgcgctcgtgtttgtctctgtttttttgtatagggcggtgtgaccacagaccgtaatttagctcgtcgtgtctgtatgagacagagcgttcttgttttgtctcgctgaggagcagccacgaactgttgtgggggcacagaaacgttggtgtggcgcacaatagttgggtggtgtgcgcgcccacaccacttgttgaatcatttgtttgcctggtgttcccccccacaagacaagatgttctgtgcgctgtcgatatactcttccgtttcggggcggcgctcttaatagaacggcggaagagtagaatgtgcgtgtgtgtgttataatataacatgttgtttgcatacatcgggagaaccaccctctcgtcgggtagttgagacccccacgcatcgtggtagtagtgttctctcccgcccaccatcatgttactgttgtttaatataaaagacaagaggtctgttttccgcgacagcagacacgtcgactcctgttataatacggtgtgggcgccgcacgaggtggtgccgcgcgcctcgtgttaataggacccacggccctgtgttgcgacgccgccagcagatattatatgatcacgacagcatcatttgcccaacgaagtatatatctgttgtgtggtgggaagaaatccgcccgacagatatctcgcgcgagtgtatgctctctctatagtaggagatctctcttttggcacaaaagatcgtggcgaataacagaggcgatggggtcgcgatattctcccgcgcgcgagcatctcgctctctctatgattagaccccccccacggctctgttgtgtgaaacagtccctctctttcgtggtttagatcttcaaagctgtctacggcccttggcccgcccctttacgagtcagtcgtgaggagatgagaccatggcgcgccttctagatatctgctccgtcagactatgacgaacacgtacacgacacaatataggcaggtgtaacagccccacaatagacagagaag

SEQ ID NO: 495457 - DNA, 431 bp, Homo sapiens
gtacgaaccgagctcgtacccctaattggttcttcgatgacgcaatgcatcccgattgaatgcagtggattgtatgcagcatggcccaaagcatcccgattgaatgcagtggattccatgcattttgattgaatgcagtgtactccatgcagcgtgggaacatgcatcccgattgaatgtagtggattccatgcagcgtgatggaatgcagtggattccatgcagtgtgaagaaattgaaccctattgtaagaagtggattatatgcagcatgattgaatgcagtcgattccatgcagcgtcattgaatgcagtggattttctgcagcatggcccaaagcatcccgattgaatgcattggatccatccattgtgattgaatgcagtgtactccgtcatcgaagaaccaattagccttctacgtctcatcac

SEQ ID NO: 495458 - DNA, 249 bp, Homo sapiens
tacaatcgatgctctgtaccgcattcagacacatgacgttgatgctcatcactaagtgtgccatcagagaaatgcaaatcaaaaccacaatgagataccatctcacaccagttagaatggcgatcattcgaaaagtcaggaaacaacaggtgctggagaggatgtggagaaataggaacacttttacactgtttgtggaggtagcactggggattctctaaaagtccgaactggcagggaattcaagct

SEQ ID NO: 495459 - DNA, 577 bp, Homo sapiens
  misc_feature (178)..(178): n is a, c, g, or t
cgctagcggcattaagtgaacgcatcccgattgaatgcagtggattttctgcagcatggcccaaagcatcccgattgaatgcagtggattccatgcagcgtcattgaatgcagaggattccatgcattgtggcgcaatggatcccgattgtatgcactggagtccatgcagcgaagcncaatgcatcccgattgaatgcagtggattgtatgcagcatggcccaaagcatcccgattgaatgcagtggattccatgcattttgattgaatgcagtgtactccatgcagcgtgggaacatgcatcccgattgaatgtagtggattccatgcagcgtgatggaatgcagtggattccatgcagtgtgaagaaattgaaccctattgtaagaagtggattatatgcagcatgattgaatgcagtcgattccatgcagcgtcattgaatgcagtggattttctgcagcatggcccaaagcatcccgattgaatgcattggatccatccattgtgattgaatgcagaggattccatgcattgtggtgcaatggatcccgactgtatgcactgcactcccatg

SEQ ID NO: 495460 - DNA, 217 bp, Homo sapiens
gacaatcccattgtgctacgttgtatactaggtgaagctcattacagactctagtgttcagtgttctcattgtggagctggtcacctcatccttcttgcctaacacatatcataatctgactcccagaaggaaagcagattttgggcataacccacattgtttgtaccaacagttcaggcacagtgagccactcttatcatttagggagtaatgaga

SEQ ID NO: 495461 - DNA, 357 bp, Homo sapiens
taaatgtatccgacccattcagcgaggcccaatgcatcccgattgaatgcagtggattgtatgcagcatggcccaaagcatcccgattgaatgcagtggattccatgcattttgattgaatgcagtgtactccatgcagcgtgggaacatgcatcccgattgaatgtagtggattccatgcagcgtgatggaatgcagtggattccatgcagtgtgaagaaatggaaccctattgaatgcagtggattttatgcagcatgattgaatgcagtggattccatgcaacatgatttcatgcagtggattttatgcagtatggcctcgactaattttccggatcctctagatcacatgcag

SEQ ID NO: 495462 - DNA, 205 bp, Homo sapiens
acgactggtcccaattattgacgcccaccagagcctcagtcaggcgcaggccacactagccactgttctctgtcgtctctgggagagggcttggtgcatcaaactcccagtgcttgcgatgaggctcatccaggcccctagtgttcctccctgcagtcgttaacgtcctcagttgacggcaggaaggcgagatagtgcatacttg

SEQ ID NO: 495463 - DNA, 313 bp, Homo sapiens
  misc_feature (178)..(178): n is a, c, g, or t
cgctagcggcattaagtgaacgcatcccgattgaatgcagtggattttctgcagcatggcccaaagcatcccgattgaatgcagtggattccatgcagcgtcattgaatgcagaggattccatgcattgtggcgcaatggatcccgattgtatgcactggagtccatgcagcgaagcnggccaaatgcatcctaattgaatgcagtggattttaagcagcatggctcaaaacatcccgattgaatgcagtggattccctgcagcatgacgttcactatgccgctagcgcgggatcctctaagtcacctcagca

SEQ ID NO: 495464 - DNA, 178 bp, Homo sapiens
cccccaatatggacatggactgtttgcgaccgagccgtttctgcccgagcatcttgcggtggtgcgtgccttgcaatccggcaatctcgaaggcgcgcaagcggcactggcccaccatctgcagatttcacaggaacgggcactgttgcgcgttcaaaccattgcgcgcggcatcgaa

SEQ ID NO: 495465 - DNA, 669 bp, Homo sapiens
  misc_feature (178)..(178): n is a, c, g, or t
  misc_feature (265)..(265): n is a, c, g, or t
  misc_feature (284)..(284): n is a, c, g, or t
  misc_feature (328)..(328): n is a, c, g, or t
  misc_feature (336)..(336): n is a, c, g, or t
  misc_feature (456)..(456): n is a, c, g, or t
cgctagcggcattaagtgaacgcatcccgattgaatgcagtggattttctgcagcatggcccaaagcatcccgattgaatgcagtggattccatgcagcgtcattgaatgcagaggattccatgcattgtggcgcaatggatcccgattgtatgcactggagtccatgcagcgaagcncaatgcatcccgattgaatgcagtggattgtatgcagcatggcccaaagcatcccgattgaatgcagtggattccatgcagcgtggnccaatggatctcgattgantgcagtggattccatgcagtgtggtgcagtggattctgattgantgcagtgnattccatgcatcgtggcacaatggatcccaattgaatgcagtggattccatgcagcgtggtccaatggatctcgattgaatgcagtggattccatgcagcgtgtttgaatgcagtgtatnccatgcagcgtgaagaaatgaaccctattgtaagaagtggattatatgcagcatgattgaatgcagtcgattccatgcagcgtcattgaatgcagtggattttctgcagcatggcccaaagcatcccgattgaatgcattggatccatccattgtgattgaatgcagtgtactccgtcatcgaagaaccaattagccttctacgtctcatcac

SEQ ID NO: 495466 - DNA, 831 bp, Homo sapiens
  misc_feature (178)..(178): n is a, c, g, or t
  misc_feature (265)..(265): n is a, c, g, or t
  misc_feature (284)..(284): n is a, c, g, or t
  misc_feature (328)..(328): n is a, c, g, or t
  misc_feature (336)..(336): n is a, c, g, or t
  misc_feature (456)..(456): n is a, c, g, or t
cgctagcggcattaagtgaacgcatcccgattgaatgcagtggattttctgcagcatggcccaaagcatcccgattgaatgcagtggattccatgcagcgtcattgaatgcagaggattccatgcattgtggcgcaatggatcccgattgtatgcactggagtccatgcagcgaagcncaatgcatcccgattgaatgcagtggattgtatgcagcatggcccaaagcatcccgattgaatgcagtggattccatgcagcgtggnccaatggatctcgattgantgcagtggattccatgcagtgtggtgcagtggattctgattgantgcagtgnattccatgcatcgtggcacaatggatcccaattgaatgcagtggattccatgcagcgtggtccaatggatctcgattgaatgcagtggattccatgcagcgtgtttgaatgcagtgtatnccatgcagcgtgaagaaaggaaccctattgaatgcagtggattttatgcagcatggattgaatgcagtcgattccatgcagcgtcattgaatgcagtggattttctgcagcatggcccaaagcatcccgattgaatgcattggatccatccattgtgattgaatgcagtcaatgacatacagcttagtaaaatgaatcccgattaaattccatggattacatgtagcgtgattaaatgcagtggattccatgcagtgatgtaaatgcttcccgattgaatgcagtgaattctatgcattgccattcaatgcagtgtaatatatgcagcgtggtaaatgcatcccgattgaatgcagtgattccagtacttcgtgg

SEQ ID NO: 495467 - DNA, 120 bp, Homo sapiens
agtaataggataatttcaggatgaccatcagtatgatcatttacagctgtctgaaggaagaaaggaaaattctggaaaacgcccagagatttaatcaggctcagtcggggaatattcaga

SEQ ID NO: 495468 - DNA, 562 bp, Homo sapiens
  misc_feature (63)..(63): n is a, c, g, or t
  misc_feature (135)..(135): n is a, c, g, or t
gggggccgacggggcattgtattagcaaattctcactaagacatgggattacacgacacgtantagggtgagggtcacttccactaggtccttacaatgggagcggtatttgccatcataggagggttcattccntgatttcccctattttcagggtacaccctagaccaaacctacgccaaaatccatttcactatcaaatttatggggggaaatttaacttttttcccccaacactttttgggcctatccggaaggccccgaggttactgggactaccccgagggataccccacatgaaacatcctatcattgggggggtcattcatttttttaacagcaggaaaattaataattttcatgatttgagaagccttggctttgaagggaaaagtcctaatagtagaagaaccccccataaacctgggggggttatatggaggcccccccccctcccacccatttgaagaacccggataaataaaatttagacaaaaaaggaaggaatggaaccccccaaagggggtttcaagccaaccccagggcccccatgactttttta

SEQ ID NO: 495469 - DNA, 557 bp, Homo sapiens
tccgccccgatccccccatcccgtttccctccaggtgttgttgagggcatatggcttcctctgctgcatccccttccagctccctcccctgctcagaatctgataccaaagatgacagggccctgggcccaggcagagagcgaccagcaggctcctcatgccctctcttgccaaaaatgcacaagagtgtttgagtgctgatgcatggtgcagtgccccctgtgtggagtgggccagagattttctatgaatctattatttcttcagacttgagtgcctttatggtagtcatgtgagccccctgcatgtctgtcatgacctcccatagactgtcattgccaaccatgctgccccacaatcctcctaccatttcttatgcattgtatgcaatcaacacgtgtgtgacctcacacacctctgccccttgggcctcccactcccatggctctgtggcggtccagaatgtgagcaggccctgggcctccacctctgtgcatgtggcacagaaggctggggtggggggacggagttgattcctccccagcctgtcccaggcg

SEQ ID NO: 495470 - DNA, 539 bp, Homo sapiens
  misc_feature (4)..(4): n is a, c, g, or t
  misc_feature (182)..(182): n is a, c, g, or t
  misc_feature (203)..(203): n is a, c, g, or t
  misc_feature (213)..(213): n is a, c, g, or t
  misc_feature (220)..(220): n is a, c, g, or t
  misc_feature (368)..(368): n is a, c, g, or t
  misc_feature (395)..(395): n is a, c, g, or t
  misc_feature (406)..(406): n is a, c, g, or t
  misc_feature (453)..(453): n is a, c, g, or t
  misc_feature (455)..(455): n is a, c, g, or t
  misc_feature (539)..(539): n is a, c, g, or t
acgnctgggggaggggtgctgcgtactgttcaatgagagccataatgtggctgtaactgtcttcctcatattgcaagagcactgctggcagatccagctcctcatatagcgccttcacccgggccactttctcagcctccttctgcccgtaattttccttcaggatctggtactgttctggngtggcccgttgcagacactgnaccaccagcnagctgcntttgttgtcctggatgtcagtgccaattttgccggtcacactggggtccccaaagaggtcaaggtaatcatcctgaatctgaaagagctcccccatctccagcaggatcttcttggcattggcgtgctccttctcgccatcaattccngccatgtacatggctgcagctataggngggtaggaggngtagaaaggctgtcttgtacttgacaatagatttgtacctggggttntngggggagaagagaaacttctcagtgagggggcaatggcgacatcgctgggcccgtccctcggctggtccaagacatgggttcgn

SEQ ID NO: 495471 - DNA, 292 bp, Homo sapiens
taccttaacctcatgtttgagatccagaacagaaaatgggttgtggaggtgttgcgggggaggtatcgaggataggagagtatatgggtttggcaccatgggggtggataggcaaaacaattttggtttgataagtgtgcaggatcctggaacttaacctgttaagacttgtctctgttttttgggacagtgtaaaaatggggggaattgtaaagtgagatgtttatatgtgctttaaaatgtgccatgcttgtaacatggcaatgttgataacatgtgctttatttccctt

SEQ ID NO: 495472 - DNA, 149 bp, Homo sapiens
gatagctggaccgcccgaaaatggatggcgctgaagcgcgcgacctatactcgaccgtcgaggcaattgccaggcttcgatgagtaggaggacgcgggggtcgttgagaaaccttgggcgtgagcctgggtggacctggcccccggtgc

SEQ ID NO: 495473 - DNA, 166 bp, Homo sapiens
gtgctctagagacccggcatactgaccttctggcatacctgaccttctggcatacctgaccttctggaggctcaagcaacaaggaggtgcaggtaagggtgcagtgcagccactgagggacagctgggaactagattgctgtagttctccagaatgtccaggtatg

SEQ ID NO: 495474 - DNA, 487 bp, Homo sapiens
acggagaaacctcccaggtttgtagacagtattagcgtacaaacaccttgatcttggtttttaagcccttctcccatcagtcctagattaggccgctgttcagccatgcaggggtgttggtttatgcctgctgcagcagtgggcataatgaatataatttacccagtggacaaaggtgtgtaccaagtgaatttaaataattggtgtggattggccagtagctaagaagtgggctcttaaagagtattgaagattgaaagggtttttctttcttttttaaaaaagaaaaacaaactattgattgtagataatgaaaagctagggtttgccctcttcatgtctactctccttccaaatagttatatccaaaactgtttttccctctcccctaccttgtcccccctaataaaatagaaacagggattgattaatgtcccgctcctgaatacatgtaaaatttgtacaaaaatatcttctatgaaaatga

SEQ ID NO: 495475 - DNA, 206 bp, Homo sapiens
  misc_feature (31)..(32): n is a, c, g, or t
  misc_feature (35)..(35): n is a, c, g, or t
  misc_feature (46)..(46): n is a, c, g, or t
  misc_feature (81)..(81): n is a, c, g, or t
  misc_feature (120)..(120): n is a, c, g, or t
  misc_feature (192)..(192): n is a, c, g, or t
ggaattgtggttaggggttccttgaaatcannctncatattaaggncaaaccaagggaaaattgtaaccaccaaaggaaantaaaccaataattgaaataataaattgctattctgtaangacatacagtctgtgtaagatgtatcttatttacagagacatttttgaaaattaaaatattaaatacttttngttatatagagaca

SEQ ID NO: 495476 - DNA, 163 bp, Homo sapiens
gtattgtcgcccagcctgttctatgagcgtccacggctcaactgagtcctcctgctttggcctcccaaagtgctgagattacaggacgccaccatgcccaggcacccagtttcaatatccttgtctctgttccccacccccaaagagatagattgaagttgcc

SEQ ID NO: 495477 - DNA, 1278 bp, Homo sapiens
tctgttgttttctgttttgttgttgttctaaggtaaccgagagaaagagaagaaggacaagaaaacagacagagagggagaaacagatcacaagtgaggttcgtattgaatgtgcatgtatgattattttatctcgtcgtcgctcgcttctgatatgagaggacttgtactttatctctttttcgatatcgcttcagtggttatgaattcaccctttgtttggggagcacaacaatgtggtgccacacgaatgaagatagtgcggctttctccttcgcgggagactgtgttttttgtgagagggcagacaccaccctggtgggcgctagccctctttctcggggcgctccctggggtgacatccccccggctggtttgggatttccttccctatattcccggggaaattgggcttttgtgtgtccaccccaggggggcctctttttttgtgagttttcgggaaccatttggctgcgcccacataaaggggtccaccagcttggcgtgcccacgtgcgtgggtgccgcgttggcgccccacatggtgaagagcaccttgggtcgccgcgccggaaccactggtttcgggcccctgagagagacccccctgtgttcccgctctttaggtattccccccgctgtaaatgttcccaggggccaccactggaatctctgaagtgatgtgcaacttgatcaagactggaggacacaagtgggagccagcgaaccaccgctgctgaacatgcgtcaacatgtcccccttgctcctttggctggtcaacccaacaaggtgttcgaccatggcagcatttaccaccctgaagtgcttgatatccccgaggaaactctgcattctcgcttcctggagggtgtccgccaaagttgcccagtgtctgtctgccagattggctaccccactgttgcatccagtgacccccattctatcatccacgggtaccaaacgagtcctggccttgtctgtggagagcggattacacccttcccaccttgctgaaaaaggtcaaggcctttcttggctgaatccactctgcctttgtggctgctgcccctgtggctgctgccacccaccacagctgctcctgctgctgctgcacgccccacgctataaggttgaaacccaggaagaatcggaggagtcggacgaggatatgggatttggtctctttgactaatcacccaaaagccacccacttagcccgttttatttgccaaaaccaggaaataaaggcttacttcctttaaaaaaaagaaaaaataa

SEQ ID NO: 495478 - DNA, 1093 bp, Homo sapiens
catcccagcacttatgggaggctgacgtgagtggatcacttgaggttgggagtatgagaccagccaggtcaccatgatagaaaccccatcttgggccgggtgcagtggctcacacctgtaatcccagcactttgggaggccaaggcgggtggatcacgaggtcaagagatcaagaccattctggccaacatgtatgacaccccatactccactaaaaaatacaaaaaattagcctgggcatggcgcgcgggtgccatgtagatcccagactacttgggcaggctgaggcagagagacgggcatagaacccgagcaagacagagctagcaaagtgagccgagatcatgccactgcacctccagactatgaggacaacagagacgagactccataccacaaaacaacaacacacgacatggcacccacaaaaagacaagacctgagagacagacgaaaaacggcagcaaaaaaacacctcgaacacaaacagacagtcacgagacaccacgaagacacacaactaggcaccagcaaaatgcacagacaaagactatcctggcgcaactcaaaccatccaggacaccccacacgtccctgacacaacacgaacaacgacaaggagaaacaggtaccactcgaggacacatcacaagacgaacacaacgataaatgtaaccgcaaaaccaaatgattaccagaaccaaagatatacaaatggccaaaggatgaacacaaacgaagacttcacaacgcaaagaccaaaccaaccaaaacgcacacaccaagctagaaagcaaaacaaacccaacaaaaacaaccacaacacaaaaacaaccgggacaaaatcccgcagaccacaccggatcacgagaggaacaaatgacgacgaaaacaccaaaaaaaaaagcaaaagccacaaagataccaacacaacaagagcacagaagaaaaaccaaagaagacgaacaaccagatgccacaggcacaacaaacaaaaaacaagaaagaagaaaaaaggagaaccccaaactgaaaacacaaaaacaaacaaaaccaaacaccacgcctcaccacacagcaccacaaaaacaca

SEQ ID NO: 495479 - DNA, 896 bp, Homo sapiens
aaaaattagctgggcatggtggcgggcgcctgtagtcccagatgctcaggaggctgaggcaggagaatcgcttgaacctgggaggcagaagattacagtaagccaagatcgccccactgcactccagcctggcgacagagtgagactccgtctcaaaataaaaaaaaaaataagaggtaaaacagaaagtaaagtctatagcccattaagaggtcttctaatatcagtggggatggtctggctcctacttaaaaaaaatattttacgctggatgtttaattatcccctttcagcaaagttgggatcagaacattttacaagtatgtgacaaagatcaggtcacctgtgaattttccacacaaatctcaagacactgaatagcaagaaaagtaactttacacggtagtgataggatattccttagacttggcgggctcttgggtcttagggtaccttgtcaagagtggtggaagcctttcctttcatgggccctgtgcaaggtaccggtttctgcctcctcttcagctggaagcgtagtggtagtatgggcccgaatatttgtccctgccgatgctgaccatgcctcccaggtcctggctctgggttccttgacctagggacaagatgggttgaggcgatcttggagcccagttgactttgacatgcgcgccgactttattcgtccactacccgggctaggaatttacctctcttttcattagcttacaattcattgagcatcggtgcctagggttccctcccgctattaagactggggttcccgggttttttctaactacccgtccgagtgtggcctttccaacaaatcgggcaccggcgagcacggcgccatcccccgtgctgtggggcctccccccccgggaaagggcgccgct

SEQ ID NO: 495480 - DNA, 211 bp, Homo sapiens
cctggctctgaacttaggggtgcagttcctggcaaagatggtgaaaccccatctttactaaaaatacaaaaattagccagatgtggtggtgcgcgcctatagtcccagctactcaggaagctgcaataggagaatcgcttgaacctgggaggcagaggttgcagtgagccaaggtcgcaccactgtactccagcctaagttcagagccagg

SEQ ID NO: 495481 - DNA, 387 bp, Homo sapiens
tgctgtcgtgggcatgcagttaaccttggcaagataaactttctaaactgattgagatttgtctcagatacttcgttcacaaactatttttaaagtcccagcgtaatttattttagcagctaaaagaaaaatcttggctggcacgttggctcatgcctgtaatcccagcaccttgggaggccaaggcggttggatcacaaggtcaggagttcaagatcatcctggccaacatggtgaaaccttgtctctactacaaatacaaaaattagtgggcatcttggcatgtgcctgtaatccccgctacctcagaggctgaggctggagaatcgcttgatccagggagtcatgggttgcagtgagccgagattgtgccacttcactctagcc

SEQ ID NO: 495482 - DNA, 879 bp, Homo sapiens
gagtgaccggaggcgcgggggagcggttccttgtgggctagaagaatcctgcaaaatgtctctctatccatctctcgaagactggaaggtacgaccaacgtacttcaggctcacactgctttttctgcaaaccctgccaatccagcaattttgtcagaagcttctgtcctatccctcacgatggaaatctctatcccagatgtatccagagctctctcaatacatggggctgagtttacaatgcaagaagaaatacgtgcaaatgtgcgccgtggtttctggtgcaccacttcaggggttgggtagcaagaccttccagtataaactatatggtgctcctgtaactggtacatgatgtgggaatcgtagagcagaaattaagcaagggatctcgtgaagtccatttctgtgtaaaggatccagatggacaaccattttgactcaggctttacaatcactacgatacatggtatatctgtcagctagtccaggctaattctccagcctcattggttggtctgagattgtgggaccaagtactttcagaatcactggtgaaaactggtgcaggatggagcttctgataaaagcgcaccaggttgctcaacacaggctttggagaggaagattaccatgaccattcgtgacagtgcctttgaaggacgattacatgctaaggatagccgtgcacatgtgcgttatcttaaaatggaataaactcctagtgaaggtagttgaaccgaatgtcttccgggatacgtgtggacatgcacagttttggtgaagccccgtgcgacaggaactgggggacatacaaggctggtaacaatacgcggcgataggtggccccgcgaagcagaggagccctgctttttccaa

SEQ ID NO: 495483 - DNA, 680 bp, Homo sapiens
ttcggcacgagaacattttatcattatgttaatactttactttgaaaggtatcattattttcaagacgtatcatttaactggtctactttatctagttacccacacctatgacttccataagtgaaatggctttatcagggaaaacaaaactagcctggataaatggggttggattggagacctaaaccaaaagctttttttgggctggccaagttggggcctggccacaggggccttcaagatcacctggatgggaagggaaatccaacctggtctttcctttaacaagttggttaacttggcacgggctgtattagcctggaggacaagctggcttttccaagggggtctgccataatggctgaaattttgtgatcattactgggtgaagcagaatggaattttttacctttgtagtgggcgttttatttattacaattaaaagaggaaagatggcccattaaagggagagtatccaaagcttaagggctcacagtttaattggtaaaggcaaacccttatggggaggttgtgtaaggccctcaaacttataggcctggtggcttttgctaaaatcccttttcttgggactccctttaagggctaggggttaaaaaccggccttcttggttcacacaaccctttcaggggttcgtgttacaccactttggttttggct

SEQ ID NO: 495484 - DNA, 149 bp, Homo sapiens
atcatcctgttgcgccgttttttaagcccgtcagaaaagcacagtattcgggtgggagtgacccgattctccaggtgccgtctgtcaccccttatactttagattaggacaaggtaactccctgtacccctatgcgccttccccgagac

SEQ ID NO: 495485 - DNA, 344 bp, Homo sapiens
tggcatttgatgagtaatgcattaaacctctaggtcattttgtagagaaataattatattattgagtctggccattcatacatgtattctagctaccaatttatttagttcttttttacttcactcaattttaatgttttaatttttattttgtggagaggtcttgtgtgcaatttaatcctaggcatttcatcatttttattgctatcctaaatgatatctttaaaaattttaggctgggcatacatggtggctcacaactataatcccagcactttgggaggcagaggtgggaggatcagtagaggccagggagtttgagaccagccttggcagaacagcaa

SEQ ID NO: 495486 - DNA, 469 bp, Homo sapiens
gcggtaccggtgtatatcgatgcactcttcaacttcatcctccttcgcttcgcgcttcttccaggagggcacaatcttggcatgtgtattctggcataggctccgcggccatgtgctcctggctcttatatctcgctccacctgctctgtctctccgcgctcctcctatagcccgcagtgcagccataccggtcagcctctaggcgctcggcctcctcctgtgcccgcttcctctcctcctccagatgcagggccctctgaatctgctccgatagctctctctctgccttctttgtcttctccacgcatctcaacccattgataggcaagtgccgtcttcatcatgtcctacgctcggccccctcaagttctgggagcggcgattacaacactacacgtgtgggatcattccaacacccgccttgtccacacagctggacaaggaaccctggggctgaatgacacaacc

SEQ ID NO: 495487 - DNA, 612 bp, Homo sapiens
tacccattgtttgaaggagtggagttggtcagaggagacacctaagtgtgagactcggaaacagcagaagagtggaatggggtctgatcacagggtcaccaggatgcccaggggcatcaccagacacaggactaggatgaggaagtctttgaattcaaacaggaagcttgtctcaggtgatcaataatccatttcttgtagaaactaacttctgtgtaaactccagggtatcctttgcgaccgcagccaatgccccagctcacaatccccacctggacccatgtgccatttaattcacagaccaggggccccccagaatctccctggaaaaagaaagacagtcactgtaggaaagaaataggatccacatcagagcaggctaattgcactgcaatgcgctacagagctaagcactaagggggcttccccaggaacccctaagaccctcctagccttaggtatctgtcaatatgagatctgagaattgacaatttccaataaaccaaaatcatgtacctactaaaaaggcgtgttccaaaaaacggaatatacctcatgaaattgtgcctactctgagacaataatgagtcaagtgctaacctgagtacactg

SEQ ID NO: 495488 - DNA, 118 bp, Homo sapiens
tagcttgtacgccagaagcggcggattacgacattaccaatgttttggaagggatcgggctaatcgagaaaaaagtccaagaacagcatccagtggaagggtgtggggcctggctgca

SEQ ID NO: 495489 - DNA, 130 bp, Homo sapiens
agccagacagaaaagcaataaagaaatagcagacgtgaacaacatgttaggccaaagggacggaacagggcatatacagagcattccatgggaacaggaagcagaatatacactcgtttgaaggggcaca

SEQ ID NO: 495490 - DNA, 337 bp, Homo sapiens
catgctagagggccttgacaaaaccattattgccgctttttaattgttattaaccacaaataagaaatcattttaggccgggtgtgatggctcatgcctgtaatcccaacactttgggaggccaaggtggtcagatcacctgaggtcaggagttcaagaccagcctggccaacatggtgaaaccccatctctaccaaaaatacaaaaattagctgggtgtggtggtgcatgcctgcaatcccaactactcgggaggctgaggcaggagaatcaactgaacctgtgagatgaaggttgcagtgagccaaggtcgtgccactgcactccagcctgggtg

SEQ ID NO: 495491 - DNA, 736 bp, Homo sapiens
ggcccatcgatttaaccacccctgtctgaaattattaggagggtctcgttcgcttcgttccttcattctgctctcactgtgtggtcgacacccctggagaccccattttcataaagttacaaggacacacttcttgtgcgctcttacattactctcgcctcaaaagtagcctcagaaggaacagccaattgcgctctaccttctacccaccctccaacgccgcttcatattgaaacgggtaggatccaagccctccgcttaggatctctgaaagcggatttgtggctgcatgctgcaagtgggcgccgagaccacattacctccctacccgtcagccgcgcgcatcggaccaacgcattaccacaacccagctgtcccttctcccccgccacgaaaacttcgcctacgctctcgtagaccggttgcaccgttcaagcaatagttgcgcgtgtcgggtgcttcttcataatcttgcccaacatgacagactttaggatgcccctccatcaagggagctcctcaggaaaacccctcggtggtgcccagtacggatacggataatgagcagtacaatccttcctcgagggtcaactgtctcaggcttggggaggcccccaaaaaccagcacacgtcggactcgcacagacattcttccaaattttccctcccctaggttcccacgactacacctggggctcacaatcggctcctatccacaaaccccctggccttcaac

SEQ ID NO: 495492 - DNA, 176 bp, Homo sapiens
tgatctaaaggatccccgtaatcgatgacgtaaaggctcctctagaagggatataaagcaccgccaggtccttggagtttaaagctggtggctcgtagtggttcgggcgagcagtttgtgtggattaaactggtgaaggttaagggtctaagcatagtgggggtatctaatcccag

SEQ ID NO: 495493 - DNA, 342 bp, Homo sapiens
  misc_feature (15)..(15): n is a, c, g, or t
  misc_feature (46)..(46): n is a, c, g, or t
  misc_feature (232)..(232): n is a, c, g, or t
  misc_feature (234)..(234): n is a, c, g, or t
gcctttcctcctttnatccaccattaaaaaaattaccaccctttgnaagagttcaggattgaaaatgaggaagagaggccaggtgcaagttgtcgcgcctgtaatctcagcactttgggaggccgaggcgggcagatgacagggtcaggagtttgagaccagcctgaccaacatggtgaaaccccatctctactaaaaatgcgagaattggccgggtgtggtggcacacgcntnataatcctagctactcaggaggctgaggtgggagaatcacttgaacctgggaggcggaggttgcagtgagccaagatcatgccattgcactccagtctgggtgacaga

SEQ ID NO: 495494 - DNA, 204 bp, Homo sapiens
  misc_feature (171)..(171): n is a, c, g, or t
tgcgacgaaagggtggaagactcaggtggagaaggagttggaccagtcaacatctctgttgtcacaagcagtgtttcctctggatatggcagtggcaatggctatggcggtggcctcggtggaggtcttggctggcggcctcgtgtggaggtcttgcccggaggtagcagntgggagctactactccagctgttggggtcgcag

SEQ ID NO: 495495 - DNA, 945 bp, Homo sapiens
  misc_feature (231)..(231): n is a, c, g, or t
  misc_feature (341)..(341): n is a, c, g, or t
  misc_feature (362)..(362): n is a, c, g, or t
  misc_feature (474)..(474): n is a, c, g, or t
  misc_feature (536)..(536): n is a, c, g, or t
  misc_feature (553)..(553): n is a, c, g, or t
  misc_feature (581)..(581): n is a, c, g, or t
  misc_feature (882)..(882): n is a, c, g, or t
agcgcgctgctgcggctgctgcgcacgggtgccccgatccgctgtgtgcctgcggtaggggaccagtgcagggaccgggtcgcgccgtgcctatggacctgtatccacatctggagggagcgcggtgcagccgctgactcgcagaagttaccggccgtcgttcgtgttaagaagtgtaacgtgggtcacgtacattgtcccccgtttcatgatagttccatcatggaaggntagaactcgtaacaggaggaacaactggcattctctatgaagcaaagtcacgaaactgcatgcagtactgacgcaatctggtaaacactatgcagttggtatgaagatancgctcggatggatcaaactgnctaatatatggagacttggccagccaagggcagccaactgaaaattcccatttaaagaccaacttattgttacacagggatggacacaggctatcggcataatgtggtggcncgaaaatagttcttttccctgtaacaagggggcttactactaatgggacatctaatggatanccactgcgcctcagtancattgcgggacacggagtccctcagtgnagaaacaggagtaacgaaaggcacgaagacgtgcttgtatgggaggcactagagtagagttccctatttgtcactggttatatggccgaaagaagttacagggcgtgcgaagagggaattatcgtgtatcctagtgggtagggacggaacaagggttattgtcaagtggctggaaagggaattcgcatttggggaatattttcgggccatcgtatactttgacgtggaacgggtgtaataccagtacttgggacagagttcaagttggcatgattcaaagttgcgaaactgacatccatgnaatgtccctacagagagggtattcactggaattagtatgaattgacatggattgaacggaaag

SEQ ID NO: 495496 - DNA, 246 bp, Homo sapiens
gcgccattactgtccttactagaatgagtacaatttaaaataatcccatcagtgggcatattaaataaagtttcgggttaccccattagtttttaattgagcgtaattttcactttttacttcgacgttttaaaaattatccagtaacatccaggccttttcctccctcttccctgaaactacagggctggcagtggtgtgtctgctttccaagtcactggagcacactctgatcgcaatgccagc

SEQ ID NO: 495497 - DNA, 1311 bp, Homo sapiens
  misc_feature (983)..(983): n is a, c, g, or t
ggggttccaatataagaggggggttttttctttataaatatttttctccacgcgctcccaacatatttggggataataaccccgctgttatttttcttgttctcacagggggaaataagcccctttgtttgtaggaaatggcctcaaaactttgaaggaggcttggtgtataatgatcccctttcggtgggggggaaatgaatcgattacttatttatgttggttatgcatatgtctgtgtaggtggtggtagagtaaagatagggatgtgttagcatccccaatcgggaagattgtttttttggcgccttcttattgtccttccttctgtgggtggagaaaaatttgtgtgcagaaaaattttttcacctctcccaaaaaagttgtgtcacacacggcgcgtcgtataaaaatttgttttgtcccccccacatctcacgggtggtatacctcgtgggagggggacaaattgttgttttatgtgttggtgtggaccacaagcagggggtgggccgtctgtgtcccccttcatattatattgtgatccccaatcatggtcgcccctctcaacatggggcgacatgatgtgtgatagacgtctcgtctgttaataaggagacattttttttaaagggcgttttaataaaagttgtgataatcgttgtctaaattagagagatggtttaaggcccctctgtgagatatacacccactacggagagtggttttttgggagagtgtctcacagtgggagaccctccccctgtgtgtcttttctctctctagtctttctctctctcgctcttctctcaaaagggccacattgagaagccctgaaaatagtgcccacaaacttgggcacagttatagagagagcgagaaaagagatggcacattgggagagagaaaattttatagagagagagcgtttctcaaaactcttttaattcttcaaatgttccacacacatggggtcttaaatntggtataacaatataaataaataatgccctcacacacactggagattgtataaaaggcacatgtggagattctcttgagaggagatttttattattttggtagaatgtgaattgtgtcttttgcacgtaattataaagggagaaagaagagaaattaaatgggcacattaaccctatttttgtttttgaaagccacgggtaagttgtaatgagattttgttaaccacagcacagtggctaaacctgagaatgtggacctggttaccttgggaaagcagggacttatatgaatgtactattaaattaaaagcgggctgattccccggga

SEQ ID NO: 495498 - DNA, 632 bp, Homo sapiens
tcctctcacaaggacctttattgaaaaaacatgcacagctgccgggccctgaaagccccaggggtcccattcaggaagaggcaaccaaaaacaaaccgagggccccaccaacagctcgtgtgcgcgggctctcctctctgtgggagtgggtgtggcagcaacagctctcactctcagcaacaccctgtgtgtatctcattcatctcgaggttcaccatgtgttattcaagaggccgcgggagaagcgtggagagtggcggctccccgcggagttgtgtatagaagagggtgtatgtgccaacaatcaagcgtctgctgtggtgaatagaggagagagtgtgtgtatagactctctcgcggaaacaagtgtgcgtcgcagaaaattatccgagggtagagggtcactcagcaacgagagggacagtggtagagtgagggagagggtggataactctctcaccccaccaccacaacaagtagacaaccaaaacaactctcatcccacccataatgaagggagaaggaaaagaggagagtcggcacgagcatcaacacgccggggaacaatcaacccctagctgtgaggaaaagcctcccccctccccccgaagagggaagaggaaagagaaaag

SEQ ID NO: 495499 - DNA, 354 bp, Homo sapiens
cagcaggtccgaactccataactcttagcgattacacattagacaacaaggatatagaacgaggacagagtaagtttagctcccaccgtattcagacctctataaaggagtcaacgcagaatgtgaccttacatgaaggagtccacgcaaggagtgagcagcgtgttcagggagatcacagcctcctctgccatctccatacctacatcaaacctaaacaggagaccgaccccttagaccccgtcgtagtccaggaaatgtcagtgctgatgccaaatgcaaaaaggagcggacgacggacgcattcgtcgaccgatatgggaactcctcattctatacatccttactgagtac

SEQ ID NO: 495500 - DNA, 143 bp, Homo sapiens
  misc_feature (2)..(2): n is a, c, g, or t
anagtgtggaatcagcgtgtctccaactctgtatcagcgcctctagctcttccccaagtcccgtttctgcttctcagctttattccgggaagcacgctcagactccaggtcttcctggagttcagagacctgagcaagccagg

SEQ ID NO: 495501 - DNA, 214 bp, Homo sapiens
cgtgcggcatactcagcatgtcacgcagtcggtagggaaaggcgcttggctggccagaagtatgccacttacactgggaggctggcagagtggggtgcaaacagacctggtgcaatggtcatcagccggatacctatgggagccatatcccgagcaatgggcagtgtcatgcccactataccccccttggaagcagagtatgcagattgaccaa

SEQ ID NO: 495502 - DNA, 151 bp, Homo sapiens
cggaccgtgcggcaggggggagcagtctgcagctgggcctgaaacgggcagctgctcaggactggccagtgtcttcagcagatagtctcctgctcagctgggaatttttctctattagttcttgattgctctttgaggacctccacaacct

SEQ ID NO: 495503 - DNA, 344 bp, Homo sapiens
acccggtccccttacgtttttttaggcaatcctatcccacctcttcttggaccagttcactcacccgatgggcccaacacttcatcatccaccacctcctggagggggtaccccgaggtgctccgctggcgactctgctcattctgggggtgggggtgacggctggccgtgatctttcccgtaatctggcccctcttacggaacctaggctccgttctgcccatggccttcttctggacactgataggatccagaagagtatgttatcaattctcaagcctaggagaagccaggagcagagaacagctctgagacgatactgcgggccaactgatctccaggca

SEQ ID NO: 495504 - DNA, 482 bp, Homo sapiens
  misc_feature (15)..(15): n is a, c, g, or t
  misc_feature (147)..(147): n is a, c, g, or t
  misc_feature (349)..(349): n is a, c, g, or t
  misc_feature (398)..(398): n is a, c, g, or t
  misc_feature (408)..(408): n is a, c, g, or t
  misc_feature (423)..(423): n is a, c, g, or t
  misc_feature (427)..(427): n is a, c, g, or t
  misc_feature (434)..(434): n is a, c, g, or t
  misc_feature (449)..(449): n is a, c, g, or t
  misc_feature (466)..(466): n is a, c, g, or t
  misc_feature (474)..(474): n is a, c, g, or t
tcggggggcaccccnatgtaccctgggatcgctggccgcatcagaaaagagatcacggcgtgggcgcccagccccatgaagatcaagatcatcgccccgccggagcgcaaatactcggtgtggatcggggggtccattctggcctcnctgtccaccttccagcaaatgtggatcaccaagcaggagtacgacgaggccggcccttccattgtcccccgcaaatggttttagacaccctccacctccagcacgcgacttttcaggacgacgaattttttcaatgggggggggggtgagctccaacccccccgcagtccctttttttgtaacaacttccgttgctgccatngtaaactgacccagtgtttataacggggacaaacattaacttattaccnccttttgttnttttttgaaacaaancccngtggaanaaaatggaaaacttnaaaaagccttaaagtcnttttgttnagctgcga

SEQ ID NO: 495505 - DNA, 258 bp, Homo sapiens
tagcctagaggtaggtaggtaggcagttgagtgcgccgcagccgcatctgtgcccgaagccgcaggcggtgttgtaggcgtcgctatcctgaaccgctgcagcgagagcaccaagacggaagctgagcgtctgcctgtctagaggctggacgcgcacgtccccacgctagacgtctcttgccctttgcctgtccctgtctgactctgcctaaatggtgtacctgacgctctgcaattctgtcaatccattggtccatc

SEQ ID NO: 495506 - DNA, 8494 bp, Homo sapiens
  misc_feature (7307)..(7307): n is a, c, g, or t
  misc_feature (7545)..(7545): n is a, c, g, or t
gccgctgagcctgcgcccagtgccccgagccccgcgccgagccgagtccgcgccaagcagcagccgcccaccccggggcccggccgggggaccagcagcttccccacaggcaacgtgaggagagcctgtgcccagaagcaggatgagaagatggcaaacttcctattacctcggggcaccagcagcttccgcaggttcacacgggagtccctggcagccatcgagaagcgcatggcggagaagcaagcccgcggctcaaccaccttgcaggagagccgagaggggctgcccgaggaggaggctccccggccccagctggacctgcaggcctccaaaaagctgccagatctctatggcaatccaccccaagagctcatcggagagcccctggaggacctggaccccttctatagcacccaaaagactttcatcgtactgaataaaggcaagaccatcttccggttcagtgccaccaacgccttgtatgtcctcagtcccttccaccccagttcggagagcggctgtgaagattctggttcactcgctcttcaacatgctcatcatgtgcaccatcctcaccaactgcgtgttcatggcccagcacgaccctccaccctggaccaagtatgtcgagtacaccttcaccgccatttacacctttgagtctctggtcaagattctggctcgagctttctgcctgcacgcgttcactttccttcgggacccatggaactggctggactttagtgtgattatcatggcatacacaactgaatttgtggacctgggcaatgtctcagccttacgcaccttccgagtcctccgggccctgaaaactatatcagtcatttcagggctgaagaccatcgtgggggccctgatccagtctgtgaagaagctggctgatgtgatggtcctcacagtcttctgcctcagcgtctttgccctcatcggcctgcagctcttcatgggcaacctaaggcacaagtgtgtgcgcaacttcacagcgctcaacggcaccaacggctccgtggaggccgacggcttggtctgggaatccctggacctttacctcagtgatccagaaaattacctgctcaagaacggcacctctgatgtgttactgtgtgggaacagctctgacgctgggacatgtccggagggctaccggtgcctaaaggcaggcgagaaccccgaccacggctacaccagcttcgattcctttgcctgggcctttcttgcactcttccgcctgatgacgcaggactgctgggagcgcctctatcagcagaccctcaggtccgcagggaagatctacatgatcttcttcatgcttgtcatcttcctggggtccttctacctggtgaacctgatcctggccgtggtcgcaatggcctatgaggagcaaaaccaagccaccatcgctgagaccgaggagaaggaaaagcgcttccaggaggccatggaaatgctcaagaaagaacacgaggccctcaccatcaggggtgtggataccgtgtcccgtagctccttggagatgtcccctttggccccagtaaacagccatgagagaagaagcaagaggagaaaacggatgtcttcaggaactgaggagtgtggggaggacaggctccccaagtctgactcagaagatggtcccagagcaatgaatcatctcagcctcacccgtggcctcagcaggacttctatgaagccacgttccagccgcgggagcattttcacctttcgcaggcgagacctgggttctgaagcagattttgcagatgatgaaaacagcacagcgcgggagagcgagagccaccacacatcactgctggtgccctggcccctgcgccggaccagtgcccagggacagcccagtcccggaacctcggctcctggccacgccctccatggcaaaaagaacagcactgtggactgcaatggggtggtctcattactgggggcaggcgacccagaggccacatccccaggaagccacctcctccgccctgtgatgctagagcacccgccagacacgaccacgccatcggaggagccaggcggcccccagatgctgacctcccaggctccgtgtgtagatggcttcgaggagccaggagcacggcagcgggccctcagcgcagtcagcgtcctcacaagcgcactggaagagttagaggagtctcgccacaagtgtccaccatgctggaaccgtctcgcccagcgctacctgatctgggagtgctgcccgctgtggatgtccatcaagcagggagtgaagttggtggtcatggacccgtttactgacctcaccatcactatgtgcatcgtactcaacacactcttcatggcgctggagcactacaacatgacaagtgaattcgaggagatgctgcaggtcggaaacctggtcttcacagggattttcacagcagagatgaccttcaagatcattgccctcgacccctactactacttccaacagggctggaacatcttcgacagcatcatcgtcatccttagcctcatggagctgggcctgtcccgcatgagcaacttgtcggtgctgcgctccttccgcctgctgcgggtcttcaagctggccaaatcatggcccaccctgaacacactcatcaagatcatcgggaactcagtgggggcactggggaacctgacactggtgctagccatcatcgtgttcatctttgctgtggtgggcatgcagctctttggcaagaactactcggagctgagggacagcgactcaggcctgctgcctcgctggcacatgatggacttctttcatgccttcctaatcatcttccgcatcctctgtggagagtggatcgagaccatgtgggactgcatggaggtgtcggggcagtcattatgcctgctggtcttcttgcttgttatggtcattggcaaccttgtggtcctgaatctcttcctggccttgctgctcagctccttcagtgcagacaacctcacagcccctgatgaggacagagagatgaacaacctccagctggccctggcccgcatccagaggggcctgcgctttgtcaagcggaccacctgggatttctgctgtggtctcctgcggcaccggcctcagaagcccgcagcccttgccgcccagggccagctgcccagctgcattgccaccccctactccccgccacccccagagacggagaaggtgcctcccacccgcaaggaaacacagtttgaggaaggcgagcaaccaggccagggcacccccggggatccagagcccgtgtgtgtgcccatcgctgtggccgagtcagacacagatgaccaagaagaggatgaggagaacagcctgggcacggaggaggagtccagcaagcagcaggaatcccagcctgtgtccggctggcccagaggccctccggattccaggacctggagccaggtgtcagcgactgcctcctctgaggccgaggccagtgcatctcaggccgactggcggcagcagtggaaagcggaaccccaggccccagggtgcggtgagaccccagaggacagttgctccgagggcagcacagcagacatgaccaacaccgctgagctcctggagcagatccctgacctcggccaggatgtcaaggacccagaggactgcttcactgaaggctgtgtccggcgctgtccctgctgtgcggtggacaccacacaggccccagggaaggtctggtggcggttgcgcaagacctgctaccacatcgtggagcacagctggttcgagacattcatcatcttcatgatcctactcagcagtggagcgctggccttcgaggacatctacctagaggagcggaagaccatcaaggttctgcttgagtatgccgacaagatgttcacatatgtcttcgtgctggagatgctgctcaagtgggtggcctacggcttcaagaagtacttcaccaatgcctggtgctggctcgacttcctcatcgtagacgtctctctggtcagcctggtggccaacaccctgggctttgccgagatgggccccatcaagtcactgcggacgctgcgtgcactccgtcctctgagagctctgtcacgatttgagggcatgagggtggtggtcaatgccctggtgggcgccatcccgtccatcatgaacgtcctcctcgtctgcctcatcttctggctcatcttcagcatcatgggcgtgaacctctttgcggggaagtttgggaggtgcatcaaccagacagagggagacttgcctttgaactacaccatcgtgaacaacaagagccagtgtgagtccttgaacttgaccggagaattgtactggaccaaggtgaaagtcaactttgacaacgtgggggccgggtacctggcccttctgcaggtggcaacatttaaaggctggatggacattatgtatgcagctgtggactccagggggtatgaagagcagcctcagtgggaatacaacctctacatgtacatctattttgtcattttcatcatctttgggtctttcttcaccctgaacctctttattggtgtcatcattgacaacttcaaccaacagaagaaaaagttagggggccaggacatcttcatgacagaggagcagaagaagtactacaatgccatgaagaagctgggctccaagaagccccagaagcccatcccacggcccctgaacaagtaccagggcttcatattcgacattgtgaccaagcaggcctttgacgtcaccatcatgtttctgatctgcttgaatatggtgaccatgatggtggagacagatgaccaaagtcctgagaaaatcaacatcttggccaagatcaacctgctctttgtggccatcttcacaggcgagtgtattgtcaagctggctgccctgcgccactactacttcaccaacagctggaatatcttcgacttcgtggttgtcatcctctccatcgtgggcactgtgctctcggacatcatccagaagtacttcttctccccgacgctcttccgagtcatccgcctggcccgaataggccgcatcctcagactgatccgaggggccaaggggatccgcacgctgctctttgccctcatgatgtccctgcctgccctcttcaacatcgggctgctgctcttcctcgtcatgttcatctactccatctttggcatggccaacttcgcttatgtcaagtgggaggctggcatcgacgacatgttcaacttccagaccttcgccaacagcatgctgtgcctcttccagatcaccacgtcggccggctgggatggcctcctcagccccatcctcaacactgggccgccctactgcgaccccactctgcccaacagcaatggctctcggggggactgcgggagcccagccgtgggcatcctcttcttcaccacctacatcatcatctccttcctcatcgtggtcaacatgtacattgccatcatcctggagaacttcagcgtggccacggaggagagcaccgagcccctgagtgaggacgacttcgatatgttctatgagatctgggagaaatttgacccagaggccactcagtttattgagtattcggtcctgtctgactttgccgacgccctgtctgagccactccgtatcgccaagcccaaccagataagcctcatcaacatggacctgcccatggtgagtggggaccgcatccattgcatggacattctctttgccttcaccaaaagggtcctgggggagtctggggagatggacgccctgaagatccagatggaggagaagttcatggcagccaacccatccaagatctcctacgagcccatcaccaccacactccggcgcaagcacgaagaggtgtcggccatggttatccagagagccttccgcaggcacctgctgcaacgctctttgaagcatgcctccttcctcttccgtcagcaggcgggcagcggcctctccgaagaggatgcccctgagcgagagggcctcatcgcctacgtgatgagtgagaacttctcccgaccccttggcccaccctccagctcctccatctcctccacttccttcccaccctcctatgacagtgtcactagagccaccagcgataacctccaggtgcgggggtctgactacagccacagtgaagatctcgccgacttccccccttctccggacagggaccgtgagtccatcgtgtgagcctcggcctggctggccaggacacactgaaaagcagcctttttcaccatggcaaacctaaatgcagtcagtcacaaaccagcctggggccttcctggctttgggagtaagaaatgggcctcggccccgcggatcaaccaggcagagttctgtggcgccgcgtggacagccggagcagttggcctgtgcttggaggcctcagatagacctgtgacctggtctggtcaggcaatgcccctgcggctctggaaagcaacttcatcccagctgctgaggcgaaatataaaactgagactgtatatgttgtgaatgggctttcataaatttattatatttgatatttttttacttgagcaaagaactaaggatttttccatggacatgggcagcaattcacgctgtctcttcttaaccctgaacaagagtgtctatggagcagccggaagtctgttctcaaagcagaagtggaatccagtgtggctcccacaggtcttcactgcccaggggtcgaatggggtccccctcccacttgacctgagatgctgggagggctgaacccccactcacacaagcacacacacacagtcctcacacacggaggccagacacaggccgtgggacccaggctcccagcctaagggagacaggcctttccctgccggccccccaaggatggggttcttgtccacggggctcactctggccccctattgtctcccaaggtcccattttcccccttgtgttttcacgcaggtcatattgtcagtcctacaaaaataaaaggcttccagaggagagtggcctggggtcccagggctgggccctaggcactgatagttgccttttcttcccctcctgtaagagtattaacaaaaccaaaggacacaagggtgcaagccccattcacggcctggcatgcagcttgtccttgctcctggaacctggcaggccctgccagccagccaatggaagagaggggctgagccatgggggtttggggctaagaagttcaccagccctgagccatggggcccctcagcctgcctgaagagaggaaactggcgatctcccagggctctctggaccatacgcggaggagttttcntgtgtggtctccagctcctctccagacacagagacatgggagtggggagcggacgttggccctggccctgtgcagggaaagggatggtcaggcccagttctcgtgccccttagaggggaatgaaccatggcacctttgagagagggggcactgtggtcaggcccagcctctctggctcagtcccgggatcctgatggcacccacacagaggacctctttggggcaagatccaggtggntcccataggtcttgtgaaaaggctttttcagggaaaaatattttactagtccaatcacccccaggacctcttcagctgctgacaatcctatttagcatatgcaaatcttttaacatagagaactgtcaccctgaggtaacagggtcaactggcgaagagcaggccagggggcttggctgccccattccagctctcccatggagcccctccaccgggcgcatgcctcccaggccacctcagtctcacctgccggctctgggctggctgctcctaacctacctcgccgagctgtcggagggctggacatttgtggcagtgctgaagggggcattgccggcgagtaaagtattatgtttcttcttgtcaccccagttcccttggtggcaaccccagacccaacccatgcccctgacagatctagttctcttctcctgtgttccctttgagtccagtgtgggacacggtttaactgtcccagcgacatttctccaagtggaaatcctatttttgtagatctccatgctttgctctcaaggcttggagaggtatgtgcccctcctgggtgctcaccgcctgctacacaggcaggaatgcggttgggaggcaggtcgggctgccagcccagctggccggaaggagactgtggtttttgtgtgtgtggacagcccgggagctttgagacaggtgcctggggctggctgcagacggtgtggttgggggtgggaggtgagctagacccaacccttagcttttagcctggctgtcacctttttaatttccagaactgcacaatgaccagcaggaggggagaagagagtaggaaaaaggagggaaggacagacatcaagtgccagatgttgtctgaactaatcgagcacttctcaccaaacttcatgtataaataaaatacatatttttaaaacaaaccaataaatggcttacatgaaat

SEQ ID NO: 495507 - DNA, 1382 bp, Homo sapiens
  misc_feature (889)..(889): n is a, c, g, or t
gccgctgagcctgcgcccagtgccccgagccccgcgccgagccgagtccgcgccaagcagcagccgcccaccccggggcccggccgggggaccagcagcttccccacaggcaacgtgaggagagcctgtgcccagaagcaggatgagaagatggcaaacttcctattacctcggggcaccagcagcttccgcaggttcacacgggagtccctggcagccatcgagaagcgcatggcggagaagcaagcccgcggctcaaccaccttgcaggagagccgagaggggctgcccgaggaggaggctccccggccccagctggacctgcaggcctccaaaaagctgccagatctctatggcaatccaccccaagagctcatcggagagcccctggaggacctggaccccttctatagcacccaaaagactttcatcgtactgaataaaggcaagaccatcttccggttcagtgccaccaacgccttgtatgtcctcagtcccttccaccccagttcggagagcggctgtgaagattctggttcactcatatcctttgcagttaatacctgctgagtaccccctgggggcccacgctggggatgtgcacgtgctgcccccgacccacctccattctagtttaggagtgagagtagcgctgattccctgctggtcctaagacaaatgcatggtcatgacctgggagctggttggaaatgaagaacctctgaccctcctccagacctgccaagtcagcacctgcattttcatttgatccccaggggattcttgggcacatgaaagtttgagaaaccctcttctgattcttcagaacattctagaagctaagctactgaggatcccagaagaaatgacgtctgtcgggctctgatantggtccaaatattccgtgccccgacagacgtcccttgggtccggcgtactccagagcatagcaggaacctgctaggaggtcatcagaagctggtccaggaacaacatttcccaataaaggaggcgtaggtcatcgcaaatgcacgatgcagacacagcccggggcagcagaacggggcggaaaacaagttcggacaggccatggtcaatacgagtctgagccaagtgcttagcagaaagtgggagattggcgggtcccaaatagaagggagttgagtgggaaaccgtcacttcattgctcgaacaaaaggagcaacggactaacgaaggattagtcgacagatcacgggcgaggtgacaacacggtccagtagatgaacacagctagctatctcacaacacatcgacttgaacagactactatcaagtatatacaactacacgtacacatgtcgtctcacagctgttcttacctataccataccaccaacgag

SEQ ID NO: 495508 - DNA, 152 bp, Homo sapiens
  misc_feature (114)..(114): n is a, c, g, or t
  misc_feature (130)..(130): n is a, c, g, or t
ataatctgctctgtacctcccagggtctttgtgagtccattgctgaacttgatacactgaatgttgactcatacaaatgacatgcacaaccagtggaccatgcatgggtgatcnctctagatgtctgacnctgcatgtgcatagcaatgctt

SEQ ID NO: 495509 - DNA, 218 bp, Homo sapiens
tgggaggctgcagtgcactccagcctgggcgacagagtgacgacatctgtctccacaacaacaacaaaaaattgctaaacatattgttacctatcttacatactctacattatattagcatgtaatctatttactcattcacacatgactcctattaagagtcaatgtataagtgactcatctagatttacatgtctgatgagtaaatctaaggttat

SEQ ID NO: 495510 - DNA, 419 bp, Homo sapiens
tgattatgcgggggctggtgaaaaggagaatcttgaacgacattgtgtaaaccaggtggagaaatttatggaactatggaataaaaacgatgagttcagaaaggaataccttaggtgcaacatgaagagtacgttgaggagattcagaacactagatgggcgagcccttggccctgatgaagagccaccatacgtaggaaatttttctgataatagagtaaatgcttcagccaaggtcaattcagttgatacaacttcagccttggaaagtgattttcctttaatagcaaaaaaggcagaagaatcatcaaagaaagttatagagctgaagaataagactgcccttgtccaaaaccaaaagcagagtgaaattacatctaaaagtagcttagcagaaccttctggcaggattgagacca

SEQ ID NO: 495511 - DNA, 215 bp, Homo sapiens
  misc_feature (22)..(22): n is a, c, g, or t
  misc_feature (152)..(152): n is a, c, g, or t
cctagaggaccccggcagaatncactcaaagtcctgcactaatctgcttttttgtccctatagtcctctttatgagtatgctgtaaatttggactcacacagtatgtaccctttaagtctggcttttcttaatgtctttgagattcattccntattgttgtatttatccagttgattctattttttatttgctggtgtagttgtatagaatattt

SEQ ID NO: 495512 - DNA, 301 bp, Homo sapiens
tcaaaaaaaaaaaaaaaaccttgctggttttacggctcagggggcatcacggaacctgccaacatgtggtatctcccccggacacccagctttaaaatttctttcttttgtactctttccctttatttctcagaccggctgacacttagggaaaacagaaaagaacctacatgaaatatcgggggtgaattttgcccaatatttggctgaatttcccccatacccagaaggtggagcttgcagtgacccgagaccacgtcactgcactccagcctgggtgacagagcgagactccgtctca

SEQ ID NO: 495513 - DNA, 779 bp, Homo sapiens
  misc_feature (779)..(779): n is a, c, g, or t
tgctgccgtggttcacctcgtttcctgctcgatgccggcatagggaaatctacctgcacataatggtgcccaggcctgagtcggaatcacctgtcaccccggacctgcacacacatctcaagtaccggcagtcaatgttgcgtgtggctaaccatgggcagtcaggctgcagctcattagctattctgatgtcaaataatcatgtgcgggcgacctgagcgggactgacggagacaatgcgtacgcatgctaggtgtgccgggactggtgactgaagccatggatgtgggaggcgctgactgcttgctatgaggactcctgaagtcggaccagacccctggtcccccgactcctccactacggcaatcaattgaaacgggagaaagcccacgagactgcatattacgtgttagtccgcaatcggggagctcaatgagtgcaagctcacactgaatctctcttgcaacggtggcacatagtagtccttgtcgcgctctttgttggtcgccaacgtgtccatggcaccagtccagggattgcaacccctcaaacacgttggctgcaatacgctcgggttattctgacacagggggagttgggggatgcatacttgatccatcgacttcctgggggatgcgcattgattatgcacccgttccgatgagtcagagcagccgcctaaagtgtgactgactgaaacacttgatcgaaccagctcgtattaactactcagaggccatacagctcgggtgggtcgatcctgtgggcttggcaacaan

SEQ ID NO: 495514 - DNA, 261 bp, Homo sapiens
  misc_feature (204)..(204): n is a, c, g, or t
  misc_feature (210)..(210): n is a, c, g, or t
  misc_feature (245)..(246): n is a, c, g, or t
cccgatagcccgacaggaattgggtaagagattgtatggagagccgggcttggtggctcacgcctgtaatcccagcactctgggaggccgaggcgggcggatcacaaggtcaggagttcgagaccagcctggtcaacatggcaaaatcccatctctaccaaaaatacaacaaattagccaggcatgtgtggcaggcgcctgcanatcccnagccactcaggaggctagaggcaggggaaatcacnnccgaacccggcaggc

SEQ ID NO: 495515 - DNA, 347 bp, Homo sapiens
actcgagcagcgcagtaagcacacagagtccatgctgccagtgacagtcatcatttcagcaatcatcaggatttccattttctcaccttgcctgtctcccttctagagatgtgtctgtgaagagtgtttcccgaggagatttggtgtgggagtctgtggacggagtgcagatcagccctcaacatagataggcaccatccagatggctgggggcctagacagaacaaaaaaaaggcagaggaaatgggatttcctctgtctttcttctgtagctggaacattgtcctgcctttggacattagaactccaggctgtctggcctttgaactcaaagacctataccagtg

SEQ ID NO: 495516 - DNA, 263 bp, Homo sapiens
  misc_feature (15)..(15): n is a, c, g, or t
catatattacccctntcatgtcgtaaagaagacattttctcttagagattttcatttatagtgtatctaaaaaaaaaaaatcttgtgtaaacttgcatccatctttttcttgggtgaggacacccaggaatgaccctttggtgtctataatgttgctgtacacaggctatacttgataggcctagtacaatcttgggaacagggttactgtatactgaaggtctgacagtagctcttagactcgcctatcttaggcaatcaag

SEQ ID NO: 495517 - DNA, 1627 bp, Homo sapiens
  misc_feature (685)..(686): n is a, c, g, or t
  misc_feature (758)..(758): n is a, c, g, or t
  misc_feature (770)..(770): n is a, c, g, or t
ggtcaacgactgcagcctcatccacaataatgtctgcatgggcgacggtgttcgtggaaccgagactggcagatggtggaagcttggtgggcctggactacatgtattcggtccagggctaacggtgggggacctccccgtaaggggatccccgagacttgagcagttatgaacccccggtagttggatgactaagcagtggactagagtggtcagagagaagtgggtcagtcgagatcgatgtggcgcttggtgcattggcatcatgtggggaagtctgacaatgggccacctgacgctcgggcagcatggccctacgcataccctgggaagatccccaaagacgtggtggtgcacccattacgtgtgagctggtgggagcaaagcgcccaaggtgcgtgcccaacccagcccgcttcctgcagaactgtcgggcacctggtggcttcatgatgcaacgctttgtagaaaccaacctcttcctggaggagattcagatcaaagagccagccgagaagcaaaaattcttccaggagctgagcaagagcctggacgcattccctgaggatatctgtcggcacaaggtgctgccccagtggtgagcgcttcgagttcggcaatgctggggccgttgtcctcacgcccctcttcaggtgggcaagttcctgagcgctgaggagtatcnngcagaagatcatccctgtggtggtcaagatgttctcatccactgacgggccatgcgcatccgctcctgcagnagatggagcagntcatccagtaccttgacgagccaacagtcaagcacccagatcttcccgcaagttcgtacatggcttcctggacaccaaccctgccatccgggagcagacggtcaagtccatgctgctcctggccccgaaagctgaacgaggccaacctcagtgtggagctgatgaagcactttgcacggcttacaggccaaggatgaactaggggcccatccgctgcatagcaccacagtctgcctgggcaagaatcggctcctacctcatgggctagcagccagacacagggtccttaccgtctgccttcagccgagccactagggacccgtttgcaccgtcccgggttgcgggtgtcctgggctttgctgccaccagaagctctactcaaatgaacgactgtgcccagaagatcctggctgtgctctgcggggctcactgtaggatcctgagaaatccggtgcgagagcaggccttcaagggccattctggagcttccgtgttccagcttggagtctgtgtcggaggacccgaaccagctggaggaagtggagaaggactgtccatgcagcatccagccctggaatggggaggaagccgcagctagctgggcaggcctgggccgtgaccgggggtctcctcacgtcaccttccaaggctggatccggatcggcagccaaaccattgtcccgcagagaaaagccaagattccccaaaagaaccagggcgtgaagagttcctgcgccaggccggaacccggagtcacggacacccctaacaacctcaagggcgcggggacgacagacgaggagagcacagacacagcacgaggcgagcacggacgcaagacaagggggagagcgaca

SEQ ID NO: 495518 - DNA, 273 bp, Homo sapiens
acagcatctactccctcatcttcaggatcccgatggcgcttctgacccgctgcggggtcaccaagctcttcttcatcttcctcgtcatccacctctccatcgatataaccttctacatcctcctgctgtccactcgcgtcctcctcttcaccttcctcctcctcatcctcgtcctcctcgtcttccactacctgagcatctacatcatactcctactgatcctcatcctccttctcatcatccaggccctccacgtagccctcagcatccgag

SEQ ID NO: 495519 - DNA, 2043 bp, Homo sapiens
agggcgggagcggcgagcggattccatgagattgccctgatgcatgccccacctgcctgcctgcctggcctagttaccatcacacccctgggatggaagccgcagctgcctgcagccgtgccccatgtcaccatcacctgcaaccatgagcatgcgatggcctgatgacccagcatgccgcaccgcagaacccacacaagcacgacaccaagccacaatacagaagccagacgaacaaaccaaacaccagagacacaaaaaagagaaagaaacagacacacggagggcgaagagacaaccggagcggaatcaaaaaaacagagagaggaaacatgcaccaggccgacgacccaacacaaacgcaaacaaacagccaccaacaaaacgagacacagagagaacagacaagcgacaaacatagagccaaacaagcgacaccagcgaaaccacagaaaacaacgccaacacaacaacacaaccaaagcgacaacaaacacccactcacacacaacaacaaaaaacacaaaaatcaaacaaaaccaatcaacacaaaaacaacaaaaaatgacacccccactcacacacccaaccacacacactcaacacacacaaaagacaaaaccaaacacaacacatataccacaaaaaaaaacaacaacacacaataaacactcacaaacaccacacaccaatgccaacaccaccgccacaaagacgaaaaagcatccagaccaaacaacaaaagaaacaagcaaagcaaaagagactgcactcacaaggaagaaagcgaaacgaaacgaaacacagaacacaccaacaacagagaaccgtagacacaagacaaaacagagcattagcaaagcgacaaaaacgaagacaacaaacaagaggagcaaaacgcagaaacagacaccacacacagaacacgaggcacaaacactaaaacgacaagctaagacagaccgcaaccaagacaagcacaagaatataagggaggaacaacacagcagaaacccagcacgcacgaaaccaagacagcccacaaatgacaagcagggagaagagcgacacagcacagacaacgcacagcgccgcaaaacagaagaccgccacaaaggcaagcacagaggcagaaagaacgccgaacacaagagaacgacacaaagacgaggcagaagagcagatcacagaagacacaaacacagccagagcaagccaacagacaaagccgccgaagacaagagcacagcggacagagagcggcacaccaagacaagacgcaaagagacgaacagcgcggacagcgaagctgacagaggcgaacaaagccagacaggagaagacacaagagaagccacaagaaaagaagagcgaaaaaccacagacaacacaaatacaacacagacaaagactaaatcgacaccagaaagaaacgacacccgagcagagagcgaacagagcagaaagacgagccgaagagaaacaagagacaagacaaagagcacagcaaaagtagaacgagcagagcagagagagagaccgggaatagacgcacaagaggagaggaacccggaagacagaagacagagacgcacgagagagcagcagacgcgccactacgagaacgcaccgaacacacgatcgaacagacagccagataagaccaacaacaatcgagcattgacacgaacaacgaggacaacgacacgaacgagatcaggaaacgaacgaagcgaccgaagagcagcgcgggagcagaaagaagtagaaaacaacaaagcaacgaaaacagcatacacaagaccagagacagaaagagagagcaacaaggcgagagaaccgacagagaagaagaggaagagagacaacagacacgcacagaaaacacaagaagaacgagagcgaacgaatagagacaacaaagagcaatactaagtagcaacacactcagcatcgcgacgcacagacagcaggagcgacaagatcagcaagaaagagagacagaagaacaaagagacatagagaaacatacagaacgttcgg

SEQ ID NO: 495520 - DNA, 673 bp, Homo sapiens
cgaggaggacgatgccgaggggcaagaccaggacaagaaatctcccaagcctaagaagaagaagcacaggaaggagaaggaggagcggaccaaaggcaagaagaagtccaagaagcagcctccaggcagcgaggatggcatgctgtgtggtgagcctgtgtgcatgaagtggctgctgccagatgtgatggatgcatgctccctgccgtgatgtccatgctaactcccatcctacgcttgaaagattccttatgtataacattgaccttgtgagcatcctgtggggcatgtcttgcagtgagtgacatgccacgtgtcacttgtgtgccatctgttgcttgtgagaacagtgatgcatgcatgcatctctacaagggcatgtgagctcagctgtgctaggactacactcaagtgccatgtgatggccccggcctgcaggggctacctcctgtccacgattggcgtcccctgtgcctttccagcttgccccaggcgtctccaactgaagcccagtattgtgttcaccatccagagcatcgtcatggcgcagaagctcaaggggaccctgtccttcattgccaagaatgacgagggtgcgaaccacgagaagctggacttcagggctgcacttcagctgcagctcctacttgatcaccaatccctgctacagtga

SEQ ID NO: 495521 - DNA, 244 bp, Homo sapiens
ggtaacaaaaataagcaatggggaaaggactccctgttcaataaatggtgttggggtagctggttagtcatatacagaagactgaaactgggccccttccatacagcatatacaaaaatcaactcaagatgaattaaagactcaaatgtaaaacctaaaacctcaaagataacctaggagataccattctgatttgacttttgtgcatttttggctggagtatctcgtatagatttcttcactg

SEQ ID NO: 495522 - DNA, 992 bp, Homo sapiens
ttcggatactgtgagggctagaatccggtggcattgatatcatgaatatgggatgtgcatgctgcattactttcatgggatggagaccggttgattgactaggtcgtaggcattacagaactcgtggatacaaacaggatcgttggatacggcgattgagatcagtcaccataggaacccgtagagaatagtagactattggtctcaaccatacctcacatgctaccaatatcaattcagtaactgactgactaggaatatggaagtgtacatcctacacaacataggtgataggctattggaacttgtactatgaattacaatacaccctgatggcatcttgtccccagaaatgactcatatgaaagtgcagactatgattggctccatgctgtgcatatgctagatatcactgcatgtacttagaggatggacctagaatgtggcattcacatcctagactagcggagtattggaaagaagaagaaggaattcatgcctaattgttggactccctcgcactgggagagccctcttgcaccgaacctctatcaaagagtcgagtccccgaatgtgagcacgcgaggtcatttcccgccacgtattcatactgatggctagagagtcaaatgctatgggcgcccgttgatccatgagcatcttttatcataggccttgaagctggttgggtccgtgtcacgtagaaatctcaggccaggtgtcatgcgtagttcgcatcactcgagatgaaggtccctctagggtctccgagggaagaaccgtagaccgtagccacgaagttgtctaaccctcgtgcaatgacgacgtggaacaccgatgtgctcattgaaggtgttgccgtcttgtgtgactgcatcgaggctatctctagctcttgagtaaaagaacctattttggaaggttgctcgggtgtcccaataataggttccctcctgagcaaggtgggattgtgtgcccattcgtaggggccg

SEQ ID NO: 495523 - DNA, 636 bp, Homo sapiens
  misc_feature (514)..(514): n is a, c, g, or t
tttatttatttatttatttatttttttgagacagagtctcgctctgtcgcccaggctggagtgcagtggcgcgatctcggctcactgcaaggcttggccccctgggttcacgccattctcctgcctcagcctcccgagtagctgggactacaggcgcccgccacatacgcccggccaatttgttgtatatttagtagagatggggtttcaccgtgttagccacggtggtcccgatttcctgacctcgtgatctgcccgccttcacctcccaaagtgctgggattacaggcgtgagccagcatgcccggcgagatctgatggtttaaaaaaagcaagaggtcccctgcacaagctctctctttgcctgcgtgccattcatgcaagatgtgactgtgctccttttgccttctgccatgatggtgaggcctccccagccacgtggaactaaattattccttgtgcaggtggtgcaaaggatcagcacgggagtttgacctgctccgtttccgacctnggtcggttcacccctccttaggcaagcgtggcggttcccccgcttccaggggagggtcaccctctgtgatgctgaatttagcagggacacctgatgggcacagtgcacttgaagcccaagag

SEQ ID NO: 495524 - DNA, 502 bp, Homo sapiens
cggatcctatacattctggagcgatcatctagttactcgaccgtggggtgctcatgacttggaatcggcctgcttatagaatcgtctgggctgggagcccactgtccgaggtcaaccttcccagaatcctggattccccctcacaccacctctgtagtgtcacccccttcccagccctgttttcgataaatgttccctgcaaccagtccattctcttaatcgccacacttcacagaatcttccatccccctcccaccttctaggcgaatagtccccaaagctgtgttcctccaaggggtccgaggaatcactcactcctggaggctggcaaggagacagtctgaggccaggaacacatgaagggatgtccccgccccagcactatcagggcctccccaggcttccagagttgaaagccaggagaaaatcggcaaagaccacccttccctaaagccaagcacccaatgatgctaaaaaacaaaaacaaaaaaaccgacaaatc

SEQ ID NO: 495525 - DNA, 735 bp, Homo sapiens
  misc_feature (729)..(733): n is a, c, g, or t
ctagagaccacagccaaagtcctcaagcagcgggtcgatagcctcaccgccaagcttcagggtgccgaagcgccggacaccgtcagggacccagctgtgggcctgctgcgctcgtgcccccacagcctacctgccgcccccacgctcgccacccccacgcttgccaccccagcctgccctggagccttggggcccaactggggcagaggggcacctggggagtgggtgagcatgcagccccagccccttctgcccccgacctacttcctggagggcgagacactgtcgtggggccccagctgggagcaacagcagagtgtgagcccgagggcccactgcgagagcaagccccgaggttttccagaggagggacacgtggacgtgaaaccagacaaaaggctgcagagaggcgtggcccccttccaggccctcagcccctctgcggggagctcatatgcgggcccagccacgctgcaccctatctggggctccctgggactggaggagacgccgtcggtcggaggggcagattctgtggcgccctgcaccccccggagctgcggtaagggcgaccctgcggacaggccctgggctggctggtcgggtggccggggcatccaccgagaacaccttccactgcctagcactcgagcttggccctacggggtagagaaatccttttccacgtggagagcatccacgcctcgttattaaaggttttagaggctnnnnnga

SEQ ID NO: 495526 - DNA, 204 bp, Homo sapiens
ggtggtgtggttgtgctgggtgatgatgatggagctgacagtagaggtggtggtgacggtggttgtgttggtgatgatgatgatggagatgacagtggtagaggtggtggtggtggtaaaggtggttgtgttggtgatggtgatgatagtgaaggcggtgggagtgggagtggctgttagggtggttgtatccgcaatcttctt

SEQ ID NO: 495527 - DNA, 367 bp, Homo sapiens
gcacatcagaggacccatgcgaggtttgtctcgcacctatcttccattggaacatgattgtggactcacctcatccacttatggcagcgagtgtgtcgttgtgtgtagtgcagtgcagggaactttcctgaccttatttaaacctgggccgaggattcgtggaatctgcttgatcagagactctgagtgcaaaaacgcatcatacttcttggccagcttcttgacagttatttattcttgttgagttagattcagcgcctcgatgtacatgtgtgggatatccacggtcttagcttcaatcacagtgctgctgttcccccaggaaacaacacagagaacttagtgcggggagtggacttaagcctga

SEQ ID NO: 495528 - DNA, 481 bp, Homo sapiens
  misc_feature (475)..(479): n is a, c, g, or t
cgaggtgtgtctcaggctcctctcctgctgtgatggcttgggtcccccgtcccgtgctcccggctgaccagggagtgaagccaggtgccctcttctccaaggttttccagaggagggacacgtggacgtgaaaccagacaaaaggctgcagagaggcgtggcccccttccaggccctcagcccctctgcggggagctcatatgcgggcccagccacgctgcaccctatctggggctccctgggactggaggagacgccgtcggtcggaggggcagattctgtggcgccctgcaccccccggagctgcggtaagggcgaccctgcggacaggccctgggctggctggtcgggtggccggggcatccaccgagaacaccttccactgcctagcactcgagcttggccctacggggtagagaaatccttttccacgtggagagcatccacgcctcgttattaaaggttttagaggctnnnnnga

SEQ ID NO: 495529 - DNA, 423 bp, Homo sapiens
tgcatgcacaggagatgctgcttctccttacagaattcacaacaccccatcccagcctgaagcccatcagagcttcctgtcaggcggatggtccagctccgatcttgaacacctttccagatttcccattgtataatggatggtcccactagttgtcaagttccttccacctagccaaaacaagctccaaactccatgcataccatggctcacaatgcccctgtccaatctaggccctgcatacctctccacactcatgggcagcctttttcccttcctctgtctgcatcccaatggcccaattgtcaaggccaataccactaggggtttaggcacctactgcctcctctatcaagggacattctctcctctccccctgaaacttcacagagcgtagttccttcaggttccagctcagatact

SEQ ID NO: 495530 - DNA, 484 bp, Homo sapiens
attcggacccccatggtgttggtaccgggaatcgcggccgcgtcgacaggaaatgcaggttgaacggaattctctggggctttggggaatttatgcgtgggtgaaccaagaaataccaattaataactacgtcagttgttagtgttggttaagttgttgcttggaaatgagaagtcgcttagaaactttccgaagtgcttaaactttagtgcacacaccgacacactaacaagcaaaacattgttttgctttgctacaacggtggggaatacctaacaaatgtgcactgaaaacaggtgacacagatcaccagtccccgaaaaccgccgggaagggtgtgtgatgccatctccccgcaggggagatgtctttaccagcttcctcctggtggccaagacagcctgacccagggtcgttcgtctggggtgtggtgttatcactaatcagcccttgaaaaccgctccgacgtcatacccacaatcac

SEQ ID NO: 495531 - DNA, 202 bp, Homo sapiens
gtcgtctctagagtatcccgcgacagcacgcgctaacaacatggtcatccgggacgacaaccagaccaatccgcctgcaggaggctctgaacctcttcaatgagcatctggatacaacagagcgggtgcgcaccagtctctgctgatccttgttcctcaacacagcaagactctgctcgactgagcaaagtcccttgtctgg

SEQ ID NO: 495532 - DNA, 651 bp, Homo sapiens
gtgcggggcatgcttcgagcacggcgcgttgagccgctgggtgagcaacggttgtgggttttgcagaagtaatagcgcaccaactgggattaggacgctgcgactcgggacagtgggcgtggtcagcaccagcaggggttcggtgtcttccggaatatcctgcaaggtcacatgcgacaccgagagctggctgtcggagttggtcaccgaaacggaagcttcaccatcggcctcgtggacgatcaccacggatgtgtccgggaccatgccgtcagcctgtgcttggttgccgaatatcagcagcagggcaataaggccgaacgcggtgttagagcatgtcatcgtcatgacgggttccagattaggcgaaatgagtgggtcagaggtaacgcaagtccagaacgatggagccgtcgaggggcacttcctgattcagggtcaggtactgcgaaaagttgatggcggtgtccacttgaagctggaccctcaactggctgatgaagtcgggctgacggtcgcccgtcggagcaaatgccatataggatcgtggatagccattgggctcgggcgtccagctttcgccgctgttggagggaggcaggacttgcatggcctgggagtccccactgggttgggtacgacaacgcacgg

SEQ ID NO: 495533 - DNA, 332 bp, Homo sapiens
attccctttgtcaaccagtgttcctcctctaaatcccagaacacagaaaatgattcgagtggctgctttctcagttctcccaaggatggcacttgagtagtcccactctagatgagacgaatgacaactcattacataaaatggacgccttaggacagtagggcttcattctttcctaagactctgttgaaaaaagtaatttcctttctttaaaactgtcttgaagaagtagctgacaaaccaaacacagatatttatttgaaacatgttaaaggccgcaaaacatcccaaatgtccaaacattttaagggatgactaagtgaataaacccc

SEQ ID NO: 495534 - DNA, 120 bp, Homo sapiens
gcccgtagtgtgtgattggtgttgtgtaggtgggtgtgtgtgcttgtggtttggtttgttgtttgtgtgtgttgttgtgtgtgttgtgtgttgtgtgtggttgttgttggtgtgtctttc

SEQ ID NO: 495535 - DNA, 1010 bp, Homo sapiens
gacacagtgcgggcacctcgctgtcaccaacctggcgctgagtgccctgtaacctggcagagtgtgcatgtgggatgccgtgtctgtggctgactgctggccgagatctatgtggcggctgcattgagagtgaagacccagttctcccaacgggccttgcgatttatctgacaacgcttcttcctgagcagtgccccgccaggcctgtcctggcactagcagtggctcagtgcctcctgccatgcagtggctctgcccaccgccgtgggccaccgtttcttcgtgtgcactggggactgtttcctgtgctctatgtaccccatgggagagcctgtatcagacttggccgggaacccagatggactccctctgtgcccagtgtgactacagatattccagggaacgtctcttagtagcgagcactgaactgtgtgacccagtccaaacccagacctgggtcacctgacttggggacaaggagattctcggatgccctcgggtaccgttgcagcgtgctgaacagactgtgctgatgctgcaagtggcgtcctgcctacagcttctcccatcagttccagcatgtgcaccacaccggcgtagacccggtggcaacgtggtgggcctctctgacagctgctggttggatccactgatgcggcgggatgaggaggggggttgaagcggttgtgcccgctgatggggcaccttggcgcgggtgctgcaggagcctgaagacccctgccagagggaaggatctggcactcccttcaagctgcctgggcctgtagcgcctgtgccacgcaagattcttgtccacgcaggcttgccatttcttgtgccgagggccgtgggacctgcaaggatgctgggtcaccacacgcatggactctgttaaaaggcgtgcggtggctgcgtcaccggctttggggtgcccccttgcgatgagacgtcctgccgcaagcggacaagagcaaccatatgacaacgagcaaactcaggaataacccaag

SEQ ID NO: 495536 - DNA, 103 bp, Homo sapiens
gaagagtttgctggttgtatgttaaatatatgtttaaatttttaaagagactgccaaactattttctaaagtagctgtaccattttgcattactaacgacact

SEQ ID NO: 495537 - DNA, 2481 bp, Homo sapiens
  misc_feature (3)..(3): n is a, c, g, or t
  misc_feature (22)..(22): n is a, c, g, or t
gangctagtacgagctgggtgnaatcggacgaggcagagttggtggctggacctcctgcgacttccgagttgcgatgctgtacttctctttgttttgggcggctcggcctctgcagagatgtgggcagctggtcaggatggccattcgggctcagcacagcaacgcagcccagactcagactggggaagcaaacaggggctggacaggccaggagagcctgtcggacagtgatcctgagatgtgggagttgctgcagagggagaaggacaggcagtgtcgtggcctggagctcattgcctcagagaacttctgcagccgagctgcgctggaggccctggggtcctgtctgaacaacaagtactcggagggttatcctggcaagagatactatgggggagcagaggtggtggatgaaattgagctgctgtgccagcgccgggccttggaagcctttgacctggatcctgcacagtggggagtcaatgtccagccctactccgggtccccagccaacctggccgtctacacagcccttctgcaacctcacgaccggatcatggggctggacctgcccgatgggggccatctcacccacggctacatgtctgacgtcaagcggatatcagccacgtccatcttcttcgagtctatgccctataagctcaaccccaaaactggcctcattgactacaaccagctggcactgactgctcgacttttccggccacggctcatcatagctggcaccagcgcctatgctcgcctcattgactacgcccgcatgagagaggtgtgtgatgaagtcaaagcacacctgctggcagacatggcccacatcagtggcctggtggctgccaaggtgattccctcgcctttcaagcacgcggacatcgtcaccaccactactcacaagactcttcgaggggccaggtcagggctcatcttctaccggaaaggggtgaaggctgtggaccccaagactggccgggagatcccttacacatttgaggaccgaatcaactttgccgtgttcccatccctgcaggggggcccccacaatcatgccattgctgcagtagctgtggccctaaagcaggcctgcacccccatgttccgggagtactccctgcaggttctgaagaatgctcgggccatggcagatgccctgctagagcgaggctactcactggtatcaggtggtactgacaaccacctggtgctggtggacctgcggcccaagggcctggatggagctcgggctgagcgggtgctagagcttgtatccatcactgccaacaagaacacctgtcctggagaccgaagtgccatcacaccgggcggcctgcggcttggggccccagccttaacttctcgacagttccgtgaggatgacttccggagagttgtggactttatagatgaaggggtcaacattggcttagaggtgaagagcaagactgccaagctccaggatttcaaatccttcctgcttaaggactcagaaacaagtcagcgtctggccaacctcaggcaacgggtggagcagtttgccagggccttccccatgcctggttttgatgagcattgaaggcacctgggaaatgaggcccacagactcaaagttactctccttccccctacctgggccagtgaaatagaaagcctttctattttttggtgcgggagggaagacctctcacttagggcaagagccaggtatagtctcccttcccagaatttgtaactgagaagatcttttctttttcctttttttggtaacaagacttagaaggagggcccaggcactttctgtttgaacccctgtcatgatcacagtgtcagagacgcgtcctctttcttggggaagttgaggagtgcccttcagagccagtagcaggcaggggtgggtaggcaccctccttcctgtttttatctaataaaatgctaacctgcaaaaaaaaaaaaaaaaaaaaaaaaaaaaaaaaaaaaaaaaaaaaaaaaaaaaaaaaaaaaaaaaaaaaaaaaaaaaaaaaaaaaaaaaaaaaaaaacctcgagtttttttttttttttttgaagcccaatttttttaaaaaattaacaatttcaatccaggaaaataaaaggtttgccttcaataaccaaaggaggagggttccttggaaaaccttttaaaattcaagttaacccaaaaagacctttttaattttggttccacccaccaaaccatttggtaaaacttaaaatttttaagggttaaaatattttaacccaaaaggttaaaataaaccaaatttgcggttactgggcaaaatggctttttgttggcctttcgttgaacaagtcccttaacaaattgtttaaagtttggaggccttgattgggccaggccaggaacctaacccttttggaacttccggtttaaagggtggcctttgccttgcccgaaaaaggatttcacaaccccttttgggggctcccc

SEQ ID NO: 495538 - DNA, 2613 bp, Homo sapiens
  misc_feature (3)..(3): n is a, c, g, or t
  misc_feature (22)..(22): n is a, c, g, or t
  misc_feature (1972)..(1973): n is a, c, g, or t
  misc_feature (1975)..(1975): n is a, c, g, or t
  misc_feature (1978)..(1978): n is a, c, g, or t
  misc_feature (1980)..(1980): n is a, c, g, or t
gangctagtacgagctgggtgnaatcggacgaggcagagttggtggctggacctcctgcgacttccgagttgcgatgctgtacttctctttgttttgggcggctcggcctctgcagagatgtgggcagctggtcaggatggccattcgggctcagcacagcaacgcagcccagactcagactggggaagcaaacaggggctggacaggccaggagagcctgtcggacagtgatcctgagatgtgggagttgctgcagagggagaaggacaggcagtgtcgtggcctggagctcattgcctcagagaacttctgcagccgagctgcgctggaggccctggggtcctgtctgaacaacaagtactcggagggttatcctggcaagagatactatgggggagcagaggtggtggatgaaattgagctgctgtgccagcgccgggccttggaagcctttgacctggatcctgcacagtggggagtcaatgtccagccctactccgggtccccagccaacctggccgtctacacagcccttctgcaacctcacgaccggatcatggggctggacctgcccgatgggggccatctcacccacggctacatgtctgacgtcaagcggatatcagccacgtccatcttcttcgagtctatgccctataagctcaaccccaaaactggcctcattgactacaaccagctggcactgactgctcgacttttccggccacggctcatcatagctggcaccagcgcctatgctcgcctcattgactacgcccgcatgagagaggtgtgtgatgaagtcaaagcacacctgctggcagacatggcccacatcagtggcctggtggctgccaaggtgattccctcgcctttcaagcacgcggacatcgtcaccaccactactcacaagactcttcgaggggccaggtcagggctcatcttctaccggaaaggggtgaaggctgtggaccccaagactggccgggagatcccttacacatttgaggaccgaatcaactttgccgtgttcccatccctgcaggggggcccccacaatcatgccattgctgcagtagctgtggccctaaagcaggcctgcacccccatgttccgggagtactccctgcaggttctgaagaatgctcgggccatggcagatgccctgctagagcgaggctactcactggtatcaggtggtactgacaaccacctggtgctggtggacctgcggcccaagggcctggatggagctcgggctgagcgggtgctagagcttgtatccatcactgccaacaagaacacctgtcctggagaccgaagtgccatcacaccgggcggcctgcggcttggggccccagccttaacttctcgacagttccgtgaggatgacttccggagagttgtggactttatagatgaaggggtcaacattggcttagaggtgaagagcaagactgccaagctccaggatttcaaatccttcctgcttaaggactcagaaacaagtcagcgtctggccaacctcaggcaacgggtggagcagtttgccagggccttccccatgcctggttttgatgagcattgaaggcacctgggaaatgaggcccacagactcaaagttactctccttccccctacctgggccagtgaaatagaaagcctttctattttttggtgcgggagggaagacctctcacttagggcaagagccaggtatagtctcccttcccagaatttgtaactgagaagatcttttctttttcctttttttggtaacaagacttagaaggagggcccaggcactttctgtttgaacccctgtcatgatcacagtgtcagagacgcgtcctctttcttggggaagttgaggagtgcccttcagagccagtagcaggcaggggtgggtaggcaccctccttcctgtttttatctaataaaatgctaacctgcaaaaaaaaaaaaaaaaanntnggngntttttttgttttttttttgaatttcttgctaaggccctttttaaagtggggttttgttaaagcaacgggttagagaatttaacggtttagttgtgttcacccttggggttttaaatttgaaaaatcctcgtggagcaagatcagctaaccagtatgcacaattcagagcgtataaccccgcggggggggggagacataaggggtccaggggacatctttcaattcggggaccaaaattgctccaattagaagaaggacaaccacttggtgcccccgggggtgtccccgagcagggtttccggggcccgggaaacataaacagggccttactacagctaacaaatgcgtctacatggtaagacgcggggggctcagacgacacaagggcccaggtggtgggaggccaaatgtcggaaggaagtgggtcccttgcggggcacaatcagaaaatcttttccccccttgggagaagaagttctgtctggcggccaggtgtggtggcacagccgtgacatgagtcagagaaactgcgcccgggctaaaaattcatggcagcccgagagaggacaacagggccgacacaggcggcaatggactagaaaagagcaagtagagactatcaactcaagaatt

SEQ ID NO: 495539 - DNA, 237 bp, Homo sapiens
gcttctgcattttgcactgggactgccatctggctgccgtcaggttggctcgtaggccgggcagagtgggagagtgccgccctgtccaactgccaagcaccaagttgcaacgggctccttccggtctggggacctcatgttccctgaatcagcttctagccacttgcgtggcaagacacaacacttacctccaggaatgtaccggccagcgggagcccatcgtatcacgctcaatca

SEQ ID NO: 495540 - DNA, 1976 bp, Homo sapiens
  misc_feature (3)..(3): n is a, c, g, or t
  misc_feature (22)..(22): n is a, c, g, or t
gangctagtacgagctgggtgnaatcggacgaggcagagttggtggctggacctcctgcgacttccgagttgcgatgctgtacttctctttgttttgggcggctcggcctctgcagagatgtgggcagctggtcaggatggccattcgggctcagcacagcaacgcagcccagactcagactggggaagcaaacaggggctggacaggccaggagagcctgtcggacagtgatcctgagatgtgggagttgctgcagagggagaaggacaggcagtgtcgtggcctggagctcattgcctcagagaacttctgcagccgagctgcgctggaggccctggggtcctgtctgaacaacaagtactcggagggttatcctggcaagagatactatgggggagcagaggtggtggatgaaattgagctgctgtgccagcgccgggccttggaagcctttgacctggatcctgcacagtggggagtcaatgtccagccctactccgggtccccagccaacctggccgtctacacagcccttctgcaacctcacgaccggatcatggggctggacctgcccgatgggggccatctcacccacggctacatgtctgacgtcaagcggatatcagccacgtccatcttcttcgagtctatgccctataagctcaaccccaaaactggcctcattgactacaaccagctggcactgactgctcgacttttccggccacggctcatcatagctggcaccagcgcctatgctcgcctcattgactacgcccgcatgagagaggtgtgtgatgaagtcaaagcacacctgctggcagacatggcccacatcagtggcctggtggctgccaaggtgattccctcgcctttcaagcacgcggacatcgtcaccaccactactcacaagactcttcgaggggccaggtcagggctcatcttctaccggaaaggggtgaaggctgtggaccccaagactggccgggagatcccttacacatttgaggaccgaatcaactttgccgtgttcccatccctgcaggggggcccccacaatcatgccattgctgcagtagctgtggccctaaagcaggcctgcacccccatgttccgggagtactccctgcaggttctgaagaatgctcgggccatggcagatgccctgctagagcgaggctactcactggtatcaggtggtactgacaaccacctggtgctggtggacctgcggcccaagggcctggatggagctcgggctgagcgggtgctagagcttgtatccatcactgccaacaagaacacctgtcctggagaccgaagtgccatcacaccgggcggcctgcggcttggggccccagccttaacttctcgacagttccgtgaggatgacttccggagagttgtggactttatagatgaaggggtcaacattggcttagaggtgaagagcaagactgccaagctccaggatttcaaatccttcctgcttaaggactcagaaacaagtcagcgtctggccaacctcaggcaacgggtggagcagtttgccagggccttccccatgcctggttttgatgagcattgaaggcacctgggaaatgaggcccacagactcaaagttactctccttccccctacctgggccagtgaaatagaaagcctttctattttttggtgcgggagggaagacctctcacttagggcaagagccaggtatagtctcccttcccagaatttgtaactgagaagatcttttctttttcctttttttggtaacaagacttagaaggagggcccaggcactttctgtttgaacccctgtcatgatcacagtgtcagagacgcgtcctctttcttggggaagttgaggagtgcccttcagagccagtagcagcagggcgggtagcaccacctcggtgtatccataaatggtactgcaaacaaaaaaaatcgggattatcgggcgcgaaaa

SEQ ID NO: 495541 - DNA, 406 bp, Homo sapiens
gccagaaatatcttacaggacagaataatatgtacaagaatggggtcccaatccagaccccgagagagttcttggatctcgcacaagaattcaggtgagtccctagtgcgaagtgaaagcaagtttattaagaaagtaaaggaataaaagaatggctactctaaggctgggcgctgtggctcacgcctgtagtcccagcactttgggaggccgaggcaggtggatcacccgaggtcaggagttcgagaccagcctggccaacatgataaaaccctggctctgctaaaaatacaaaaattagctgggcacggtcgcacacacctgtaatcccagctgcttgggaagctgaggcaggagaattgcttgagcccggtagacggaggttgtggcgaggaaattacggcca

SEQ ID NO: 495542 - DNA, 826 bp, Homo sapiens
ttcagaccgtagcatcaccctcccatcctgccctcaaaggcatgacctggatccagtcggcctgtcggcggtgtagtgggtgagcctagggctgtgaggtgcgcgccgtacttcctcttgctctacccgccgtttcatcttccatgacaacaacaacacctgggagggccactactaccactactcagacccggtgtgcaagcaccccaccttctcctatctacgcccggggccgctacagccgcggcgtcctctcgtccaggtcatgggaggcaccgatttcgtgttcaaagtgaatcacatgaaggtcaccccccatggatgcggccacagcctctgctgctcaacgtcttcaacggccaatgatttgctgtgggccgagggctcctggcaggtgggcatccatgctaggatgtgacccacaccgatggctgtcgtggccctgggcatcaaactacctcacacggagtacgagatcttcacaaatggaacaggatgcccgggggcgctatctgctgttcaacggtcagaggccctcgcgacgggtccagcccagacagtggccggagaagagagccacgtcctaccagatgcccttggtccagtgtgcctcctcttcgccgagggcagaggacctcgcgggaaggacagtggaagcagcctgtatgggcgggccctgggaggcgcgcctggtcctgctggtgggtgacttgctgcttgtccctctgtgcttggacctcggcagtggaattttgacttctatttttccccaggatctttttggcgttgtttcccgaagctttttcttgggctgatgcggatgccc

SEQ ID NO: 495543 - DNA, 1958 bp, Homo sapiens
  misc_feature (3)..(3): n is a, c, g, or t
  misc_feature (22)..(22): n is a, c, g, or t
  misc_feature (1912)..(1912): n is a, c, g, or t
gangctagtacgagctgggtgnaatcggacgaggcagagttggtggctggacctcctgcgacttccgagttgcgatgctgtacttctctttgttttgggcggctcggcctctgcagagatgtgggcagctggtcaggatggccattcgggctcagcacagcaacgcagcccagactcagactggggaagcaaacaggggctggacaggccaggagagcctgtcggacagtgatcctgagatgtgggagttgctgcagagggagaaggacaggcagtgtcgtggcctggagctcattgcctcagagaacttctgcagccgagctgcgctggaggccctggggtcctgtctgaacaacaagtactcggagggttatcctggcaagagatactatgggggagcagaggtggtggatgaaattgagctgctgtgccagcgccgggccttggaagcctttgacctggatcctgcacagtggggagtcaatgtccagccctactccgggtccccagccaacctggccgtctacacagcccttctgcaacctcacgaccggatcatggggctggacctgcccgatgggggccatctcacccacggctacatgtctgacgtcaagcggatatcagccacgtccatcttcttcgagtctatgccctataagctcaaccccaaaactggcctcattgactacaaccagctggcactgactgctcgacttttccggccacggctcatcatagctggcaccagcgcctatgctcgcctcattgactacgcccgcatgagagaggtgtgtgatgaagtcaaagcacacctgctggcagacatggcccacatcagtggcctggtggctgccaaggtgattccctcgcctttcaagcacgcggacatcgtcaccaccactactcacaagactcttcgaggggccaggtcagggctcatcttctaccggaaaggggtgaaggctgtggaccccaagactggccgggagatcccttacacatttgaggaccgaatcaactttgccgtgttcccatccctgcaggggggcccccacaatcatgccattgctgcagtagctgtggccctaaagcaggcctgcacccccatgttccgggagtactccctgcaggttctgaagaatgctcgggccatggcagatgccctgctagagcgaggctactcactggtatcaggtggtactgacaaccacctggtgctggtggacctgcggcccaagggcctggatggagctcgggctgagcgggtgctagagcttgtatccatcactgccaacaagaacacctgtcctggagaccgaagtgccatcacaccgggcggcctgcggcttggggccccagccttaacttctcgacagttccgtgaggatgacttccggagagttgtggactttatagatgaaggggtcaacattggcttagaggtgaagagcaagactgccaagctccaggatttcaaatccttcctgcttaaggactcagaaacaagtcagcgtctggccaacctcaggcaacgggtggagcagtttgccagggccttccccatgcctggttttgatgagcattgaaggcacctgggaaatgaggcccacagactcaaagttactctccttccccctacctgggccagtgaaatagaaagcctttctattttttggtgcgggagggaagacctctcacttagggcaagagccaggtatagtctcccttcccagaatttgtaactgagaagatcttttctttttcctttttttggtaacaagacttagaaggagggcccaggcactttctgtttgaacccctgtcatgatcacagtgtcagagacgcgtcctctttcttggggaagttgaggagtgcccttcagagccagtagcagtcggacggggctgnggctaaggcatttaacccgcctgtgcggctctggtacctcccttta

SEQ ID NO: 495544 - DNA, 1999 bp, Homo sapiens
  misc_feature (3)..(3): n is a, c, g, or t
  misc_feature (22)..(22): n is a, c, g, or t
  misc_feature (1907)..(1908): n is a, c, g, or t
  misc_feature (1914)..(1915): n is a, c, g, or t
  misc_feature (1925)..(1925): n is a, c, g, or t
  misc_feature (1933)..(1933): n is a, c, g, or t
  misc_feature (1952)..(1952): n is a, c, g, or t
gangctagtacgagctgggtgnaatcggacgaggcagagttggtggctggacctcctgcgacttccgagttgcgatgctgtacttctctttgttttgggcggctcggcctctgcagagatgtgggcagctggtcaggatggccattcgggctcagcacagcaacgcagcccagactcagactggggaagcaaacaggggctggacaggccaggagagcctgtcggacagtgatcctgagatgtgggagttgctgcagagggagaaggacaggcagtgtcgtggcctggagctcattgcctcagagaacttctgcagccgagctgcgctggaggccctggggtcctgtctgaacaacaagtactcggagggttatcctggcaagagatactatgggggagcagaggtggtggatgaaattgagctgctgtgccagcgccgggccttggaagcctttgacctggatcctgcacagtggggagtcaatgtccagccctactccgggtccccagccaacctggccgtctacacagcccttctgcaacctcacgaccggatcatggggctggacctgcccgatgggggccatctcacccacggctacatgtctgacgtcaagcggatatcagccacgtccatcttcttcgagtctatgccctataagctcaaccccaaaactggcctcattgactacaaccagctggcactgactgctcgacttttccggccacggctcatcatagctggcaccagcgcctatgctcgcctcattgactacgcccgcatgagagaggtgtgtgatgaagtcaaagcacacctgctggcagacatggcccacatcagtggcctggtggctgccaaggtgattccctcgcctttcaagcacgcggacatcgtcaccaccactactcacaagactcttcgaggggccaggtcagggctcatcttctaccggaaaggggtgaaggctgtggaccccaagactggccgggagatcccttacacatttgaggaccgaatcaactttgccgtgttcccatccctgcaggggggcccccacaatcatgccattgctgcagtagctgtggccctaaagcaggcctgcacccccatgttccgggagtactccctgcaggttctgaagaatgctcgggccatggcagatgccctgctagagcgaggctactcactggtatcaggtggtactgacaaccacctggtgctggtggacctgcggcccaagggcctggatggagctcgggctgagcgggtgctagagcttgtatccatcactgccaacaagaacacctgtcctggagaccgaagtgccatcacaccgggcggcctgcggcttggggccccagccttaacttctcgacagttccgtgaggatgacttccggagagttgtggactttatagatgaaggggtcaacattggcttagaggtgaagagcaagactgccaagctccaggatttcaaatccttcctgcttaaggactcagaaacaagtcagcgtctggccaacctcaggcaacgggtggagcagtttgccagggccttccccatgcctggttttgatgagcattgaaggcacctgggaaatgaggcccacagactcaaagttactctccttccccctacctgggccagtgaaatagaaagcctttctattttttggtgcgggagggaagacctctcacttagggcaagagccaggtatagtctcccttcccagaatttgtaactgagaagatcttttctttttcctttttttggtaacaagacttagaaggagggcccaggcactttctgtttgaacccctgtcatgatcacagtgtcagagacgcgtcctctttcttggggaagttgaggagtgcccttcagagccagtagcaggcaacaggnnggctgnngggtagggcnaataaccntccctgtccactgtctgtnttacgtcgtaattagagcacactgggggcgcggggcggcgcggggtg

SEQ ID NO: 495545 - DNA, 870 bp, Homo sapiens
ccaattttgaggccaataacaccgtcggtcgatccgtttccaggattctctgggagactcatggggcattctcttctcccaccctcggactttaccccagtgtgcaccacagagcttgggcagagctgaacagttggaccagaatttgccaagaggaatgtcaacgtgatgccctttcaatagacagtgtcgaggaccatctttgccttggagcaaggatatcaattgcttacaattgtgaaagagcccacagaaaagttacctttttcccatcatcgcatgataggaatcgggcagctggccatcctgttgggcatgctggatccagcagagaaggctgaccaagggcatgcttgtggcacaggtctcgtgtgcggctgtcgtcactggttcctgataggcaagctgaagcctgtctatcctcttaccagtttaccactggcacggaacttcggagtggacgattctcagggatacgtcaatctctctcccagttgaaggcagacacacacaagggttggcaacccccagctgatgtgggacggacggcgactagtgtcgactgtgccttcgcaaccacatccctgacgaccggacgccaccaacctttttccccgaaaaaaggcagctctccacccaatagagttcccatctggcacggacatacctccggtacaaccccagtcttaagtctctggaggcagctggatggtgctgcagccacagcgattgtcgccgcgcactggtgtcccctgcggcagttcctacccactctgggggcaccaaggccaaggtttaggtggtaaacaggtctcactgacgtgggctcgagtttgcattttccatccgtttcacccttctcactgcgcg

SEQ ID NO: 495546 - DNA, 1259 bp, Homo sapiens
tggcccttgggggtgtgccccacgcgccccccgtatatattgtgtgcccccccccccccccccatttggggggaagacgcccgccgccctgtggggctttttctcagcgtgggttcttccaacgggtggacattttactccccccttggtgaccccctgtgcccccccggggccccctatattttatatggtccccccccggggcttattttgccccccccctcggtatatttggggaggtttgtggccgccacacacccccggggctttcaaccccaccgtgggggacaacaaggggccaaacaggttttttttcccctgggaagaaccctttcgtaaaaaaggcggccaaacatacagggtttcttggaatatcccggccccccgcgtttttcttggggtgtaaaaaaaacgtccttggggaaaaagagtttggggccccccctcaaaaaagtttctctgtggagaaggttctcttggggtgagaaatcccccgcgcccacaattgggggttgacaatatatgggggtttcccccctggcgcacaagaggccccccaacaatagggtggttggtcttttggagagaaggccccttttctctcccaaggagcctaatatcccacccctctttggggcttctgcgctttgggccgtgttttcgcgtgaatatatgtatgacccacgcgccacgcttgtccgcgctggtgggtgggttcacatcgccccataagtgccccccaccccggctttggtggagcccacacagagagagggcgttgggcctgggagagctttgggccacacaggctccaccccacagagttctctggcccaccgagaaaggcgttcacagagagaggcgctataatatggagaatatattatatcgccctttataaatatcccctcgcccacaccccccacactctctctatatttccacagtgggtgggagaagagaccgggtgttccacagagacctcgtgttgtgttcacacattgggccacatcttaaagtttatagtgaagtataaaaagagctcggtgtaaatgagtaaccaacatgcactcgtaaaccctctcacgaaggaaaaggaggaaatgttttgtggagcccctttggttttcttttttgcgtgtggcacgcttttaaattatattatgtttttaaaatcacgtactttttaatgggaaccacttggccccaaaatttgtccaccagaattttgagaccccatttaaaaagtttaatgagga

SEQ ID NO: 495547 - DNA, 2077 bp, Homo sapiens
  misc_feature (3)..(3): n is a, c, g, or t
  misc_feature (22)..(22): n is a, c, g, or t
gangctagtacgagctgggtgnaatcggacgaggcagagttggtggctggacctcctgcgacttccgagttgcgatgctgtacttctctttgttttgggcggctcggcctctgcagagatgtgggcagctggtcaggatggccattcgggctcagcacagcaacgcagcccagactcagactggggaagcaaacaggggctggacaggccaggagagcctgtcggacagtgatcctgagatgtgggagttgctgcagagggagaaggacaggcagtgtcgtggcctggagctcattgcctcagagaacttctgcagccgagctgcgctggaggccctggggtcctgtctgaacaacaagtactcggagggttatcctggcaagagatactatgggggagcagaggtggtggatgaaattgagctgctgtgccagcgccgggccttggaagcctttgacctggatcctgcacagtggggagtcaatgtccagccctactccgggtccccagccaacctggccgtctacacagcccttctgcaacctcacgaccggatcatggggctggacctgcccgatgggggccatctcacccacggctacatgtctgacgtcaagcggatatcagccacgtccatcttcttcgagtctatgccctataagctcaaccccaaaactggcctcattgactacaaccagctggcactgactgctcgacttttccggccacggctcatcatagctggcaccagcgcctatgctcgcctcattgactacgcccgcatgagagaggtgtgtgatgaagtcaaagcacacctgctggcagacatggcccacatcagtggcctggtggctgccaaggtgattccctcgcctttcaagcacgcggacatcgtcaccaccactactcacaagactcttcgaggggccaggtcagggctcatcttctaccggaaaggggtgaaggctgtggaccccaagactggccgggagatcccttacacatttgaggaccgaatcaactttgccgtgttcccatccctgcaggggggcccccacaatcatgccattgctgcagtagctgtggccctaaagcaggcctgcacccccatgttccgggagtactccctgcaggttctgaagaatgctcgggccatggcagatgccctgctagagcgaggctactcactggtatcaggtggtactgacaaccacctggtgctggtggacctgcggcccaagggcctggatggagctcgggctgagcgggtgctagagcttgtatccatcactgccaacaagaacacctgtcctggagaccgaagtgccatcacaccgggcggcctgcggcttggggccccagccttaacttctcgacagttccgtgaggatgacttccggagagttgtggactttatagatgaaggggtcaacattggcttagaggtgaagagcaagactggtgagtgagcaagaaggagccccgggccagccagttcccactcactgtctgctccctcccccagctgatctcactgccttccctagagctctgaccacttgtttcctcaccctctctctctagccaagctccaggatttcaaatccttcctgcttaaggactcagaaacaagtcagcgtctggccaacctcaggcaacgggtggagcagtttgccagggccttccccatgcctggttttgatgagcattgaaggcacctgggaaatgaggcccacagactcaaagttactctccttccccctacctgggccagtgaaatagaaagcctttctattttttggtgcgggagggaagacctctcacttagggcaagagccaggtatagtctcccttcccagaatttgtaactgagaagatcttttctttttcctttttttggtaacaagacttagaaggagggcccaggcactttctgtttgaacccctgtcatgatcacagtgtcagagacgcgtcctctttcttggggaagttgaggagtgcccttcagagccagtagcaggcaggggtgggtaggcaccctccttcctgtttttatctaataaaatgctaacctgc

SEQ ID NO: 495548 - DNA, 332 bp, Homo sapiens
  misc_feature (101)..(101): n is a, c, g, or t
  misc_feature (156)..(156): n is a, c, g, or t
  misc_feature (166)..(166): n is a, c, g, or t
atgctcatcagtaaaatggaaataatttctccaggccaggtgtggtggctcatgcctatagtcccagcactttgggaggccaaagcaggcagatcactttnaggtcaggagtttgaaacctgacctcaagatggtgaaccccatcttttctaaaantacaaaaaantgagctgggcatggtggcacatgcctgtaatcccagctattgggaagctgaggcacgacaattgcttgattctacaaggcagaggttgcagtgagctgagatcacggcattgcactcctgcctggggtgagagagtgagaccctgtttcaaaaaacttaaagcaaa

SEQ ID NO: 495549 - DNA, 1928 bp, Homo sapiens
  misc_feature (3)..(3): n is a, c, g, or t
  misc_feature (22)..(22): n is a, c, g, or t
gangctagtacgagctgggtgnaatcggacgaggcagagttggtggctggacctcctgcgacttccgagttgcgatgctgtacttctctttgttttgggcggctcggcctctgcagagatgtgggcagctggtcaggatggccattcgggctcagcacagcaacgcagcccagactcagactggggaagcaaacaggggctggacaggccaggagagcctgtcggacagtgatcctgagatgtgggagttgctgcagagggagaaggacaggcagtgtcgtggcctggagctcattgcctcagagaacttctgcagccgagctgcgctggaggccctggggtcctgtctgaacaacaagtactcggagggttatcctggcaagagatactatgggggagcagaggtggtggatgaaattgagctgctgtgccagcgccgggccttggaagcctttgacctggatcctgcacagtggggagtcaatgtccagccctactccgggtccccagccaacctggccgtctacacagcccttctgcaacctcacgaccggatcatggggctggacctgcccgatgggggccatctcacccacggctacatgtctgacgtcaagcggatatcagccacgtccatcttcttcgagtctatgccctataagctcaaccccaaaactggcctcattgactacaaccagctggcactgactgctcgacttttccggccacggctcatcatagctggcaccagcgcctatgctcgcctcattgactacgcccgcatgagagaggtgtgtgatgaagtcaaagcacacctgctggcagacatggcccacatcagtggcctggtggctgccaaggtgattccctcgcctttcaagcacgcggacatcgtcaccaccactactcacaagactcttcgaggggccaggtcagggctcatcttctaccggaaaggggtgaaggctgtggaccccaagactggccgggagatcccttgccgtgttcccatccctgcaggggggcccccacaatcatgccattgctgcagtagctgtggccctaaagcaggcctgcacccccatgttccgggagtactccctgcaggttctgaagaatgctcgggccatggcagatgccctgctagagcgaggctactcactggtatcaggtggtactgacaaccacctggtgctggtggacctgcggcccaagggcctggatggagctcgggctgagcgggtgctagagcttgtatccatcactgccaacaagaacacctgtcctggagaccgaagtgccatcacaccgggcggcctgcggcttggggccccagccttaacttctcgacagttccgtgaggatgacttccggagagttgtggactttatagatgaaggggtcaacattggcttagaggtgaagagcaagactgccaagctccaggatttcaaatccttcctgcttaaggactcagaaacaagtcagcgtctggccaacctcaggcaacgggtggagcagtttgccagggccttccccatgcctggttttgatgagcattgaaggcacctgggaaatgaggcccacagactcaaagttactctccttccccctacctgggccagtgaaatagaaagcctttctattttttggtgcgggagggaagacctctcacttagggcaagagccaggtatagtctcccttcccagaatttgtaactgagaagatcttttctttttcctttttttggtaacaagacttagaaggagggcccaggcactttctgtttgaacccctgtcatgatcacagtgtcagagacgcgtcctctttcttggggaagttgaggagtgcccttcagagccagtagcaggcaggggtgggtaggcaccctccttcctgtttttatctaataaaatgctaacctgc

SEQ ID NO: 495550 - DNA, 919 bp, Homo sapiens
ggagagaactagtctcgaggttttttattttgtgttttgccggtgaattctttaccttataattctagtcatctgggttaacaatggaaagctcggggaatccaaaattaacttcctgtgcccggtgagcttttattatagaccaccagaaataaagttccaaccttgtgtcccacatggtccggctggtgctatggtccaaatgaaccttaatgagcgggttgccatctagttggacgcggattctctatgcccacaatttcgctggggaaagaccaggtcctcgagggaatggacttcgatgaaccagctgcacacaacgatcgcggttcccggggaccgctttggctatatattttcggaacgcggactatatatcagagtagggctataggaaagaattctcctctgagccgaataaaagacgcagaacatgcttcccactgaatcttttaactccaattgcggcgttaccaagccggtactgggaatttccgtggaaaagaattcacagtgagagaggaaagcgggaaacaagaggataagtgcataagcgttcacgcgaaccaaccaccaatattcaatctttcctagagcgtgaccgatatcatatcaaaggtgctcccgtggagacgtgaacaccgtgtgacagggatcgcaagaatcacaatacatccaagactccacgagaaaagacgacgcgagtgagaaaacaagttgccggggacaccaccgagaagcgtcggtccaccggggcactccaccgcaccaattgggggcgctaccaagagaaacctgagggcggacaccggaaccgtggaagcatgggggctacgcggcaccccgggggcaagaacactgtggcccgttgggggaacaacaagggaccgcgggcaagtggagtggcaaccgaagagag

SEQ ID NO: 495551 - DNA, 1852 bp, Homo sapiens
  misc_feature (3)..(3): n is a, c, g, or t
  misc_feature (22)..(22): n is a, c, g, or t
gangctagtacgagctgggtgnaatcggacgaggcagagttggtggctggacctcctgcgacttccgagttgcgatgctgtacttctctttgttttgggcggctcggcctctgcagagatgtgggcagctggtcaggatggccattcgggctcagcacagcaacgcagcccagactcagactggggaagcaaacaggggctggacaggccaggagagcctgtcggacagtgatcctgagatgtgggagttgctgcagagggagaaggacaggcagtgtcgtggcctggagctcattgcctcagagaacttctgcagccgagctgcgctggaggccctggggtcctgtctgaacaacaagtactcggagggttatcctggcaagagatactatgggggagcagaggtggtggatgaaattgagctgctgtgccagcgccgggccttggaagcctttgacctggatcctgcacagtggggagtcaatgtccagccctactccgggtccccagccaacctggccgtctacacagcccttctgcaacctcacgaccggatcatggggctggacctgcccgatgggggccatctcacccacggctacatgtctgacgtcaagcggatatcagccacgtccatcttcttcgagtctatgccctataagctcaaccccaaaactggcctcattgactacaaccagctggcactgactgctcgacttttccggccacggctcatcatagctggcaccagcgcctatgctcgcctcattgactacgcccgcatgagagaggtgtgtgatgaagtcaaagcacacctgctggcagacatggcccacatcagtggcctggtggctgccaaggtgattccctcgcctttcaagcacgcggacatcgtcaccaccactactcacaagactcttcgaggggccaggtcagggctcatcttctaccggaaaggggtgaaggctgtggaccccaagactggccgggagatcccttacacatttgaggaccgaatcaactttgccgtgttcccatccctgcaggggggcccccacaatcatgccattgctgcagtagctgtggccctaaagcaggcctgcacccccatgttccgggagtactccctgcaggttctgaagaatgctcgggccatggcagatgccctgctagagcttgtatccatcactgccaacaagaacacctgtcctggagaccgaagtgccatcacaccgggcggcctgcggcttggggccccagccttaacttctcgacagttccgtgaggatgacttccggagagttgtggactttatagatgaaggggtcaacattggcttagaggtgaagagcaagactgccaagctccaggatttcaaatccttcctgcttaaggactcagaaacaagtcagcgtctggccaacctcaggcaacgggtggagcagtttgccagggccttccccatgcctggttttgatgagcattgaaggcacctgggaaatgaggcccacagactcaaagttactctccttccccctacctgggccagtgaaatagaaagcctttctattttttggtgcgggagggaagacctctcacttagggcaagagccaggtatagtctcccttcccagaatttgtaactgagaagatcttttctttttcctttttttggtaacaagacttagaaggagggcccaggcactttctgtttgaacccctgtcatgatcacagtgtcagagacgcgtcctctttcttggggaagttgaggagtgcccttcagagccagtagcaggcaggggtgggtaggcaccctccttcctgtttttatctaataaaatgctaacctgc

SEQ ID NO: 495552 - DNA, 102 bp, Homo sapiens
ggatcaatgagacaatatgagcctacttcacaagagcgccttcccccgtcaatgatatcatctcaacttagtattatacccaccaccaccaccactggcgct

SEQ ID NO: 495553 - DNA, 104 bp, Homo sapiens
aggatgagtcggatctagcttgcggctgaaaacagggcacttcattgaaagtctgcatgggaaggatccagcctcctccctacccacccagagcagggagcagg

SEQ ID NO: 495554 - DNA, 1958 bp, Homo sapiens
  misc_feature (3)..(3): n is a, c, g, or t
  misc_feature (22)..(22): n is a, c, g, or t
gangctagtacgagctgggtgnaatcggacgaggcagagttggtggctggacctcctgcgacttccgagttgcgatgctgtacttctctttgttttgggcggctcggcctctgcagagatgtgggcagctggtcaggatggccattcgggctcagcacagcaacgcagcccagactcagactggggaagcaaacaggggctggacaggccaggagagcctgtcggacagtgatcctgagatgtgggagttgctgcagagggagaaggacaggcagtgtcgtggcctggagctcattgcctcagagaacttctgcagccgagctgcgctggaggccctggggtcctgtctgaacaacaagtactcggagggttatcctggcaagagatactatgggggagcagaggtggtggatgaaattgagctgctgtgccagcgccgggccttggaagcctttgacctggatcctgcacagtggggagtcaatgtccagccctactccgggtccccagccaacctggccgtctacacagcccttctgcaacctcacgaccggatcatggggctggacctgcccgatgggggccatctcacccacggctacatgtctgacgtcaagcggatatcagccacgtccatcttcttcgagtctatgccctataagctcaaccccaaaactggcctcattgactacaaccagctggcactgactgctcgacttttccggccacggctcatcatagctggcaccagcgcctatgctcgcctcattgactacgcccgcatgagagaggtgtgtgatgaagtcaaagcacacctgctggcagacatggcccacatcagtggcctggtggctgccaaggtgattccctcgcctttcaagcacgcggacatcgtcaccaccactactcacaagactcttcgaggggccaggtcagggctcatcttctaccggaaaggggtgaaggctgtggaccccaagactggccgggagatcccatatagcacagtttgaggagcgaatcaagtttgccgtgttcccatccctgcaggggggcccccacaatcatgccattgctgcagtagctgtggccctaaagcaggcctgcacccccatgttccgggagtactccctgcaggttctgaagaatgctcgggccatggcagatgccctgctagagcgaggctactcactggtatcaggtggtactgacaaccacctggtgctggtggacctgcggcccaagggcctggatggagctcgggctgagcgggtgctagagcttgtatccatcactgccaacaagaacacctgtcctggagaccgaagtgccatcacaccgggcggcctgcggcttggggccccagccttaacttctcgacagttccgtgaggatgacttccggagagttgtggactttatagatgaaggggtcaacattggcttagaggtgaagagcaagactgccaagctccaggatttcaaatccttcctgcttaaggactcagaaacaagtcagcgtctggccaacctcaggcaacgggtggagcagtttgccagggccttccccatgcctggttttgatgagcattgaaggcacctgggaaatgaggcccacagactcaaagttactctccttccccctacctgggccagtgaaatagaaagcctttctattttttggtgcgggagggaagacctctcacttagggcaagagccaggtatagtctcccttcccagaatttgtaactgagaagatcttttctttttcctttttttggtaacaagacttagaaggagggcccaggcactttctgtttgaacccctgtcatgatcacagtgtcagagacgcgtcctctttcttggggaagttgaggagtgcccttcagagccagtagcaggcaggggtgggtaggcaccctccttcctgtttttatctaataaaatgctaacctgc

SEQ ID NO: 495555 - DNA, 315 bp, Homo sapiens
gcgagagtgtaacgaggccggttcagtgttacgatatctgagcatataacttacggtgaagataatctcttccggaagtactacacaggtctcctgcatatataacaatatggacgagtaaatcactcagtgataatcttaaagtaccactgatcttaaacataaatgaactgcatatttaagttggcttcttataatgtgagattctggaaatacttctttgtttaaattatactttaagttctggggtacatgtgcagaacatgcgggtttgttacataggtatacatgtcatgttatccctcccctagcccc

SEQ ID NO: 495556 - DNA, 230 bp, Homo sapiens
accgtatcaatgagtacacctctaaatcacacgatctgtgggacaagcatcaagcacgcagcagatgcagttcaaagacgcttagtcgtagcgcacacccccaacgggaaacagcagtgattaacctttaacaataaacgaaagtttaactaagctatactaaccccagggttggtcaatttcgtgccagccaccgcggtcacacgattaacccaagtcaatagtttatg

SEQ ID NO: 495557 - DNA, 433 bp, Homo sapiens
  misc_feature (7)..(7): n is a, c, g, or t
  misc_feature (42)..(42): n is a, c, g, or t
ttccagnccttttttttttccatttatgcctcctcccttgcntttttttaaaattaaagaaacctattttttttaagagcagttttaagattccacagcaaaattgagtgaaaagtgcagaggattcctcatataccctccctgtccctcacacacactagcctccccccactgtcaacatactgaacccacaatgctaatttgttacattcaatgaacctgcattgacatattatcacccaagtccatagtttatattagaattcactcttggtattacaaattctgtaggttttaacaaatatataatgaggccgggcacagtggttcatgcctgtaatctcaacactttgggaagccgaggcaggaggattgctggagcccaggagttcaagaccagcctaggcaacatagtgagaccccatccttacaa

SEQ ID NO: 495558 - DNA, 1909 bp, Homo sapiens
  misc_feature (3)..(3): n is a, c, g, or t
  misc_feature (22)..(22): n is a, c, g, or t
gangctagtacgagctgggtgnaatcggacgaggcagagttggtggctggacctcctgcgacttccgagttgcgatgctgtacttctctttgttttgggcggctcggcctctgcagagatgtgggcagctggtcaggatggccattcgggctcagcacagcaacgcagcccagactcagactggggaagcaaacaggggctggacaggccaggagagcctgtcggacagtgatcctgagatgtgggagttgctgcagagggagaaggacaggcagtgtcgtggcctggagctcattgcctcagagaacttctgcagccgagctgcgctggaggccctggggtcctgtctgaacaacaagtactcggagggttatcctggcaagagatactatgggggagcagaggtggtggatgaaattgagctgctgtgccagcgccgggccttggaagcctttgacctggatcctgcacagtggggagtcaatgtccagccctactccgggtccccagccaacctggccgtctacacagcccttctgcaacctcacgaccggatcatggggctggacctgcccgatgggggccatctcacccacggctacatgtctgacgtcaagcggatatcagccacgtccatcttcttcgagtctatgccctataagctcaaccccaaaactggcctcattgactacaaccagctggcactgactgctcgacttttccggccacggctcatcatagctggcaccagcgcctatgctcgcctcattgactacgcccgcatgagagaggtgtgtgatgaagtcaaagcacacctgctggcagacatggcccacatcagtggcctggtggctgccaaggtgattccctcgcctttcaagcacgcggacatcgtcaccaccactactcacaagactcttcgaggggccagcaagactggccgggagatcccttacacatttgaggaccgaatcaactttgccgtgttcccatccctgcaggggggcccccacaatcatgccattgctgcagtagctgtggccctaaagcaggcctgcacccccatgttccgggagtactccctgcaggttctgaagaatgctcgggccatggcagatgccctgctagagcgaggctactcactggtatcaggtggtactgacaaccacctggtgctggtggacctgcggcccaagggcctggatggagctcgggctgagcgggtgctagagcttgtatccatcactgccaacaagaacacctgtcctggagaccgaagtgccatcacaccgggcggcctgcggcttggggccccagccttaacttctcgacagttccgtgaggatgacttccggagagttgtggactttatagatgaaggggtcaacattggcttagaggtgaagagcaagactgccaagctccaggatttcaaatccttcctgcttaaggactcagaaacaagtcagcgtctggccaacctcaggcaacgggtggagcagtttgccagggccttccccatgcctggttttgatgagcattgaaggcacctgggaaatgaggcccacagactcaaagttactctccttccccctacctgggccagtgaaatagaaagcctttctattttttggtgcgggagggaagacctctcacttagggcaagagccaggtatagtctcccttcccagaatttgtaactgagaagatcttttctttttcctttttttggtaacaagacttagaaggagggcccaggcactttctgtttgaacccctgtcatgatcacagtgtcagagacgcgtcctctttcttggggaagttgaggagtgcccttcagagccagtagcaggcaggggtgggtaggcaccctccttcctgtttttatctaataaaatgctaacctgc

SEQ ID NO: 495559 - DNA, 266 bp, Homo sapiens
  misc_feature (5)..(5): n is a, c, g, or t
agtanctaaaccacagcatttccaatgtcagcatgcaaatggccttctcatcggacagcagatgccatctaggactttcatagctgacgaggagaagtcaatgtctagtgtccaaaggacaggctgactcttgtgttacgggctcatgctgctagcaagtttaagttaaatccactgctcatttaccatcctagggcccttaagaatcatgctaaacatacctctgtctgatgcttttttaatggaacaacaaagcctggctggta

SEQ ID NO: 495560 - DNA, 263 bp, Homo sapiens
cgatcttggaacctgtacgggcataacggtactcagaaggctacgcgaatatgccgacggctcgccgtgcagcagtgcgtgacaatccgcgtatggtcgtgcgtcggcgcatgttgtggttcgggatacgactggcatgagtagtcaggtcaattctttcagagccttgccaaccagccgggacaccgagttgcacgccggacctgccgcgcgcaagcagcgcgacccacgccaagcgcgagcagacagcatgcgctaagtag

SEQ ID NO: 495561 - DNA, 1210 bp, Homo sapiens
gtggagtttcgccatggtggtcaggctggtcttgaactcctgacctcaggtgatccacccgcccgccttggcctcccaaagtgctaggattccaggcgtgagccatcgtgcccagctagacgtcttcctttttttttttttttgggagacgggagtctcactctgtcgcccaaggctggagtgcattgggtgcgatctacggctcactgcaagctccgcctcctcccgggtatcacgccaatatctcctgcctaagcctcctgagtaagctgggactacgggcacctgccaccattgcgcagtataattataggtatattatagtaagagacggggttaacgccgtgtgggacaggatggtctcgaatctccgtgagtaggtgatcgtgcccgcactttggcctcccagagtgctgggaagtcgcaaggtagttgagatcaccagcgaccgtggcccctttataggtttgattatatttacgaccggggacttccatatgtcatccggaattttcgcggccctgaagctccatagaaggtggccaaccagatatgggatacacccaaggggaagtacgacaatactaatagggcccgcggggcgacgacagagatgcgacaactactgtgcagaagggagagcgggcacacaagcagacaccgggggaataaccgaaaggaaaacgatcccccagagagaacaccagggggcggcgcccccaaacacaaatacagggggaggaaagagaagagcagccgccacggcggggggcccccagaaccgcctcacagagagaccgcagagaggggaccagagcgttcggaggcaaagaaggggggaagccacacacacatagtgatagcagcgcgggggatatacaccaagcagagccagcaacgacaatatataaaacacggggaatagaggagcccaaaactgggcgacaaggggccaccaagcgaaagggtgacagcggacatccggtaggggcagaaaccgcagaactttggcgcccgcagcatataacggagaaaaaagacagccggagaagaggcggacacaagcctgacaaccccgacatgagaagaaacgacagggcgggcagaacaaagagccccgaagtgggacacaccgcggagaaaagtgaacacccatccaaaaacagaaaaaaactgcgacaggaaagaacaaagagaaaaaaagcaggaa

SEQ ID NO: 495562 - DNA, 445 bp, Homo sapiens
aggagatcaggaagcaataacgagagccacgtcttcacagctcagcgagaaaccgctgcacctctttctagtggtgtctgatgctctctacagtgttgagagaaacttctccagtaacgaactatacaaatcatcactgaggaggatagtcgtttcctgagtcgcttttaatacaaacagtctgattctcatttaggagcataggctgttaccgggcagggaaacagtatattactagatcttctctgacaggaaccgggtgatcagcgttgttagactgtgcatcccggttgtgggtcattccctctagacttctgagatacaggccattgactctcttggaaggagaaatagtcagtgtatttgcttgtaatcttgcagtattggtttaagagtgtgtttaataatacacaatatgcagactcagctaaggtatcccccagta

SEQ ID NO: 495563 - DNA, 289 bp, Homo sapiens
atccccgctcgagccaggacctggcacatgtatgaatcatctatttcgagatataaaacaatgaaaggaacagaccttcggcttggagttgtatgcctctatgaactgaattgtttattgagaagagatgattccgttatacccactcacgattgagctgtctccttcgtgagtgaatatcacggaatcattctcttctcaatagactaattcagttctgtcagttcataccccatccgacgcacgaaggatcttttgtgttttattgccccatcgtctgcagaatcaa

SEQ ID NO: 495564 - DNA, 756 bp, Homo sapiens
gcccagtacctctcccaagtccacacatgcgaggtgatagcatgctttcgtgttaattatgtaatgcagaatttttataatcttcgccttaatactttatcatttcgttttattcttgaatgatgaggcttcgtgcccccccttcccccttttttagtccccctaacgttgatcatgtatgaaggcttttgggtctccctgggattgtgtggaggcagccagggcttacctgtagcactgagcttgtagaccatgttgaataagaagtgcacaccttaaaaactgacaatcataaagaacacaaaacaagaaataaagaagaaaacacccttggagcccatctctgtgtgttatcctaggtgccggcagcgacagccggaacatggatggtacgcacgatgggttcaacgactggtttcctcctagcgccctgcctttccttgttgcacacttgggcgtggacaagttctttgtgcggaggcctccaccctgacattttcgggagtagcgcaatattatagtatatcgggaaacatccgcgccgtggtgaacccggcgatgtttcattacaactcggagaaaacccggtgagggacggtccccacgggacccgaaaattccattgaacacccctttacagacagatcaattgcctcatcgccccaaggtggtgctcgagaacacccggtaggtatgcgaggcccatcaccaatgcccacacctgatccggggtggcaccagcttgggttgcagaca

SEQ ID NO: 495565 - DNA, 152 bp, Homo sapiens
tccgaaggagtctatacaacgccacgtttagtgccttttggtgaatatattccagtatccggtttactgaaatgggtgttgcctgccatgcagaatgatccgtcgatacgtggttattcacggtggtgaacaacagcaacaaccgctttcta

SEQ ID NO: 495566 - DNA, 945 bp, Homo sapiens
cgtggtgcctcctgccgtgcaatcccagcatttgggaggccaaggcaggcggatcatgagatcaggcgattgaaccatcctgctccagcttggtgaaaccccatgtttactactcggatacaaagagtagcggggcgatggtggtgcgttgcctgtagtcccagctactcgggaggctgtggcagtagaaaccgcttaagcctgggaggcagagtgttgctagttgagccaaaattgcgccgttgcagtgagccgaaattgcgccgttgcaattccagcctgatgacagagctagactccctctcaaaaaaaagaaataaaaactctagtaaggcaaagatgcggtctcgaaaagtgtgcccggaaacgagagattatttcgtttataacagcggtgtggccccaggtggcactcatgtgcgttgtaaatgccaaaaagagttgtgggaacgtgccaaggcgcacggttggactcacccttgtgcgctcagcaggttttcgaacacatagtctgtcccacagtgttgttgaaacccgtacatcctttgtttaaattctacgaaacatttgcctggcaggaggtggacttctcggctagaaatcccaacccagttggtgatgggccaagggcaggtaggataacagcggtccaggccagattctaagacctcttgtcgcctaacattgttaaacccgcattctgtctaaaatttcgacaacttaggtgggataggggtgggatgtcctatagtcccagcaactgtggaggcctgccggagcaagaggtttagtggccaaggtttgccgattgcttcaacctgggaaagaggaactccttgtcgacacaaaaaaaacaaatttggggcgaccgaaaagttaaacttttgggcgcgcagaaataaaagcgcacttccaagaacgcgcatgtgtcacaaacacgcgcgg

SEQ ID NO: 495567 - DNA, 147 bp, Homo sapiens
ggcccctggagtctgtggagcttggcatctggtcaccctccggcggggcatcacctctgagatctgaactttgggcacagtcaggcgcttcagagtggttccctgagcccccaggttacagccagagtgccaggaggaggaggagga

SEQ ID NO: 495568 - DNA, 319 bp, Homo sapiens
tctagaggatctcaatcgcacgacatgtagactcagagaacccagtgcctgatagtccagtcagcctctgtcatcccagccatgttcctagtgtgctccagcgcttcactggcccctccccacaggcggctgggacctgaacatgaaggagctgaagctgctgaagaccatcgcgaagggggagttcggagacgtgatgctgtgcgattaccgagggaacaaagtcgccgtcaagtgcattaagaacgagcccaatggccagggcttcctggctagaaggctcagtcatgacgcaactgcggcgtaccaacctggtgga

SEQ ID NO: 495569 - DNA, 606 bp, Homo sapiens
agcggaggcaaggctgaggctgcagtgggctgtgatcatgccactgcattccaacctgggtgagagagaccccatttttaaaaaaatatatagggccgggcgcagtggctcacacctgtaatcccagcactttgggatgccaaggcaggcagataacctgaggtcaggagtttgagaccagcctggccaacatggtgaaaccccattcctactaaaaatacaaaaattagctaggcatggtggcaaatgcctttagtcccagctactagggaggctgaggcagaagaatggcttgaacccaggaggcagaggtttcagtgaaccgcgattgtgccactgcactccagcctgggcgacagaacaagactctgtctcaaaaaaaaaaaaaaaaagggataatccattctgggcatgatttcaaagacagagtgagaaattgaaaaatttctgtccggctaaatcatctccaccagaattcaaaagaaaaaaaaaagcttataaatctatggtccatgttaaaaaaacttgcttgtgatgcaaccaattaattggagggagcacaacctttttttaccaattttgacagcctgcatttggcttgggaaa

SEQ ID NO: 495570 - DNA, 104 bp, Homo sapiens
cgcttcgcggagcaggatgagccgtgaacagtccgaaggaagtgggacggatgatagtgatcagtatggaccttctttccttggtataactgaattccttcctc

SEQ ID NO: 495571 - DNA, 290 bp, Homo sapiens
gccagaaaaagcccggggggttcccaaaacgtgttgggctgatctcccgcccggggcccccatttgttgtttagggtccggggtctattctgattggttcaaaaagacttttctgaaatggcgtcttccctttgggggcccccccgtccccctaatggttctccttccccaaacacttacttaattcttctcctagcccttttttttttttaacagatgttgtaatttaccccttgattttcccatttaccctctgttttttccccttgggataaaagttaggggaggga

SEQ ID NO: 495572 - DNA, 122 bp, Homo sapiens
atgagtatgaggacactccctaggatgaagcaccttccgattcctgttcttttaaacaatcgaggaatataatttcaattcatcgcatcgactttatccatctgcggagtaaactatggcac

SEQ ID NO: 495573 - DNA, 487 bp, Homo sapiens
aaaaaaactcttttcgggggttcctttgttttttttttccattcccaaaaacaccggccttttttttgtctatacaggaaaaaaagaaaggtcttaaaaattttttttccccaaaggagaaactgggtcttctccctttaaaaaacacacctcgagggaaaaacccctccctacactgtgggcccccctttttacttttcaaaaaaaaaatccccccctttttgggggcccaagccttctctggaaaaaaaaaaatgtttaaaccatcttatttcactctataacttgccctgaaggcctacgaaaataatcacaacactttttccaaaaaaaaagccataacctcgcaccacacaaatgggcctctttcaaaaaaaaaaaaaaaacccctccacattcgtgctcggcagaaaacattctaattatttcctctagaaaaaatattccccccaacgcaaaaaaatggtgtatataggaccccacaacc

SEQ ID NO: 495574 - DNA, 223 bp, Homo sapiens
cgggtgaaggcgggttaaagtgcttgccacattcttcacattggtagggtgtctctccagcatgagtgatcatatgtgtagtaagggtagaggactgggttacaggctttgccacattcttcacattggtagggtttctcgtccagtatgaataatccggtgtgtagtaaggtgtgagagacggttaaaagcttggccacatgctgcagaactagtggagatt

SEQ ID NO: 495575 - DNA, 868 bp, Homo sapiens
gctcagataagtgatctctgggtcttgagagggtacgtccagaaggtgggggcgaactgtacagatcaacatatcagagacagtttggctagcagtgacctcagatatggaacatgtccgactaccgctctatgcactcattgacactcctatcgtaccagaccctccgtcttcactcctcctccgtcctcctgtgggagggtggtcagttgtggactgtagaggactcatatcaccatgcttgatgcccagttagattctgaagatctgatttgatagaagcagttgattgaatgcttaaatacaacacatggtattacctgaaagtaccagagtacctgggatttcgagaggaaccacgctatcagcaatgtactttgacatcttagcttacaacttcccataagatgtacgctggaagagtcatcggactaacgtgggagacacggtaagggtgccccctagaaatactcggaagagatattggaatggttcattatgagtcgagagcagccaaggttagagcgtcgttatgcataaaattgcttacgttctacacccttaggaatcatcaactgatagaggtttagcgccatggacccaaataagatagcttggggtacaccgaagcacattcttccatacgacagggaatagacctagcgttgtacgttacctgcacatataacttggagacggagatttgcacaatagcagacagcaagactgacagtagtcagaacaagggagagtgatctcgaaagcatattgcacacaccaagaggatcataggcacattcagagataaaaccaaatggctagaatatcacccagataggggacaccatagagtggcaaaagtgggaag

SEQ ID NO: 495576 - DNA, 996 bp, Homo sapiens
ttcgagaccatcctggccaacatggtgaaaccccgtctctactaaaaatataaaaattagctgggtgtggtggcaggagcctgtaatcccagctacacaggaggctgaggcacgagaatcacttgaactcaggagatggaggtttcagtgagccaagatcacaccactgcactccagcctggcaacagagcgagactccatctcaaaaaaaaaaaagaaaagtaagaaagaaagggactttccctttagaaggggaaagaaaaaatcataaaatatggagctgatgcccggtatatagaaaattaggcgtttctcgaaagctgtcctatgtttggcgttgtatttaagtctttattctcttcctttaggtggagaaacaaagtaccaattttgaagggattttttaatttggtcattgggttctgtcagtagaaatacccatattgtgctacccaatttttctggtgaagaaatggtttccagtggttatcattatatctaacttataacctcccccatagttatgaagagtaccctgaattgccactatggtggacactcggatactgctcctggtgaacaaatattttaacggaactcttacaacgttttccttttaaaagatctatgatggcacctgcatttaccttctaaataaccgtgccatggtggcttggccgacacgcacatgctattgtacgcctcagaagaaaatatttactggcggtcgcgggtccgtcaccacaattacgcgaggggattgggtgacctttcacttttattgagccgccgttttgtactccccctggaactgggcaatctgaaccttcccggatctggactggtctcggccacatgcgcggcttaacggttgtaaagccctttgcgatgagcgcacatagcagaatgtagtatgcacacgttacaccaacgcagacatgttgttttcccacaccttggaaacgcgcaggagagacacatcaggggtagaacgac

SEQ ID NO: 495577 - DNA, 1902 bp, Homo sapiens
  misc_feature (3)..(3): n is a, c, g, or t
  misc_feature (22)..(22): n is a, c, g, or t
gangctagtacgagctgggtgnaatcggacgaggcagagttggtggctggacctcctgcgacttccgagttgcgatgctgtacttctctttgttttgggcggctcggcctctgcagagatgtgggcagctggtcaggatggccattcgggctcagcacagcaacgcagcccagactcagactggggaagcaaacaggggctggacaggccaggagagcctgtcggacagtgatcctgagatgtgggagttgctgcagagggagaaggacaggcagtgtcgtggcctggagctcattgcctcagagaacttctgcagccgagctgcgctggaggccctggggtcctgtctgaacaacaagtactcggagggttatcctggcaagagatactatgggggagcagaggtggtggatgaaattgagctgctgtgccagcgccgggccttggaagcctttgacctggatcctgcacagtggggagtcaatgtccagccctactccgggtccccagccaacctggccgtctacacagcccttctgcaacctcacgaccggatcatggggctggacctgcccgatgggggccatctcacccacggctacatgtctgacgtcaagcggatatcagccacgtccatcttcttcgagtctatgccctataagctcaaccccaaaactggcctcattgactacaaccagctggcactgactgctcgacttttccggccacggctcatcatagctggcaccagcgcctatgctcgcctcattgactacgcccgcatgagagaggtgtgtgatgaagtcaaagcacacctgctggcagacatggcccacatcagtggcctggtggctgccaaggtgattccctcgcctttcaagcacgcggacatcgtcaccaccactactcacaagactcttcgaggggccaggtcagggctcatcttctaccggaaaggggtgaaggctgtggaccccaagactggccgggagatcccttacacatttgaggaccgaatcaactttgccgtgttcccatccctgcaggggggcccccacaatcatgccattgctgcagtagctgtggccctaaagcaggcctgcacccccatgttccgggagtactccctgcaggttctgaagaatgctcgggccatggcagatgccctgctagagcgaggctactcactggtatcaggtggtactgacaaccacctggtgctggtggacctgcggcccaagggcctggatggagctcgggctgagcgggtgctagagcttgtatccatcactgccaacaagaacacctgtcctggagaccgaagtgccatcacaccgggcggcctgcggcttggggccccagccttaacttctcgacagttccgtgaggatgacttccggagagttgtggactttatagatgaaggggtcaacattggcttagaggtgaagagcaagactgccaagctccaggatttcaaatccttcctgcttaaggactcagaaacaagtcagcgcctggttttgatgagcattgaaggcacctgggaaatgaggcccacagactcaaagttactctccttccccctacctgggccagtgaaatagaaagcctttctattttttggtgcgggagggaagacctctcacttagggcaagagccaggtatagtctcccttcccagaatttgtaactgagaagatcttttctttttcctttttttggtaacaagacttagaaggagggcccaggcactttctgtttgaacccctgtcatgatcacagtgtcagagacgcgtcctctttcttggggaagttgaggagtgcccttcagagccagtagcaggcaggggtgggtaggcaccctccttcctgtttttatctaataaaatgctaacctgc

SEQ ID NO: 495578 - DNA, 1048 bp, Homo sapiens
gtcaccccttttgcctccatcctcaaagacctggctcttcaagtcatccgtcagctgccaagtgttctgtaaggaacatctacttcatctgggtgactcggagccagcgtcagtttgaatggctggctgacatcatccgagcaggctgcgaggagcaactgcatcaccaggacctggatgtctgtgcagcatctacaatacaatccatgcttggctgagatagttcgaacctcatggaccactgatgctgtacgatctgtgagcaggtacttccagtaagggttcttgaaccgcgcgtctattcgacaggccatgcgcttgccatcacccacgtttgcgcgtcctcgccactttgagcccttcttcaactcccatgccaggaggtccacccccaaggtccggaagatcggcggtgtctaggctgtggcccccactggacatgaccagaactaactgtgcgaaagacggccctgatcaagcatcatcaaccagtgcaggaaccgggacctcatcttctccccacccatttactgaggaacttactaaagcccctgaaccgtgcccgtgttctgcccactgaccccaaattagacgcaggacggtttctgaagccccaacaacctacatccttcatgcttccgtatccttatatagcttggcactgcctcaggcccttacatcctgaacttatccgcgagacttcctcaaacgccgtttgcttacccagcgttggcccagtaagttcaagtacaccattggtgctgggccttcaggggaccgccccagggaacccagcgaatgctgttcgtcagcgcatggacgcaaactgcgctgcgcgagccgacacgttgattcttaaggggggaccgtaaccaagcttgaacgcaaaggtcacgggcgaagcatcccctggaattctcggccaggcaaccagtggacagccccttcgtgcgtttccagaacacttcgagccaaatcacacttctcatacacctgagcgaccccttgactcgtgatcaacgctcacctactgctggcatgtgccctg

SEQ ID NO: 495579 - DNA, 1349 bp, Homo sapiens
  misc_feature (3)..(3): n is a, c, g, or t
  misc_feature (22)..(22): n is a, c, g, or t
gangctagtacgagctgggtgnaatcggacgaggcagagttggtggctggacctcctgcgacttccgagttgcgatgctgtacttctctttgttttgggcggctcggcctctgcagagatgtgggcagctggtcaggatggccattcgggctcagcacagcaacgcagcccagactcagactggggaagcaaacaggggctggacaggccaggagagcctgtcggacagtgatcctgagatgtgggagttgctgcagagggagaaggacaggcagtgtcgtggcctggagctcattgcctcagagaacttctgcagccgagctgcgctggaggccctggggtcctgtctgaacaacaagtactcggagggttatcctggcaagagatactatgggggagcagaggtggtggatgaaattgagctgctgtgccagcgccgggccttggaagcctttgacctggatcctgcacagtggggagtcaatgtccagccctactccgggtccccagccaacctggccgtctacacagcccttctgcaacctcacgaccggatcatggggctggacctgcccgatgggggccatctcacccacggctacatgtctgacgtcaagcggatatcagccacgtccatcttcttcgagtctatgccctataagctcaaccccaaaactggcctcattgactacaaccagctggcactgactgctcgacttttccggccacggctcatcatagctggcaccagcgcctatgctcgcctcattgactacgcccgcatgagagaggtgtgtgatgaagtcaaagcacacctgctggcagacatggcccacatcagtggcctggtggctgccaaggtgattccctcgcctttcaagcacgcggacatcgtcaccaccactactcacaagactcttcgaggggccaggtcagggctcatcttctaccggaaaggggtgaaggctgtggaccccaagactggccgggagatcccttacacatttgaggaccgaatcaactttgccgtgttcccatccctgcaggggggcccccacaatcatgccattgctgcagtagctgtggccctaaagcaggcctgcacccccatgttccgggagtactccctgcaggttctgaagaatgctcgggccatggcagatgccctgctagagcgaggctactcactggtatcaggtggtactgacaaccacctggtgctggtggacctgcggcccaagggcctggatggagctcgggctgagcgggtgctagagcttgtatccatcactgccaacgaacacctgggggatccttctagatcgaccgcagcagcaagtgcctgcccc

SEQ ID NO: 495580 - DNA, 338 bp, Homo sapiens
gtaatatattactaaattcataacagtttcagaatgtcttatcaagaaaaatagaggccgggcacagtggatcacgcctgtagtcccagcactttggaaggccgaggtgggcagatcgcttgaggtcaggagttcgagaccggcctggccaacatagtgaaaccccatctctactaaaaatacaaaaattagctgggcgtggtggtgggcgcctgtaatcccagctacttgggaggctgaggcaggagaatcgcttgaattcaggaggtagaggttgcagtgagccaagattgcgccactacactccagcccaggcaacagagtgagaactccgtctg

SEQ ID NO: 495581 - DNA, 1895 bp, Homo sapiens
  misc_feature (3)..(3): n is a, c, g, or t
  misc_feature (22)..(22): n is a, c, g, or t
gangctagtacgagctgggtgnaatcggacgaggcagagttggtggctggacctcctgcgacttccgagttgcgatgctgtacttctctttgttttgggcggctcggcctctgcagagatgtgggcagctggtcaggatggccattcgggctcagcacagcaacgcagcccagactcagactggggaagcaaacaggggctggacaggccaggagagcctgtcggacagtgatcctgagatgtgggagttgctgcagagggagaaggacaggcagtgtcgtggcctggagctcattgcctcagagaacttctgcagccgagctgcgctggaggccctggggtcctgtctgaacaacaagtactcggagggttatcctggcaagagatactatgggggagcagaggtggtggatgaaattgagctgctgtgccagcgccgggccttggaagcctttgacctggatcctgcacagtggggagtcaatgtccagccctactccgggtccccagccaacctggccgtctacacagcccttctgcaacctcacgaccggatcatggggctggacctgcccgatgggggccatctcacccacggctacatgtctgacgtcaagcggatatcagccacgtccatcttcttcgagtctatgccctataagctcaaccccaaaactggcctcattgactacaaccagctggcactgactgctcgacttttccggccacggctcatcatagctggcaccagcgcctatgctcgcctcattgactacgcccgcatgagagaggcctattcctggggcactgttggcctggacctgagaggaattcattcccacctgcagcccttaagactcctggcccagtctgtcagggctcatcttctaccggaaaggggtgaaggctgtggaccccaagactggccgggagatcccttacacatttgaggaccgaatcaactttgccgtgttcccatccctgcaggggggcccccacaatcatgccattgctgcagtagctgtggccctaaagcaggcctgcacccccatgttccgggagtactccctgcaggttctgaagaatgctcgggccatggcagatgccctgctagagcgaggctactcactggtatcaggtggtactgacaaccacctggtgctggtggacctgcggcccaagggcctggatggagctcgggctgagcgggtgctagagcttgtatccatcactgccaacaagaacacctgtcctggagaccgaagtgccatcacaccgggcggcctgcggcttggggccccagccttaacttctcgacagttccgtgaggatgacttccggagagttgtggactttatagatgaaggggtcaacattggcttagaggtgaagagcaagactgccaagctccaggatttcaaatccttcctgcttaaggactcagaaacaagtcagcgtctggccaacctcaggcaacgggtggagcagtttgccagggccttccccatgcctggttttgatgagcattgaaggcacctgggaaatgaggcccacagactcaaagttactctccttccccctacctgggccagtgaaatagaaagcctttctattttttggtgcgggagggaagacctctcacttagggcaagagccaggtatagtctcccttcccagaatttgtaactgagaagatcttttctttttcctttttttggtaacaagacttagaaggagggcccaggcactttctgtttgaacccctgtcatgatcacagtgtcagagacgcgtcctctttcttggggaagttgaggagtgcccttcagagccagtagcaggcaggggtgggtaggcaccctccttcctgtttttatctaataaaatgctaacctgc

SEQ ID NO: 495582 - DNA, 1115 bp, Homo sapiens
  misc_feature (3)..(3): n is a, c, g, or t
  misc_feature (22)..(22): n is a, c, g, or t
  misc_feature (973)..(974): n is a, c, g, or t
  misc_feature (996)..(996): n is a, c, g, or t
  misc_feature (1000)..(1000): n is a, c, g, or t
  misc_feature (1003)..(1003): n is a, c, g, or t
  misc_feature (1005)..(1005): n is a, c, g, or t
  misc_feature (1015)..(1015): n is a, c, g, or t
gangctagtacgagctgggtgnaatcggacgaggcagagttggtggctggacctcctgcgacttccgagttgcgatgctgtacttctctttgttttgggcggctcggcctctgcagagatgtgggcagctggtcaggatggccattcgggctcagcacagcaacgcagcccagactcagactggggaagcaaacaggggctggacaggccaggagagcctgtcggacagtgatcctgagatgtgggagttgctgcagagggagaaggacaggcagtgtcgtggcctggagctcattgcctcagagaacttctgcagccgagctgcgctggaggccctggggtcctgtctgaacaacaagtactcggagggttatcctggcaagagatactatgggggagcagaggtggtggatgaaattgagctgctgtgccagcgccgggccttggaagcctttgacctggatcctgcacagtggggagtcaatgtccagccctactccgggtccccagccaacctggccgtctacacagcccttctgcaacctcacgaccggatcatggggctggacctgcccgatgggggccatctcacccacggctacatgtctgacgtcaagcggatatcagccacgtccatcttcttcgagtctatgccctataagctcaaccccaaaactggcctcattgactacaaccagctggcactgactgctcgacttttccggccacggctcatcatagctggcaccagcgcctatgctcgcctcattgactacgcccgcatgagagaggtgtgtgatgaagtcaaagcacacctgctggcagacatggcccacatcagtggcctggtggctgccaaggtgattccctcgcctttcaagcacgcggacatcgtcaccaccactactcacaagactcttcgaggggccagtcagggtcatctctaccggaagggtgaaggctgtggacccannatggcggggatccttacatttngggncgntncattgcggtncatctggggggccccaacttatgtgtggtcgtgcttaaggggcccatgccgggtacggtgaatcgggaactgaaggcacgtttgtgggacggtggcgcag

SEQ ID NO: 495583 - DNA, 564 bp, Homo sapiens
  misc_feature (445)..(445): n is a, c, g, or t
aggagaatcgtttgaacccgggaggcagaggttgcagtgagccgagatcacgcaactgcacttcagcatggacaacaagagcgaaactctgtctcaaaaacaaataaattaataaagaaggacttcccattccttggtgctggcctgtaggcagtgagcaccctgtcgctgggtgcatttaagcaggggctgaaacactgcttgccaggaattccatgaagggactggtgttctggaagggggcccagttagcgttcagaggaagggccacagtgttttccaagtggactcactggggtgtaatcatcaagaccctctgacactttctcctagccttgttggtcatgttggggtgtggactggccttttctgggttgggtttggctgcagagatagcagccctgccaggagtagccgcatgtctttactgctttccacgtagganactttttaggagtggtgccaatggcaggaattttagcatggcctagatgaggtttgattgggggtaattgagccacccatgtccccagataagctacacatcgcctagtctgttattca

SEQ ID NO: 495584 - DNA, 84 bp, Homo sapiens
gaaaaaaggggggaattttttcccaaaatttttttgaaaaaaattggggggggggcggcccaaaaaaaggcccgggggcattta

SEQ ID NO: 495585 - DNA, 1982 bp, Homo sapiens
  misc_feature (3)..(3): n is a, c, g, or t
  misc_feature (22)..(22): n is a, c, g, or t
gangctagtacgagctgggtgnaatcggacgaggcagagttggtggctggacctcctgcgacttccgagttgcgatgctgtacttctctttgttttgggcggctcggcctctgcagagatgtgggcagctggtcaggatggccattcgggctcagcacagcaacgcagcccagactcagactggggaagcaaacaggggctggacaggccaggagagcctgtcggacagtgatcctgagatgtgggagttgctgcagagggagaaggacaggcagtgtcgtggcctggagctcattgcctcagagaacttctgcagccgagctgcgctggaggccctggggtcctgtctgaacaacaagtactcggagggttatcctggcaagagatactatgggggagcagaggtggtggatgaaattgagctgctgtgccagcgccgggccttggaagcctttgacctggatcctgcacagtggggagtcaatgtccagccctactccgggtccccagccaacctggccgtctacacagcccttctgcaacctcacgaccggatcatggggctggacctgcccgatgggggccatctcacccacggctacatgtctgacgtcaagcggatatcagccacgtccatcttcttcgagtctatgccctataagctcaacggctttagctgtttgtgtgtctgtccagcccaaaactggcctcattgactacaaccagctggcactgactgctcgacttttccggccacggctcatcatagctggcaccagcgcctatgctcgcctcattgactacgcccgcatgagagaggtgtgtgatgaagtcaaagcacacctgctggcagacatggcccacatcagtggcctggtggctgccaaggtgattccctcgcctttcaagcacgcggacatcgtcaccaccactactcacaagactcttcgaggggccaggtcagggctcatcttctaccggaaaggggtgaaggctgtggaccccaagactggccgggagatcccttacacatttgaggaccgaatcaactttgccgtgttcccatccctgcaggggggcccccacaatcatgccattgctgcagtagctgtggccctaaagcaggcctgcacccccatgttccgggagtactccctgcaggttctgaagaatgctcgggccatggcagatgccctgctagagcgaggctactcactggtatcaggtggtactgacaaccacctggtgctggtggacctgcggcccaagggcctggatggagctcgggctgagcgggtgctagagcttgtatccatcactgccaacaagaacacctgtcctggagaccgaagtgccatcacaccgggcggcctgcggcttggggccccagccttaacttctcgacagttccgtgaggatgacttccggagagttgtggactttatagatgaaggggtcaacattggcttagaggtgaagagcaagactgccaagctccaggatttcaaatccttcctgcttaaggactcagaaacaagtcagcgtctggccaacctcaggcaacgggtggagcagtttgccagggccttccccatgcctggttttgatgagcattgaaggcacctgggaaatgaggcccacagactcaaagttactctccttccccctacctgggccagtgaaatagaaagcctttctattttttggtgcgggagggaagacctctcacttagggcaagagccaggtatagtctcccttcccagaatttgtaactgagaagatcttttctttttcctttttttggtaacaagacttagaaggagggcccaggcactttctgtttgaacccctgtcatgatcacagtgtcagagacgcgtcctctttcttggggaagttgaggagtgcccttcagagccagtagcaggcaggggtgggtaggcaccctccttcctgtttttatctaataaaatgctaacctgc

SEQ ID NO: 495586 - DNA, 580 bp, Homo sapiens
  misc_feature (461)..(461): n is a, c, g, or t
ttttgagacagagtcttgcactgtcgcccaggcaggagtgcaatggcgcgatctttgctcactgcaacttccagctcccgggttcaagccgttctcctgcctcagcctcccgagtagctgggattacaggcacccgccaccacgcccggctaatttttgtatttttagtggggatggggctccacgatgttagccaggctggtctcaaactcctgacctcgtgatctgcctgccttggccttccagaatgctgggattacaggcataagccactgtgcccagccagcaactggcaattaatacaggccttgtgtttccaacactgtcttctgtacaaacctgcctgtcctatgtaccattggaatgctggtctctgatgcgtaacggtggaggaaagttggtgcagagatagcagccctgccaggagtagccgcatgtctttactgctttccacgtagganactttttaggagtggtgccaatggcaggaattttagcatggcctagatgaggtttgattgggggtaattgagccacccatgtccccagataagctacacatcgcctagtctgttattca

SEQ ID NO: 495587 - DNA, 1000 bp, Homo sapiens
  misc_feature (3)..(3): n is a, c, g, or t
  misc_feature (22)..(22): n is a, c, g, or t
  misc_feature (923)..(923): n is a, c, g, or t
gangctagtacgagctgggtgnaatcggacgaggcagagttggtggctggacctcctgcgacttccgagttgcgatgctgtacttctctttgttttgggcggctcggcctctgcagagatgtgggcagctggtcaggatggccattcgggctcagcacagcaacgcagcccagactcagactggggaagcaaacaggggctggacaggccaggagagcctgtcggacagtgatcctgagatgtgggagttgctgcagagggagaaggacaggcagtgtcgtggcctggagctcattgcctcagagaacttctgcagccgagctgcgctggaggccctggggtcctgtctgaacaacaagtactcggagggttatcctggcaagagatactatgggggagcagaggtggtggatgaaattgagctgctgtgccagcgccgggccttggaagcctttgacctggatcctgcacagtggggagtcaatgtccagccctactccgggtccccagccaacctggccgtctacacagcccttctgcaacctcacgaccggatcatggggctggacctgcccgatgggggccatctcacccacggctacatgtctgacgtcaagcggatatcagccacgtccatcttcttcgagtctatgccctataagctcaaccccaaaactggcctcattgactacaaccagctggcactgactgctcgacttttccggccacggctcatcatagctggcaccagcgcctatgctcgcctcattgactacgcccgcatgagagaggtgtgtgatgaagtcaaagcacacctgctggcagacatggcccacatcagtggcctggtggctgcaaggtgatcctcgcctttaagcacgcggacttgtccccatattccagatcttcggggcaggcggccnctctacggagggggaggtgggcccgatgcgggacctccttggcaacttccttcctcgggggcccttgtgtgaggccg

SEQ ID NO: 495588 - DNA, 501 bp, Homo sapiens
aggagaatcgtttgaacccgggaggcagaggttgcagtgagccgagatcacgcaactgcacttcagcatggacaacaagagcgaaactctgtctcaaaaacaaataaattaataaagaaggacttcccattccttggtgctggcctgtaggcagtgagcaccctgtcgctgggtgcatttaagcaggggctgaaacactgcttgccaggaattccatgaagggactggtgttctggaagggggcccagttagcgttcagaggaagggccacagtgttttccaagtggactcactggggtgtaatcatcaagaccctctgacactttctcctagccttgttggtcatgttggggtgtggactggccttttctgggttgggtttggctgcagaaggtcttgaataacagactaggcgatgtgtagcttattctggggacatgggtggctcaattaccccctccctcatctaggccatgctatcctgccattggcaccactcct

SEQ ID NO: 495589 - DNA, 466 bp, Homo sapiens
cggtcatgatccaagagagaaagaagaccaggtcttaagtcacgtaaatgtgcagctttgagcttcttattcattttatttaaaaaggtcattccccggtgagttgatctggttataaaaagctgctcgggcagcgacatctggttgaaacactgctgtagcagggtccacaggctaagtagggggcaagggctcttgtaagtcatcaaagtacaagggttcccctggacacgttggtaaccaagctagggttaaagtgcacgatcgtgtgcaaacactaggaccggtcagcagagctctgagaagggctgggttcagttccatcctcggagctactgtctatgtccggctccattgctgtctcctcatcatccagctgttactagtgaagttgtttagctcaagaagcccactgggctccaccagcacattggagctggagtgacaaggaatagcatactgagga

SEQ ID NO: 495590 - DNA, 719 bp, Homo sapiens
  misc_feature (409)..(409): n is a, c, g, or t
tcagttatcaaatctatttttaatcttctataacaagtcacctttttcttcccacctatttccaatctggcgcctaggggtacagtgaaaatgatggcctcctcttctttcccgtggagtctcgtgaggtattattgtggcaaacagccagtctccacccactgtggcgtgagagaggaacttatagggaaccacagcagaaagtttcaagggctcatatagtgtgcccgtgcagcgtgcagggaattagccctcacttctcgaggtgtgggtgagtggggttaggagtgcggggcgagagaacgaggggccctaggaaaaagaaagacagagtggttcacgagtggagcccctctcgcgtggagcgtggcagaaagttctctcgcgtggtgtgtgtgtcgtgagaggncgagagacaactaggaagccatacagcgggagtctcatagaggccaagagggttaactcttttctaaaatatagaacgacatataggatctcaggggagagccgtgggaacccctcaactatagacccagtgtgtatataaccttctcacaggcgcccccacccgcggtgtgtgtacgcgaccaaagagggcgccagaaaagtgtggcaacagtgtgaagcggtctcgggggctatgccgtggccgaggccccctctccttttcttcccgcgcagagtcgtttcaggggggacagggcccccctggggtt

SEQ ID NO: 495591 - DNA, 1981 bp, Homo sapiens
  misc_feature (3)..(3): n is a, c, g, or t
  misc_feature (22)..(22): n is a, c, g, or t
gangctagtacgagctgggtgnaatcggacgaggcagagttggtggctggacctcctgcgacttccgagttgcgatgctgtacttctctttgttttgggcggctcggcctctgcagagatgtgggcagctggtcaggatggccattcgggctcagcacagcaacgcagcccagactcagactggggaagcaaacaggggctggacaggccaggagagcctgtcggacagtgatcctgagatgtgggagttgctgcagagggagaaggacaggcagtgtcgtggcctggagctcattgcctcagagaacttctgcagccgagctgcgctggaggccctggggtcctgtctgaacaacaagtactcggagggttatcctggcaagagatactatgggggagcagaggtggtggatgaaattgagctgctgtgccagcgccgggccttggaagcctttgacctggatcctgcacagtggggagtcaatgtccagccctactccgggtccccagccaacctggccgtctacacagcccttctgcaacctcacgaccggatcatggggctggacctgcccgatgggggccatctcacccacggctacatgtctgacgtcaagcggatatcagccacgtccatcttcttcgagtctatgccctataagctcaacggctttagctgtttgtgtgtctgtccagcccaaaaatggctcattgactacaaccaggtggcactgactgctcgacttttccggccacggctcatcatagctggcaccagcgcctatgctcgcctcattgactacgcccgcatgagagaggtgtgtgatgaagtcaaagcacacctgctggcagacatggcccacatcagtggcctggtggctgccaaggtgattccctcgcctttcaagcacgcggacatcgtcaccaccactactcacaagactcttcgaggggccaggtcagggctcatcttctaccggaaaggggtgaaggctgtggaccccaagactggccgggagatcccttacacatttgaggaccgaatcaactttgccgtgttcccatccctgcaggggggcccccacaatcatgccattgctgcagtagctgtggccctaaagcaggcctgcacccccatgttccgggagtactccctgcaggttctgaagaatgctcgggccatggcagatgccctgctagagcgaggctactcactggtatcaggtggtactgacaaccacctggtgctggtggacctgcggcccaagggcctggatggagctcgggctgagcgggtgctagagcttgtatccatcactgccaacaagaacacctgtcctggagaccgaagtgccatcacaccgggcggcctgcggcttggggccccagccttaacttctcgacagttccgtgaggatgacttccggagagttgtggactttatagatgaaggggtcaacattggcttagaggtgaagagcaagactgccaagctccaggatttcaaatccttcctgcttaaggactcagaaacaagtcagcgtctggccaacctcaggcaacgggtggagcagtttgccagggccttccccatgcctggttttgatgagcattgaaggcacctgggaaatgaggcccacagactcaaagttactctccttccccctacctgggccagtgaaatagaaagcctttctattttttggtgcgggagggaagacctctcacttagggcaagagccaggtatagtctcccttcccagaatttgtaactgagaagatcttttctttttcctttttttggtaacaagacttagaaggagggcccaggcactttctgtttgaacccctgtcatgatcacagtgtcagagacgcgtcctctttcttggggaagttgaggagtgcccttcagagccagtagcaggcaggggtgggtaggcaccctccttcctgtttttatctaataaaatgctaacctgc

SEQ ID NO: 495592 - DNA, 234 bp, Homo sapiens
  misc_feature (46)..(46): n is a, c, g, or t
  misc_feature (97)..(97): n is a, c, g, or t
gacacttacgggtgattgtactctgtacctcgtgagtaccgagcancagagcaacagtctagcgtatgtgaaacgggttgacctgcgatctctgaangacttaggactttgagtcctaccgcactttgagaacttcactttaaagatacacttgtctatgatgtgtatcgatggagtaaaagcataccatgtgaaacttaaggcaccaggtgaaataatcttcgtaagttgtct

SEQ ID NO: 495593 - DNA, 1893 bp, Homo sapiens
  misc_feature (3)..(3): n is a, c, g, or t
  misc_feature (22)..(22): n is a, c, g, or t
gangctagtacgagctgggtgnaatcggacgaggcagagttggtggctggacctcctgcgacttccgagttgcgatgctgtacttctctttgttttgggcggctcggcctctgcagagatgtgggcagctggtcaggatggccattcgggctcagcacagcaacgcagcccagactcagactggggaagcaaacaggggctggacaggccaggagagcctgtcggacagtgatcctgagatgtgggagttgctgcagagggagaaggacaggcagtgtcgtggcctggagctcattgcctcagagaacttctgcagccgagctgcgctggaggccctggggtcctgtctgaacaacaagtactcggagggttatcctggcaagagatactatgggggagcagaggtggtggatgaaattgagctgctgtgccagcgccgggccttggaagcctttgacctggatcctgcacagtggggagtcaatgtccagccctactccgggtccccagccaacctggccgtctacacagcccttctgcaacctcacgaccggatcatggggctggacctgcccgatgggggccatctcacccacggctacatgtctgacgtcaagcggatatcagccacgtccatcttcttcgagtctatgccctataagctcaaccccaaaactggcctcattgactacaaccagctggcactgaaactgactgtcgacttttccggcacggtcatcatagctggcaccacagcgcctatgctcgcctcattgactacgcccgcatgagagaggtgtgtgatgaagtcaaagcacacctgctggcagacatggcccacatcagtggcctggtggctgccaaggtgattccctcgcctttcaagcacgcggacatcgtcaccaccactactcacaagactcttcgaggggccagttacacatttgaggaccgaatcaactttgccgtgttcccatccctgcaggggggcccccacaatcatgccattgctgcagtagctgtggccctaaagcaggcctgcacccccatgttccgggagtactccctgcaggttctgaagaatgctcgggccatggcagatgccctgctagagcgaggctactcactggtatcaggtggtactgacaaccacctggtgctggtggacctgcggcccaagggcctggatggagctcgggctgagcgggtgctagagcttgtatccatcactgccaacaagaacacctgtcctggagaccgaagtgccatcacaccgggcggcctgcggcttggggccccagccttaacttctcgacagttccgtgaggatgacttccggagagttgtggactttatagatgaaggggtcaacattggcttagaggtgaagagcaagactgccaagctccaggatttcaaatccttcctgcttaaggactcagaaacaagtcagcgtctggccaacctcaggcaacgggtggagcagtttgccagggccttccccatgcctggttttgatgagcattgaaggcacctgggaaatgaggcccacagactcaaagttactctccttccccctacctgggccagtgaaatagaaagcctttctattttttggtgcgggagggaagacctctcacttagggcaagagccaggtatagtctcccttcccagaatttgtaactgagaagatcttttctttttcctttttttggtaacaagacttagaaggagggcccaggcactttctgtttgaacccctgtcatgatcacagtgtcagagacgcgtcctctttcttggggaagttgaggagtgcccttcagagccagtagcaggcaggggtgggtaggcaccctccttcctgtttttatctaataaaatgctaacctgc

SEQ ID NO: 495594 - DNA, 246 bp, Homo sapiens
  misc_feature (56)..(56): n is a, c, g, or t
  misc_feature (65)..(65): n is a, c, g, or t
  misc_feature (129)..(130): n is a, c, g, or t
  misc_feature (132)..(132): n is a, c, g, or t
  misc_feature (202)..(202): n is a, c, g, or t
  misc_feature (217)..(217): n is a, c, g, or t
  misc_feature (240)..(240): n is a, c, g, or t
gagagtggggttagctctgcctagcgctacacaagaaaacctccctccagtaaatnggtgtgggnggtccgcttttggccatcatcgcacccccccggtcactgggcgttgttgccgggcacttgtttnncnggctgggtgtgtaccgtaaccgtgggtcctctgacaagtgcctaactcggcccaccccttagggtgtgtntcatcgaagtgtagngaatggtggaacgtttgtttgtngtgtgc

SEQ ID NO: 495595 - DNA, 155 bp, Homo sapiens
gacagtcgacatctacaggatccccctattttccaataagggaggaaagagttactgtgcactagtggattggtgagcttactttgcttctaggccaaggttatagaaaggtcgtctcatgggaggataccgtagcgcgaacttcgctaatcatg

SEQ ID NO: 495596 - DNA, 1535 bp, Homo sapiens
  misc_feature (3)..(3): n is a, c, g, or t
  misc_feature (22)..(22): n is a, c, g, or t
gangctagtacgagctgggtgnaatcggacgaggcagagttggtggctggacctcctgcgacttccgagttgcgatgctgtacttctctttgttttgggcggctcggcctctgcagagatgtgggcagctggtcaggatggccattcgggctcagcacagcaacgcagcccagactcagactggggaagcaaacaggggctggacaggccaggagagcctgtcggacagtgatcctgagatgtgggagttgctgcagagggagaaggacaggcagtgtcgtggcctggagctcattgcctcagagaacttctgcagccgagctgcgctggaggccctggggtcctgtctgaacaacaagtactcggagggttatcctggcaagagatactatgggggagcagaggtggtggatgaaattgagctgctgtgccagcgccgggccttggaagcctttgacctggatcctgcacagtggggagtcaatgtccagccctactccgggtccccagccaacctggccgtctacacagcccttctgcaacctcacgaccggatcatggggctggacctgcccgatgggggccatctcacccacggctacatgtctgacgtcaagcggatatcagccacgtccatcttcttcgagtctatgccctataagctcaaccccaaaactggcctcattgactacaaccagctggcactgactgcaggttctgaagaatgctcgggccatggcagatgccctgctagagcgaggctactcactggtatcaggtggtactgacaaccacctggtgctggtggacctgcggcccaagggcctggatggagctcgggctgagcgggtgctagagcttgtatccatcactgccaacaagaacacctgtcctggagaccgaagtgccatcacaccgggcggcctgcggcttggggccccagccttaacttctcgacagttccgtgaggatgacttccggagagttgtggactttatagatgaaggggtcaacattggcttagaggtgaagagcaagactgccaagctccaggatttcaaatccttcctgcttaaggactcagaaacaagtcagcgtctggccaacctcaggcaacgggtggagcagtttgccagggccttccccatgcctggttttgatgagcattgaaggcacctgggaaatgaggcccacagactcaaagttactctccttccccctacctgggccagtgaaatagaaagcctttctattttttggtgcgggagggaagacctctcacttagggcaagagccaggtatagtctcccttcccagaatttgtaactgagaagatcttttctttttcctttttttggtaacaagacttagaaggagggcccaggcactttctgtttgaacccctgtcatgatcacagtgtcagagacgcgtcctctttcttggggaagttgaggagtgcccttcagagccagtagcaggcaggggtgggtaggcaccctccttcctgtttttatctaataaaatgctaacctgc

SEQ ID NO: 495597 - DNA, 865 bp, Homo sapiens
  misc_feature (3)..(3): n is a, c, g, or t
  misc_feature (22)..(22): n is a, c, g, or t
  misc_feature (722)..(722): n is a, c, g, or t
  misc_feature (725)..(725): n is a, c, g, or t
  misc_feature (727)..(727): n is a, c, g, or t
  misc_feature (730)..(730): n is a, c, g, or t
  misc_feature (744)..(744): n is a, c, g, or t
  misc_feature (747)..(747): n is a, c, g, or t
  misc_feature (759)..(759): n is a, c, g, or t
gangctagtacgagctgggtgnaatcggacgaggcagagttggtggctggacctcctgcgacttccgagttgcgatgctgtacttctctttgttttgggcggctcggcctctgcagagatgtgggcagctggtcaggatggccattcgggctcagcacagcaacgcagcccagactcagactggggaagcaaacaggggctggacaggccaggagagcctgtcggacagtgatcctgagatgtgggagttgctgcagagggagaaggacaggcagtgtcgtggcctggagctcattgcctcagagaacttctgcagccgagctgcgctggaggccctggggtcctgtctgaacaacaagtactcggagggttatcctggcaagagatactatgggggagcagaggtggtggatgaaattgagctgctgtgccagcgccgggccttggaagcctttgacctggatcctgcacagtggggagtcaatgtccagccctactccgggtccccagccaacctggccgtctacacagcccttctgcaacctcacgaccggatcatggggctggacctgcccgatgggggccatctcacccacggctacatgtctgacgtcaagcggatatcagccacgtccatcttcttcgagtctatgccctataagctcaaccccaaaactggcctcattgactacaaccagctggcactgatgactgtcgatttntcngncanggtcatcatagctnggnacagggctatgntcgctcattgataagccgcattagagagttggttgtgaagcaagagaactgttgggaatgtccaatagtgcttggggggccaggttcccgcttaagacggcttgga

SEQ ID NO: 495598 - DNA, 439 bp, Homo sapiens
  misc_feature (32)..(33): n is a, c, g, or t
  misc_feature (45)..(45): n is a, c, g, or t
  misc_feature (65)..(65): n is a, c, g, or t
  misc_feature (72)..(72): n is a, c, g, or t
  misc_feature (110)..(110): n is a, c, g, or t
tcaattccaaagcccagtgaacgggatactgnncagatgagctancccggcccattaatgttaanctccctncatcaatataagacttgggcttagagttaggtctgtcnctacaccccacagaaagattcgggaacacaaattttacaaacacacaaagctagggctttcccaggcttttcattgtccttaaattgcctaaaattaaactgtcctttgggaagtttttaaatagcaaatgttttacacctcttgaaatttgcaacattttctttcatatatatgtgtatatatgtgtgtgtgtgtgtccctcatgtcttctaatggaaaagaaaaatgaagttcaattatttgtttttctttatccagtatatatatgtatattttctgattgtgttgtttttctgtctaaaagtttggtcatgcttcaaaaaaaaaa

SEQ ID NO: 495599 - DNA, 661 bp, Homo sapiens
ggggtcagaaataagattttttgagttacaaataaataagatcagactctgaaaaaaaaaaaaaaaaaaaaaaaaaaaaaaaaaaaaaaaaaaaaaaaaaaaaaaaaaaaaaaaaaaaaaaaaaaaaaaaaaaaaaaaaaaaaaaaaaaaaaaaaaaaaaaaaaaaaaaaataaaaaaaaaaaaaaaaaaaaaaaaaaaaaaattttgggccccttggccccaagtttttttaaacttggaaaattttttctttggggcccaatttggggcttttttggcaaattccccctttggggggggtttttaaaaataaggggccgggtttttaaaacgggttttggggaaaaccccgggggttcccccatttaaaccctttggaaaaaatcccctttttcccagggggggtaattcaaaaagggccccccccgggggccttttcaaaaagtggcgcacccttaaggggaatgggaattttggggggttaattttttggaaaaaacgcgggaaaatttttggtaaaacccctcttttttaaaccaatgggcccaattgggaaaacccccttttaaattaaaaagattccccccaatggggttaaggtttttcccttttttgaacaaagggccctttttttagggggcctttcccccctggggggcc

SEQ ID NO: 495600 - DNA, 121 bp, Homo sapiens
agcgctgagcatactggattttcttaagaaatgaggaaaagtgcaagtgatctcagtacggtgggggaaaacaaaaattaagaaacaagacaagtggcacctggccactgtgctgccttaa

SEQ ID NO: 495601 - DNA, 281 bp, Homo sapiens
gtaccacgagtggagtcatgtccccgtacgagtaccattcaggggtcaaccactctgtgtacagcaacgtgctggtccagaacagccgtgcgctttgttgctgacctggcccagtgacctgggtcttcccatccccagccagtggctggcggtggctgacaagatcaaggtagccctttgacgtggatgcatgaacttccacccggtagttcgactgggtactgagcctggcgaggtggtgaagcatggcagacgtcgtgctcctggtgacacccctcgtg

SEQ ID NO: 495602 - DNA, 267 bp, Homo sapiens
aacgaaggcgtttgaagtgagtgatgttgtttattctattcacttagcaaagcctgaagttagggattttattcgaagattctcccaagagcatgggtttttaattacccataaaataacggaagaactggtaattcctgctcagttcttctttcatagaaaaaggttagaaagattaaagttgatatctatcgcttttctaggttttttaatgtcacccaggagttagcccgacttttcttgtctgtggtatcggaggctcccttc

SEQ ID NO: 495603 - DNA, 1072 bp, Homo sapiens
  misc_feature (709)..(709): n is a, c, g, or t
  misc_feature (818)..(818): n is a, c, g, or t
ggttgcattcctatcagccacttgtgtagctatctccgctaaacttgtagtgaatgtctctccgtgaacagttgctggtctaatgacgactccgctgctgcctctgtgttcacaagacaaaggctgcttatgtgccaatggctgagcctcctagaatattagacactgttatgcaggtatggatggagaagactgactgtctgtgattcctcttcgtattaaaccctgctcttgatgttactgcctcttgatgctgaccaacattagattagtcatagcattcctagttgcactaagcgttggatagaagtatctgacacactacaagatggcaggatgcatctcgtgcctggcttcatgtgctactgtctcgactttgtgttacttttatattttggaatcaaactattacacactaaaagaatatactaccggcatgagacacatgcgttggacccagtgtagaccaatttacccgttctgtgcgtaagtaaagagaaccacgaggattactttcgaccaatgtgctgtcatgggtagaatctagagcagatactttaaaagaggagacctgagtttacagagacactactacaggtttccagagggcacgccttttcataactttcaatttttaatagaagatcaaaaggcgtatgtccctattcagtacaagggaataccatccgtctgctaaaaagtctcaacncttgtcgcacttagataatggagacgcgagattgcgatagtaaaggaattcgaaggacctttttcggaagggatcgtaaagttctcaaggagccacatttgcccatgcntccggaacatggcaccaagaaaaatcattgtgcagtaacaagttaggttggacctcgaagttatttgtgcctcggtcacacagtctttcgggttatgatcgcagtagcccaccttcaaagacgctctggaaatttgttcgcaaaaacacgggaggacctaacagcggaaaagttgaatatatctttccccgaaagtgcaaggaaaaggtagataggcggacgtctggaggccttgcttaataaagtgatagcca

SEQ ID NO: 495604 - DNA, 91 bp, Homo sapiens
gcaactacaaacacacctcggagcagagccatggcggctgctgggtcgtcggcggcgcgggtctgtggtgtgggggacgctgagcggccgc

SEQ ID NO: 495605 - DNA, 185 bp, Homo sapiens
cgccacatgtcatggccacagaaggaagcagtagggcctccttccgtgccctgcctgcagctggcttccacctgggacgtgcctgctgcttcctgagagcccggctctccctccagtacttctgtttgtgcccttctgctttccccatttcctttcacaggttattagccggttcttttgggcct

SEQ ID NO: 495606 - DNA, 178 bp, Homo sapiens
acccccaggttcctgaccatgaccaccttctgtctgaagaggagctgcatgaatgatactctggcaatcatctacacaggaccaaacgcaacaggcgccctggcaccgttgaggccttagttgaactctgctagaacatgacttagtagcccagtttacagataaggaagctgctcct

SEQ ID NO: 495607 - DNA, 334 bp, Homo sapiens
aaaaaattaaactatgtaagttcataattagaaccaatattaaaaatgaaagtaaagcaaggcactcatccagtaatcccagcactttgggaggctgagacaggaagatcacttgaagccaggagttcgagaccagcttagacaacaaagtgagaccctgtctctaaaaaacattttaaaaagttacctgggtggcatagtggcatgttcctgtagtcccagttactcagaaggccaaagtgggaggatcgcttgagcccagcagttcaaggctgtagtgagctatgattacgtcactgtactccagcctgggcaacagaccaagacccaatta

SEQ ID NO: 495608 - DNA, 839 bp, Homo sapiens
ggacagtactttatggaacaactgggaggttccctggcatccggcaggagtggcttggccaacccctggtttaccaggagggggcaccgtgaggggctctgtggcattcccctttatgtttcgccccttcttcgccgcgtccttccccttgccccccccaccccactccagcgaacacctttgggtttgcccgcactttttttacggcttcgggcttttttccccgagagatatttggggccccctgtagagcaccccgctgggtgagccgtcttatatttcaccacacggttgagggaacctgtcttccgtcctgtaggtcttttctataagagcattatgccccccctaatggatcacattgggtaaacccgtcacatggtggagtcgccgtaaatcacccggtttccccgctcaaccccttttgtctaagatctatttgagggaaggggaatagtgggagaggaggaacccctttgagtcccgaatacacaccccactatgtctttaagcacattgttgaagtatgagaactggaatacattcacacacttatatccctgaggcttgtgatctgagtaattagccggtatgatgctgcgagctggagaaatagaaagtatataaaaattcaagggttatatgtgccacattattttttggccctgttcatgattttaagttttcacgtgtccgtgtacaaatagaatttgtaaagttgtcatttcccatatttaaattgtggaaaattatttagaaactttaaaatttttacccgcctttttaaaaaggacacctcccttttttgtattgtaaaaaatttcacttttaacctttta

SEQ ID NO: 495609 - DNA, 956 bp, Homo sapiens
tgcgcacaattttggggggggcccccccccgtgcgccggggtgggtgttctcccgcggtcgcagggggggtggtgcccccgcggccgtagttcttttctgcagacgcggcgtgtttgtctcttctcgccccccccccggggtgtggttgttggtccataccagggggccccccacagggcgggttgctcaagcgggtctctcctcgctggggctggcgtcgttgaaactacacgagcggagtgggtggttttgttcgcgcagaagttgtccagctcgttcacatgcggtgtgttgtgtatggctgcgccccccgcgcgctgggcagcatcaaccccgcgtgggttgcggcggcactctcgtttgtcgctgccacgacggatgtgcgttgtggtcgcgctcgtcacaagttgagtgtgtttctctcctctctctctgtctgcgcccccccccccgcgaggaggggtgtgttgtttgtccccctctcttctcttctgtcgcgccggcgtggtgaacccctctctcttcggaggggaggtgtaatctgttggggagaaataatagtgggggcgcgcccccccatgaagaagatgttctcgggcgggtagttttgaggcgccctgctcttctcgaggaggggtggggattatttggcgtttgctgctgagataagacgccagcacattgttgtctggtgcgcagaagggtttgttgaggggaagacgcaacccagcgactgcttgctatcatcagagaggaggaggaacagggaggcaggtggttgttttcaacgaggaactcctctctctcctccctcgccgcccccccccccaacggggggggggggttttttctccccccccccccccttttcctcccccaacccctgtcctttttttttttcccccgggggggttttttcaaaaaagaaaaaaggggaggcccctccttttaaata

SEQ ID NO: 495610 - DNA, 1102 bp, Homo sapiens
ggcagggcggactggtgacagccgcaacggcagcccataggtccttgtggcgtggacctcttccagacgctatgcttgcctccccccagtgagtgagggatgagtgggcctgaggcgaggcatcgcacggaagatgctagcgagtcgactccggagaccgaggactctggctgatctccgtgacgagtgaatggtacagccatccattggacgtcgctctggggcaagtaccctgtagcaagtgttatcggaccacgttcaatacggtgcgagctgagacctccagcgaccatggtgctatcccagctagctttgaagcaccccatgaccaggttctcgttatcggagacccgggctctcccaggaggattgccctcgtgacgaaggcccgacagcatttgcggacacttgagttgaggcggggcttttcatggcgcaccaaattgtgacctttactagcccgaggttctaacccggatccagtacgaagtttccaaacgccaactagatttatcatttcacgttgttgtgcccgggtgcgagcacaattgaaccccacttggcctagcgcgagcgtataagtgcccaacaccgctgactttgtcacagtggtttcccccttaaggtaagtcgcacggtgggacgtgacattgtcattgggcctcaacagaaacaggcaccatgagcgtgcatgcgaagggaaggggactgtaccgggggtagcaacgtaggcgtctccttaggcgtcgcccgcttgaggcacggagttactgagcgcacccgaagtgggcaaggggacctccaaagtcgaaggacgttcggttcagttggccccttgagcgccgttggattcaccgcgttggcgtttcgataccggcccacgagggagaggccctgtgcgaaggcttccttaagcagggccacgagacgaagaacctcttggggccgcagtgccacatagcggataggcgttgtcaccatcctggaagccaagttgggttgacacacgtgcagaccgaagcgcggaaggccatcgcaagttgcaccgcgtgttgcacttcccttgacgatgtaaggccggtcccttggaagcgcacctttc

SEQ ID NO: 495611 - DNA, 937 bp, Homo sapiens
  misc_feature (18)..(18): n is a, c, g, or t
  misc_feature (61)..(61): n is a, c, g, or t
  misc_feature (74)..(75): n is a, c, g, or t
  misc_feature (77)..(77): n is a, c, g, or t
  misc_feature (89)..(90): n is a, c, g, or t
  misc_feature (94)..(95): n is a, c, g, or t
  misc_feature (108)..(108): n is a, c, g, or t
  misc_feature (118)..(118): n is a, c, g, or t
  misc_feature (121)..(121): n is a, c, g, or t
  misc_feature (123)..(123): n is a, c, g, or t
  misc_feature (127)..(127): n is a, c, g, or t
  misc_feature (129)..(129): n is a, c, g, or t
  misc_feature (133)..(134): n is a, c, g, or t
  misc_feature (145)..(145): n is a, c, g, or t
  misc_feature (148)..(148): n is a, c, g, or t
  misc_feature (158)..(158): n is a, c, g, or t
  misc_feature (166)..(166): n is a, c, g, or t
  misc_feature (177)..(177): n is a, c, g, or t
  misc_feature (179)..(179): n is a, c, g, or t
  misc_feature (187)..(187): n is a, c, g, or t
  misc_feature (189)..(189): n is a, c, g, or t
  misc_feature (193)..(194): n is a, c, g, or t
  misc_feature (196)..(196): n is a, c, g, or t
  misc_feature (233)..(233): n is a, c, g, or t
  misc_feature (235)..(235): n is a, c, g, or t
  misc_feature (239)..(239): n is a, c, g, or t
  misc_feature (261)..(261): n is a, c, g, or t
  misc_feature (272)..(272): n is a, c, g, or t
  misc_feature (276)..(276): n is a, c, g, or t
  misc_feature (299)..(300): n is a, c, g, or t
  misc_feature (303)..(303): n is a, c, g, or t
  misc_feature (329)..(329): n is a, c, g, or t
  misc_feature (855)..(855): n is a, c, g, or t
  misc_feature (932)..(932): n is a, c, g, or t
tcattttattatcattgntattactaataaatcaatagaaattgaataacaaaggaaaaanctcaagacaaatnncnccccccctgccnntccnnacacatgcccacncccacatccnccncncccncncacnnccccctcccantcngtcctacggnacaaatanttacacaaaantntacaaaangngggnngnggggcccagcggtgtggggggcggggggggggggggngnaggncaccagcgtctccacgctaagngtacttgtggnttcntcctcttcatttgggccaaaagnnccnggggggtccagcatcctctgctcagnctcagtgaggccaaacgacgtattgtcatagaaggcaaactcagggtgagtggggaagctttgacacttgtcttttctacactgagaagggctcagagaactgaccctctggtagttatctttgggggatatgggagaagactgcttccttgagacactcttgtgactgggggacggtccccgacgagctctgtggggctctgttctctcaattccggccactaatcctgcctggtgatccccaaggtctggtttcctcaagggctgccccaaagtgtaggatttagggagagggtttaatggaccacgggttccacttgcctcttggaaatgctccagtttttcaggaaacaggtgggcacctcgactctgaggcctaaatctgtcctctgcctgctcgcaggtccgcgtcctagagctgtaggcaggggcctgccgtgggagtcagagtggacatgctcctctctcggaacggccgggcctgcctggcttcatggaaactcgctgtcctcctgaaatgggcgtncctggcatggctcctttcggacgggccccctctgctgcccacgtgccttgcctgtaacttgcggatcagagtctggntgggg

SEQ ID NO: 495612 - DNA, 344 bp, Homo sapiens
  misc_feature (105)..(106): n is a, c, g, or t
  misc_feature (114)..(114): n is a, c, g, or t
  misc_feature (120)..(120): n is a, c, g, or t
ttgtttctcgtgagctgagtctagaggatcccgatgcgtcctgtgcatctggctggactggtctgggagtagctgagtacctcagcggtggtctggtggacctgnncgcgggangagatnaccttgccatcctggacctcttccacaatggtacgcacctgacgggtggtcaccggttctttcttgtactgagtcaggtgggcatcctctccctccagcagcggcggtaggtggcaatctcctgctccaccgcgtcttcacatccagcaggattttgtattcctgttctgctgctccatctcgcaacaaagtgggccaagctgaacctccagtgctgccaatca

SEQ ID NO: 495613 - DNA, 135 bp, Homo sapiens
cggagggagatcagactcagaggttcactggagtgaacccataggttcaaataggtgttgtagcttcttcgccattcgtcaaatcttcaatggaacctttgtgaagctcatcaaggcttcgattaagatgctgag

SEQ ID NO: 495614 - DNA, 380 bp, Homo sapiens
  misc_feature (141)..(142): n is a, c, g, or t
  misc_feature (150)..(150): n is a, c, g, or t
  misc_feature (156)..(156): n is a, c, g, or t
tgcgacttttctgggaacgctttacttgggctgggaatcctaggccgtattactgtggggcagatggcggtctgcctccctggcctcctgggctgccggccgggttactgagatcctcgcgggttggtctggtggacctgnncgcgggangagatnaccttgccatcctggacctcttccacaatggtacgcacctgacgggtggtcaccggttctttcttgtactgagtcaggtgggcatcctctccctccagcagcggcggtaggtggcaatctcctgctccaccgcgtcttcacatccagcaggattttgtattcctgttctgctgctccatctcgcaacaaagtgggccaagctgaacctccagtgctgccaatca

SEQ ID NO: 495615 - DNA, 465 bp, Homo sapiens
tgggatatctggatatcttatgcagaagaatgaactagacccctagctctcaccatgcaatcaaaatggattaaagagttaaatctaagacatcaaaagaaactactacaagagaacattagggaaactctccaggacatcggtttgggcaaagatttcctgagtagtacctcaaaagcacaggcaaccaaaacaaaaatgtataaatgggatcacatcaagttaaaaagcttctgcacagcaaagaaaacaatcaacaaagagacagcccacagaatgggaggaaatactggcaaactacatatacatctgacaagggattaataatcagaatatagaagctcaaacaactctatagaaaaaagccaaacaatctcatttgaaaatgggcaaaagatctcaacacacatttctcaaaagaagacacataaatggcccaaggggcatataaaaaaatgctcaaca

SEQ ID NO: 495616 - DNA, 120 bp, Homo sapiens
gatggacagcagtgcagccgacagtctcgaacccctttgggatcaatgcggctagcgtggggtcagtgctgttcaatagcccagaaatgcaagccctcctccagcagatctctgagaacc

SEQ ID NO: 495617 - DNA, 271 bp, Homo sapiens
acctgaccctgtggtgtatccctgctctctgacagcccctttctcacccctggtccccacggcccctggatctctcccctctgctagaatctcgctgagtggattggtgggtgaggtggtggtcacgcactgggtggagatctggtgccccctgtgaggccggacaggaagggccagtggcggccaaggtctattgagaactcggtggcatcccgctcctgatggcctgggtcccaccgcccctcccccagccttcctgacagcagaggag

SEQ ID NO: 495618 - DNA, 685 bp, Homo sapiens
  misc_feature (5)..(5): n is a, c, g, or t
  misc_feature (40)..(40): n is a, c, g, or t
  misc_feature (106)..(106): n is a, c, g, or t
  misc_feature (136)..(136): n is a, c, g, or t
  misc_feature (174)..(174): n is a, c, g, or t
  misc_feature (203)..(203): n is a, c, g, or t
  misc_feature (218)..(218): n is a, c, g, or t
  misc_feature (244)..(244): n is a, c, g, or t
  misc_feature (345)..(345): n is a, c, g, or t
  misc_feature (349)..(349): n is a, c, g, or t
  misc_feature (351)..(351): n is a, c, g, or t
  misc_feature (559)..(559): n is a, c, g, or t
  misc_feature (609)..(609): n is a, c, g, or t
  misc_feature (630)..(630): n is a, c, g, or t
ttctngtctcatcactgcatcattgaaagaacatgagcanacttggagtctcaggctgcaccctacctttttgaatggaagcttacatttttaactagcatagaantggtatgctaatactgtatattagggaacnttgaggtgagctgccaaatgagacaaaatgcaagccanagaaaagtgaaactaaggttggatgggtnaggggagtgcatttngtagaaatgagcaagattcttatatngtgaagagaattttcattaggcaaattttgaaaccagtaatttcagaatcacttttgaactttgcattccaattaacaactcatgagtcatagctaaggtncacnantaatttctactacattgtgtgcttgctgccataatcatcggtatggtatctctcaccagcactcccctaccctgtgcctctctggcataggattatctttgaggaaacagtacctttctaaaggaagacaaatttgttcttggagattgactagcatattgactgcgccatgaccaaggtaaaaacttgcatggtctggagcaggttnaatggctagctgaggtagggcaagttagagtatgggaagagagaaacggngaggacagcagtgagggcttnctgggtagacagcaggagggggttgctgctgggaggacttccagtgaaaggccag

SEQ ID NO: 495619 - DNA, 354 bp, Homo sapiens
  misc_feature (12)..(12): n is a, c, g, or t
  misc_feature (35)..(35): n is a, c, g, or t
  misc_feature (195)..(195): n is a, c, g, or t
  misc_feature (212)..(212): n is a, c, g, or t
aagcacgaaggntaccccgtcaccatagggaaatnaaagctgaatctccagcctgcgtggcgccgctctagaactaggggtgtgcctcggagtgaatggccgctcataggaccgagcgcatgttcgaccattgcgtaatgcatcaagcctgcggctaccagctgctgattgaggtccgctgctgcctgggcgatnctgtaatcttctgtgancctgtcgggattattgacggtgtcacgctggtcgtaacagtctgcctgatactcctgctccagtgaccgccatgttgcggtaaccagtaactgccgctaccccagtagccccgaattcaagtacctctagggccggatcagc

SEQ ID NO: 495620 - DNA, 222 bp, Homo sapiens
aagaaggcgcattctaggttattgccacataactatcaattgtgctttgcttcttcgtgagactgtgatcacaccccatgatctagtgttagttctggatttctccggcatcgaacagataaatgactggtcatgactgggaaagcctgggtgcacacagaccggtgaagaaagaatgaataccacggttctggaccctgactctagaatgaatgttttcct

SEQ ID NO: 495621 - DNA, 865 bp, Homo sapiens
  misc_feature (3)..(3): n is a, c, g, or t
  misc_feature (22)..(22): n is a, c, g, or t
gangctagtacgagctgggtgnaatcggacgaggcagagttggtggctggacctcctgcgacttccgagttgcgatgctgtacttctctttgttttgggcggctcggcctctgcagagatgtgggcagctggtcaggatggccattcgggctcagcacagcaacgcagcccagactcagactggggaagcaaacaggggctggacaggccaggagagcctgtcggacagtgatcctgagatgtgggagttgctgcagagggagaaggacaggcagtgtcgtggcctggagctcattgcctcagagaacttctgcagccgagctgcgctggaggccctggggtcctgtctgaacaacaagtactcggagggttatcctggcaagagatactatgggggagcagaggtggtggatgaaattgagctgctgtgccagcgccgggccttggaagcctttgacctggatcctgcacagtggggagtcaatgtccagccctactccgggtccccagccaacctggccgtctacacagcccttctgcaacctcacgaccggatcatggggctggacctgcccgatgggggccatctcacccacggctacatgtctgacgtcaagcggatatcagccacgtccatcttcttcgagtctatgccctataagctcaacggctttagctgtttgtgtgtctgtccagcccaaaaatggctcattgactacaaccaggtggcactgactgttcgacttttccggcacggtcatcataagtggacacagggctatgtcggctcattgactagccgtgaagagggtgggctgaagtcaaggcccctgctgggaatggcccataatgggcggtgggtgca

SEQ ID NO: 495622 - DNA, 102 bp, Homo sapiens
tatctgggcttcttgcattctgagacagccaagtctgtgacttgcacgtactacccctgtcctcgaacaagatgtttcttgccacactggccaaagatctgc

SEQ ID NO: 495623 - DNA, 452 bp, Homo sapiens
agaggactgccgttttggctgtcgtgcctggtatactgtgttttcacacacacacacacacattttttaacagatggggtcttgtcctgtcccctatggttggagcatccgtgctgcaatcacagctcactgccgccttgatctcctgggctcaagcactcttcctgccccagcgtcccaagtagctggactacagacaggcgccaccatgcccagctaatttttttttttaacttttttttttcccctcaaaaaaaagttctcactatgtggtccaggctggtcttgaattccggggctcaagcgctgttcctgcctcatgctctcaaagtgctgggattacaggcatgagccaccagatctagccaataatgatccttttaaaccgtccagtgatataaattcatagttcctctttttaaaagaaaaacgtattatccaccccatactcc

SEQ ID NO: 495624 - DNA, 286 bp, Homo sapiens
cgatctcatgaccttatgatctgaccgccttggacaccgagctgtgattacacgcgccagtgagcgcaaactatgcctggctcctgatgcataaacagtgctctgagctgcacctttcaggagagctttgcggggcatcatagcctttctgaggacatggtatgtgaacggtggctgagcgacctggatagagcaagtggcttaacctatctggagcttaacgagaagggccagtagatcatcgcatggacacttaagagaatgcccggcatattagggacttcgg

SEQ ID NO: 495625 - DNA, 1135 bp, Homo sapiens
ggctggttctggcccggaagttctgggagtggcgggcggcgggccggcgcggtgagggcgtggcggatgggaaccaggtccggcctgtgagcgtgtgcgccgccctgctggtccggtcacgtccccgcgttggcgccgctgcccgcgtcgtacggaacgagggcgccgcggccccgtgctcgccgcccggtcctgaacccgaccttgcctcagtgagcagcctcgagtcagagtgcatcatgatgcatgcgtgcccggtagagtgaaggtgctcggatgcaccaagtaggtgaaaccaggcaggcgggggcgtgcttgcagaggagcacaccaagtcgaccggacacctccaaaccgctcacagccacatcaggcaagtcattcgtgcaccaacaagactagcccatgcaaacccaagaatctggacacgacagcaccgaagtggcaaataacatctatagacagtgaacggtctatccacaacgcgatcagaccacgaggcaccacgtggtacacattgacatacaagagtcaaaaactcatgagacccacactatttgacccaaccttatggcgaagggtggaacacatgctctaacattacgcatgaagacacagcagagcgcacggaggaaacaaacccagaatcccagtacttagacaacacaacaagaccgacccccatattgaactggcgacatgagacaacagaacagaaagacgaccaaccatgaccggagaccaacgaaactaccaattgaacagactagacaagagccacacaagagccggcactaaaaaccacacacaagcacagtatgaacacttaggagagcaaactctttgcaaagcattaagcccatattccaaaagaggagccacaaacactcttaggcgcacattcaatactgagatatcaaaaaagacacacatagaagaattccagtcagatagtatagagattaccagccgcagttgtagttgaaggcctaacaagtagaacgcaagctgcaaagacacaagggataagcacagccacaaataatcacaccgaggacaagtcaatcaccacattctaggagtcactatgagagagtcagcccaacagcactctagacagatcgcccaacgacaa

SEQ ID NO: 495626 - DNA, 391 bp, Homo sapiens
cgctttgtagaaaggatggtgagtgctagcccgtccccgagttataggagtagagctagatgatcctctaatcctaatatttagaaagcctcctgtatgtcctttgactccttcagttggcactggcaccagactctaccctgtacgttcttatctgcaggtaaagaatagcactcgtattcaccattgacctgagacaagaccgcccagcgtcgtaagtgtagcagtaatatcataacagaactgtatctcttagcctatgaacatataccatatgtcttggtactgcctaactctggtacatccgaatagtacctttgtgcctatagttaagaggtacctaaaggttaaggggaatcccttacttcctctctttctcagtagtgaaatc

SEQ ID NO: 495627 - DNA, 587 bp, Homo sapiens
  misc_feature (326)..(326): n is a, c, g, or t
tttttttttttgtttgtgggaagccccggcacactgggccagaatatgcagggcccggagcagggcgccttcgtccacgaatccctccacgggcacagttcaccacacgcaccccctttcttgcacgtgggcaaagggtgtttgctcatttcagcaagccgtgttcggtggagggcaggaaaggagtgtggtgcacaggtgattgaaactcacagagaaggccaaatctccctccaggggcagcgtgctgaacaccaaaggaggccgaaaccctctgtggggaaagtgagtggggctcattacccttattaggtctttcattcccnaaaggacgtgcatctccggggtagcttaccttcttcttcccaattccgtgcccaggccaagaattctcccagggggctctttcccatttcacgcctcgtggtcccccatgtgaacctttcttctccggctcccatttggccggtccttaattcagaagcccgttcgcccgtgggggaaactgtggcctgggcccgggtcccctgtgacttcattcccccaagtgtgaggtttcggggggccactgagggctgtttccccag

SEQ ID NO: 495628 - DNA, 316 bp, Homo sapiens
  misc_feature (25)..(26): n is a, c, g, or t
  misc_feature (33)..(34): n is a, c, g, or t
  misc_feature (39)..(39): n is a, c, g, or t
  misc_feature (52)..(52): n is a, c, g, or t
  misc_feature (63)..(63): n is a, c, g, or t
  misc_feature (65)..(65): n is a, c, g, or t
  misc_feature (67)..(67): n is a, c, g, or t
  misc_feature (73)..(73): n is a, c, g, or t
  misc_feature (75)..(75): n is a, c, g, or t
  misc_feature (77)..(77): n is a, c, g, or t
  misc_feature (90)..(90): n is a, c, g, or t
  misc_feature (97)..(97): n is a, c, g, or t
  misc_feature (106)..(106): n is a, c, g, or t
  misc_feature (108)..(108): n is a, c, g, or t
  misc_feature (116)..(116): n is a, c, g, or t
  misc_feature (119)..(121): n is a, c, g, or t
  misc_feature (126)..(127): n is a, c, g, or t
  misc_feature (131)..(131): n is a, c, g, or t
  misc_feature (134)..(135): n is a, c, g, or t
  misc_feature (139)..(144): n is a, c, g, or t
  misc_feature (147)..(148): n is a, c, g, or t
  misc_feature (154)..(155): n is a, c, g, or t
  misc_feature (171)..(175): n is a, c, g, or t
  misc_feature (186)..(186): n is a, c, g, or t
  misc_feature (217)..(217): n is a, c, g, or t
  misc_feature (227)..(227): n is a, c, g, or t
  misc_feature (232)..(232): n is a, c, g, or t
  misc_feature (236)..(236): n is a, c, g, or t
  misc_feature (310)..(310): n is a, c, g, or t
cttgccgatccggctttattgagannttttgcnnattanattttacaatttnacattttacantnanaaattntntntgctattacatangctgcanacttttcananacactacngannntcttnnattnctnnggannnnnntgnnccatgnngagctcctgagatatnnnnnttctttcaccntcattttcatcttccttggaagatgaagaancacattcctnacatntccntccgtagcctgtctgtttaggagactttttcaaaggaggatccaaacagccaaaatggtagcagagtctgcatncatcac

SEQ ID NO: 495629 - DNA, 832 bp, Homo sapiens
  misc_feature (510)..(510): n is a, c, g, or t
taaataaaagggcccagggtttcgaacgaagccaaattacataggcgaagaccaccactgctctagtacgcacacccgtttgataatggggcaacaaaccactggtaatactggtgacatctctactctcttgggggacgacacaacttgggggaaatacctccccccctctgtggaaatatgagagatcgcggactacaaccatggcactccccgcgttggatgttagggtaatctccttacgcacgaacccccgcgctatggcagcgtatgtatgtaccacacacgctggggaggtatctctcttagagcgagcaggaggggtgtattctctctccacagcgggagtgtgtttcccacccgactgtggtggtgttcacaccacagagtgtaggagcctccctctcggggggggaacctttctcacgagagtcccaccttccactcggcgcgtttcccggcgcgttcttgtatttgggtattggaggtggtacctacgcctcgtggacncctttctatgctgcgtggccgaggagagtgacgagcgtgctgggctgtcttgcgtttttgtcccacacaagggctcaccacggaggagacataggttatgtgtgtaaacacacgcattgtcaacctcacggtagtgagtcattgacaagacactcctcactggtgaggaccaccgttgtgtttatgccgaggcttacctgaaagttgttgcgtctttatgaaaagggttattcaggtggtctgtctagtaataaaaaatacgtctttgcctgctcgcaagagaggggaagaatatttttgggaaaacaaccacataacacaa

SEQ ID NO: 495630 - DNA, 620 bp, Homo sapiens
gcacgaggagagagagagagagagagagagagagagagagagagagagagagctcgagagtttgatttttttttttgtgttcactctctgtgtttgtccctctctctctctctcacctctttgtgtctcattgtgtgctctctcttctcctctcacctcttgtgccactcgtgtctcctctttctatatactcaggtcattctcagccccgtgtgctctgaatgtgctcttctctatactgtcacacattatatatctctcacgatattttaaaaaacaaaaaaaaaaaaaaaaaaaaaaaaacaaatatgaagaaccaaacccctcgggggggccccctgccccattttccctctatagtgtcccttttcaaattactgtgcgcctttttacacccccttgtctctgaaaaccctcgcgtttccccccttaatctcttttcgatacatccccctttttccaggtgtcgtattattcaaaagtcccgcacctttcgccctttccatcacttgtgccccctctttggcgcaagtcccatttgtaccctcaattttttttcataataccccgccaaatttttttacaaatccgccttttttgcaccaatgccctatatctcc

SEQ ID NO: 495631 - DNA, 96 bp, Homo sapiens
gcgccgtggacatggccgagaccttgaagaccttgcggcaggtggaggtgattaatttttggggactgcctggtgcgctccaaggtgtgcatgttg

SEQ ID NO: 495632 - DNA, 114 bp, Homo sapiens
agcggccggagccgctgagcgccaccagggcagcagccgccgcagccgccgccgctgggcagaggagccagagacgcgagcgggcgaggtggcggcggcggcggagcgggagcg

SEQ ID NO: 495633 - DNA, 103 bp, Homo sapiens
acaacatagcatgatcatgtccctatttaaaacaaaaaaaattagccaggcatggtagaagcatgccatatagtacccagcctaactctggaagcgctgcagg

SEQ ID NO: 495634 - DNA, 240 bp, Homo sapiens
actgaatctgtgcctcctcagtagcgggactacaggtgtgcgccaccatgcccagctaatttttttttggtattttttagtagagatgaggtttcaccatgttggcagaatggtctcaatctcttgaccttgtgatctgcctgcctcagtctcccaaagtgctgggattacaggcgtgagctactgcaccccgccagtaatttttaagagtgtaagggtgtctgaggcacagatttgagt

SEQ ID NO: 495635 - DNA, 411 bp, Homo sapiens
  misc_feature (6)..(6): n is a, c, g, or t
  misc_feature (178)..(178): n is a, c, g, or t
  misc_feature (182)..(182): n is a, c, g, or t
ttaaangaaggggattccttctctcaatttggagaacatgacatatagggggaaaaaagtctaaatgcctcccacctgattggagatatgtgaccgtcaacattaattcccccatagcctaaacatttaaagagcccctggggtacaaggttgcacgcctgtaatccccaacaatttngganagccccagcaggaggactgcttgaggccctggaaccccaagacccagccctgggtaacagagcaagaccttgtctctccaaaaaatttaaagatttagccaggcgtggtggtgaccatctgtggtccccggagctgagtcaggagaatcacttgagcccaggagttcaaagttgcagtgagctatgatcatgccactgcactccagcttgaatgacatagcaagacctc

SEQ ID NO: 495636 - DNA, 153 bp, Homo sapiens
gaagtggaatttcctttttgagtagtttcttgcatggtgtgtccaataggtcaaacccagacctactgtttgcaaacaggccatctgtagagatacaatctctggactgccaggacttggtgcttgcttcattcatttaaatacaagctctcc

SEQ ID NO: 495637 - DNA, 949 bp, Homo sapiens
cggccagcatcgcgatttatttatttatttatttacttattttgagatggagtctcactctgtcacccaggctggggtgcagtgggacgatctgagctcgctgcaacttctgcccctcctccctccaggttcaagcaattctcctgcctcagcctcccaagtagctaggattacaggcacacgccaccttgcccagctaatttttgtatttttagtacagacagggttttgccatgttggccaggctggtctcaaattcctgacctcaggtgatccacctgccttggcctcccaaagtgctgggattacaggcatgaaccaccacacctggtcttgttgaggattcttgcatctatgttcatcagggatactggcctatagattttttttcttgtgtccatatctagttttggtatcagggtaatgctgccctcacaggatgagtttgagaactggtatgagttcttctttaactgttcagtagaattcagcagtgaagccatcagggcctggacttttctttgatgggagactctatattactgatttaatctcattactcatagttgggcttttcgggttttctatttcttcttggtccatttttggaagttggatctggtcaagaatttatcctttccatctggttttcaatttggtgggatatagtgtgacataatagtctctaatgatcctttgattcctgggccatccgggaatgactttaagcccctgtgctttaacaccctgagcgggggtaattaaaaggtagttgggcttaatgccaactgtgggacgaaccctgctgggtacatgtaactggataggcctttgcataagacctatcgtccaaaacctaggggggccggaaccacaaccctatggagaattaccccgttttggttataggatagcgcgacggaaggataagatacccagtgaagagtca

SEQ ID NO: 495638 - DNA, 473 bp, Homo sapiens
ctactttgttctgtttccaaagttgccccactgataaactactattaatttactgaatgtcaatattgtctgttgcctctgccttatagtcgcacagttaaatctgccttttcaataatcaacaaacgaattttggtcgattgtccacatgctatgcagttttcgggatatacttatgtgaaaaagcattggttgtttatttcaatttccaatttcttactttggttgctcttccttctgctgagaatactcctttccctggctatattcttccgtccttcaccctatcctgcttctctcatggcttgcactttattgaaattgtctaattacttggtagccttttccctttaacttgagctttttaacgatagggactaaattttttttgctggccgtggcatccccaatgcctaaacccaatttgtgggcatttcaaacttcgcttagtaaattgacggtcttttgcgccc

SEQ ID NO: 495639 - DNA, 366 bp, Homo sapiens
  misc_feature (10)..(10): n is a, c, g, or t
  misc_feature (366)..(366): n is a, c, g, or t
tgagacgganttcgctctgttgccaggctggagggcagtggcacaatctcggctcactgcaacctctgcctcccgggttcaagcaattctgcctctgcctcccgagtagctaggactataggtgcatgccaccacacccagctaatttttgtatttttagtagagatggggtttcaccatgttggccaggatggtcttgatctcttgatacctcatgatccgcccgcctcggttttgcaaagtgctgggattacaggtgtgggccaccgtgcccggcctaagagctctcttttttacagacatcacacacaacacatataactgcacagacaaacagcagcagatccagtagttacaaagattttn

SEQ ID NO: 495640 - DNA, 321 bp, Homo sapiens
gatcgacctcggcgacctgcattatgagcttcctcaacgctttgggtaggccaaggcgggaggatcgcttgaggccaggagttccagaccagcccaggcatcaacatagataccacatctctacagaaaataaattagccgggccctgcacgcgtgtagtcccagctactggggaggccgaggccggaggatcgcttgaacccaggagttccaggctgcagtgagctataattgtgccactgcactagagtctgggtgacagagacactgtcgcaaaaaaaaaccatcaaagcccttagctcttattgcccaggctggagt

SEQ ID NO: 495641 - DNA, 581 bp, Homo sapiens
tctctaacattaacgttccagtcgatgtagctaacaatagatcataagatcatttaaaacttaagaaaaaaaaaatcaaccagacacagtggctcacgcctgtaatcccagcacttggggaggccaaggcaggtggatcacatgaggtcaggagttcgagaccagcctggccaacatggtgaaaccccgtctctaccaaaaatataaagaattagctgggtatggtggcatgcacctataatcccagctactagggaggctaaggcaggacaatcgcttgaacccagggggctgaggttgcactgagccaaaatcatgtcactgcactccagcctgggtgacagagtgagattccatctcaaaaaaaaaaaaaaattgggtcatgacccagaaattccacccttaggtatgtcctcaaggcaaatgcccagatacatgctcaccaggtagtaaagggataataaataatagtagcacagtcccaaatagtccttcaatggatggcacggttggatggtactcagttggggacctgagacccttggagatgtccatcaacattacaaccaataaaaaggtgg

SEQ ID NO: 495642 - DNA, 541 bp, Homo sapiens
  misc_feature (405)..(405): n is a, c, g, or t
  misc_feature (493)..(493): n is a, c, g, or t
  misc_feature (500)..(500): n is a, c, g, or t
atggctgcataatattccgtagtgtctatatgccatattttctttattcattccataattgatggtcatttaggttgactgcatgtccttgctattgtgaatagtactgcaactaacatatatgttcatggatctttataaaagaaccagttatagtcctttggttatatactcagtaatgggattgctgggtttcgtggtatttttgcctctaggtttctgaggaatggccacactgtcttccacaatggttgaactaacttacattccaaccaacagagtataagcattccttttctatacaacctcgccaacatcatgatattttttgaatttttaataatggccatctgattggtgtgagatgctatctcattatggttttgatttgaattctctaatgantgtgatgttatctctcatatgatggttgctgcaggtaggctctttaaaagtgtacaattttgaatatgactttcatgatagcttattnctatgtntgtttggaaaccaggtcctataactaacatataagtaagaa

SEQ ID NO: 495643 - DNA, 587 bp, Homo sapiens
  misc_feature (8)..(8): n is a, c, g, or t
  misc_feature (14)..(14): n is a, c, g, or t
  misc_feature (49)..(49): n is a, c, g, or t
  misc_feature (72)..(72): n is a, c, g, or t
  misc_feature (92)..(92): n is a, c, g, or t
  misc_feature (135)..(135): n is a, c, g, or t
  misc_feature (173)..(173): n is a, c, g, or t
  misc_feature (190)..(190): n is a, c, g, or t
  misc_feature (209)..(209): n is a, c, g, or t
  misc_feature (212)..(212): n is a, c, g, or t
  misc_feature (214)..(214): n is a, c, g, or t
  misc_feature (217)..(217): n is a, c, g, or t
  misc_feature (220)..(220): n is a, c, g, or t
  misc_feature (224)..(224): n is a, c, g, or t
  misc_feature (251)..(251): n is a, c, g, or t
  misc_feature (258)..(258): n is a, c, g, or t
  misc_feature (265)..(265): n is a, c, g, or t
  misc_feature (308)..(308): n is a, c, g, or t
  misc_feature (310)..(310): n is a, c, g, or t
  misc_feature (320)..(320): n is a, c, g, or t
  misc_feature (336)..(336): n is a, c, g, or t
  misc_feature (367)..(367): n is a, c, g, or t
  misc_feature (472)..(472): n is a, c, g, or t
  misc_feature (481)..(481): n is a, c, g, or t
  misc_feature (517)..(517): n is a, c, g, or t
  misc_feature (534)..(534): n is a, c, g, or t
gggggggngggttntttcagggaaagggaaaaaaagggaggattttggnagggagggaattgtccaaaggcnggggggagttttggtgtttnggggagaaagtcaggaaggggattggggaggtgttagttttcnacagggcagggtatggacagcagaggatggcattgttnacggtttccccaattcntgcaggatcagcgacatcngantnttnatngtgnatcccggccagccatggtgccaccagntttatcntcatgantactttcccgaacaaagagctggctgatgagagccagaccctnanggaagccaanctggtcaatgctgtcntcgtgcagcggttaacataaccgcccagccngctgcctggcctccctcctgtgtttcccatggccagtggccatgccccatggggatcgcccctcctgcccccttgtgcatacccagcagtccagtgcaacgtctnctccatagntctggtttcttagatcttggttggacgtttgttttntccttagttgcatttcntgggtttttgtgatgatcaatggactttaatgaaaaaaaaaataaaaacaacc

SEQ ID NO: 495644 - DNA, 356 bp, Homo sapiens
aaacaaggggcggtccggtttattaaaatgccggtcaatgggtttccaggtcccccgggccttgcaaataaataatggggcatgcagggggcccatttaggggcgataatccccccttttcccccgttttttttgaaaaattgtaaatttggtcaaatcccccggtttggccttaaaatttggggaatgttatggaaaaaatagtttataagtttgttaaggccttaaaacagggtttttttttttgatttttaattttttcccccaacccttgtttttggggttaaaattgttttttgggggtttttttttttcaaaataaaattaaaaacttttgttggaaaaagattccccca

SEQ ID NO: 495645 - DNA, 414 bp, Homo sapiens
  misc_feature (116)..(116): n is a, c, g, or t
  misc_feature (119)..(119): n is a, c, g, or t
cctttctgctcagaactgctgcccaaggtgccacatgcagtgtgtggtggtgacaggacaaacccaaagcttactgggaagccactgggtaggtctcagctgtgattatatacatnaancaaaggcagtacaatattcttttacctcttccagtgacaaaaggacatgggcttacaagatgtagaatttcaaagatctctccctttattggctgccatttctgttgtatctatcctttccatagtaatgatacattttgtttagaaatgtgaacactagtttgatttaatcttgcaatacatgggaacttgaacttttagccaccataaaacaacacatagacatataagttacttttttaaaaattaggacaaatttttgtggatgtaaaatgttacctctaagactgcaaac

SEQ ID NO: 495646 - DNA, 642 bp, Homo sapiens
  misc_feature (359)..(359): n is a, c, g, or t
cggcacgaggggaggtgtacatcgcgcccactcgtgcgcccagatcagaccccctgtacgcagaccgactagcgaactataggcctgaggcgtttgggtcctcgggacacggctgtgcatgacacccgggggtcggccatgccagtccgcctcagacgcagagggtccctctggcaagcgccctgtgagtgggccattcggaacattggacagaagcccaaagagcgcaaattgtgacaattgtggaacccacattggcctgagataccgcttcgaggcaccccttacctggccattcgtcaggacacaccacccacaccagtgttatattctggcttgccggagagggtggtcccggnggcacattggcgaacagacccttgcgtgtccaggtttgcagatctcccctgtgccactaaccatactgtgccgggctgtctgtgtgaacttcgtgcctagacgcggctctccatcttgggtcctctccgtggtgcccaatgtgtttagaggggggcccccctcttgggtcccctcctctgtcattacctgaagagccccacgccacacactgaatgtgacctgtgcctgtcgcgctcggccacatttgggggccccgtttgactcaacttactccttttcgct

SEQ ID NO: 495647 - DNA, 615 bp, Homo sapiens
  misc_feature (120)..(120): n is a, c, g, or t
  misc_feature (141)..(141): n is a, c, g, or t
  misc_feature (189)..(189): n is a, c, g, or t
  misc_feature (208)..(208): n is a, c, g, or t
  misc_feature (215)..(215): n is a, c, g, or t
  misc_feature (235)..(235): n is a, c, g, or t
  misc_feature (283)..(283): n is a, c, g, or t
  misc_feature (301)..(301): n is a, c, g, or t
  misc_feature (310)..(310): n is a, c, g, or t
  misc_feature (334)..(334): n is a, c, g, or t
  misc_feature (349)..(349): n is a, c, g, or t
  misc_feature (358)..(358): n is a, c, g, or t
  misc_feature (361)..(361): n is a, c, g, or t
  misc_feature (372)..(372): n is a, c, g, or t
  misc_feature (375)..(375): n is a, c, g, or t
tacttttccacaggtaaagaggtggactgtagaaccgcttaccagcattgaatgtcagaagagcaggatttggcaaaggggatgaaatcagatttggatccatgagagagggcaactctnggacaggccagcggtatctcnaaggctgaaggatctcagaatgtgatctgcggaaagtctgtgaagacngagctctaaggaaggaacngtagccntgggtaaggactacagccangcactagggtaaggacactcagggaaagtaggcagcatgagatggtcngaagctaacatcagggcntggggtacngtaacatttaggacagggttttcnaactgtgaataggtnatgaaatcnacnagagatctccnccngcatttaaaaatagtataaaaatattaatgtgctttacatataatttgggtaaagatcttttcctgtaccctttctttttttttttttttttagtatttattgatcattcttgggtgtttctcagagagggggatttggcagcgtcataggacaatagtggagggaaggtcagcagataaacatgtgaacaaaggtctctggttttcctaggcagaggccgccttccgcagtgtttgtgt

SEQ ID NO: 495648 - DNA, 451 bp, Homo sapiens
  misc_feature (17)..(17): n is a, c, g, or t
  misc_feature (50)..(50): n is a, c, g, or t
  misc_feature (86)..(86): n is a, c, g, or t
  misc_feature (105)..(105): n is a, c, g, or t
  misc_feature (433)..(433): n is a, c, g, or t
  misc_feature (445)..(446): n is a, c, g, or t
  misc_feature (450)..(450): n is a, c, g, or t
aaatgttgaaagggaanagatggattcccccttcccagtagttttcaaanggttaccctgttgcctgtttcctttcaagtaaatgncccaaattatgatcaattnccctaacataatagtttcattaaaaataaaaacccataaaccgtacaatagtctttaaaaattaggtccctacaaggcccggcgcaagttgtcacgccctgtaatcccagcactttgggaggccaaggcgggcggaacacgaggtcaggagtttgagaccagccctggtcaacatagtgaaaccccatctctactaaaaatacaaaaaattagttaggcgtggtggcgggcacctgtaatcccagctacttgggaagttgaggcaggagattcccttaaagtggtgagccgagatcgcgccactgcactccagcctgtgcaacagtgncgagctccgatnnacant

SEQ ID NO: 495649 - DNA, 671 bp, Homo sapiens
gtggatgacagagcgagaccctgcctcaaaaaaaaaaaaaagaaaaaagaaagccacacttattcttttcagtaacctgctagttgcacaggctgtactttagggtacttaaaatatgccctagaaataaatttgcaaggccctaaaattatcactggtaattttgggagtaatccaggatatagggtcccgtttaacaagagatttttaataactctcagacattgcattccagtaggaaataccttgagaaatccatattggttatgttacaaatttcatattctggtactacaggtaaacgttaacgagttttaaacagttaacgattggtcacaattttcctctcttttctatattcacaagggcgccccagtggttcaatggtcttaagatttccagtatttggacacttattttttaaaatcctggtcattggagataagaataatccaggtacgcatctgtgaaattttcaatgaactgtattaatgggcatatcagggaaatttacccagaaaagtatcagcttcttaaaagttatgcctagaaaatttatgtaaagctaaactacgtggttagaaagtatccagggtaatatggtataattggtcacattctaaccttgaatttgacactaacatttttaaagctaaaaacaacaaacacag

SEQ ID NO: 495650 - DNA, 842 bp, Homo sapiens
tcgatttgcataccctcgattaatagcgagggtggtggcctgcaggggtgttggcgggcctccgaagcggtctccggctcggtgcgcgtgttgactgtgcacgaaggttggctgacgccgccccgccgggccccagatcatgccgcagagatcgggagcctgcgggagcactaagtgcgcaatggtgccacagcagcagccggtgctcagagtggtcccagctatgccaaaaaagttgcgctctggcttgctggtgctgcttggagctgctgggactgtgagcgtcgtctatatctttggaaacgaacccctgggtgggagccaagacattgggtagcccaaggattcccttgataagtttcgggacacagttgactccaaatttcttggggtaacatccacgagtcagcctcaccggggaccattacacggttccttttccccccagcatttaacttccgcaccatgcactgaattccgattcggaagcccacacgccaaagcctccattagcacgtatcacattacccccaggaccccctctttgcacgggaaaacccggttaagcctaaacccaacggccaacccccagttgccacctatacggctatataccggcagcgcggtaacacgcctggttgaatttccgttcccctcttacacttccccgtcgaaacgcttgaggattcagcctcttcagtcccaaccttcggccctacgaacaagcgcttcctacacggcaacagtcccgcgaaccaacaacgaccccataccacgcacggacagccattacgcttacccacggcccacccctacataagccccctttttgttatatcacc

SEQ ID NO: 495651 - DNA, 384 bp, Homo sapiens
caagaagaaagaacatcacgacctaatactcacccaacacaaaggtggcaaggaatgaggtgaataggtagagtcatgtataccaggtgtagttgataaaacttgtaatctattcccaaagctgcagcaagagatgagacatgattctgttataaaggctcaaatactgcatttctagcaatttaaacacctttctgatatcaccttacactcaagtgtgcagtacttaaaatagagcctggattgcctataattgtggcttattttcaccctttcttggctatgaaatagttcatttcatacctcttggctttatacaacgatgtattgaatttagagaaggggcatgtgctatcttgcccacttacaaatgtagttctcggc

SEQ ID NO: 495652 - DNA, 339 bp, Homo sapiens
cgcagtggctcatgcctgttatcccagcactttgggaggccaaggccggcggatcacgatcgagaccatcctggctagcaaggtgaaaccccgtctctactaaaaatacaaagaatggcgagaacccgggaggcggagcttgcagtgagccaagatgacgccgctgtactccagcctgggtgacagagtaagactccgtctcaaaaaaaaaaattttcaaattttcaggactcctttttcaggattctggatattgtgacctatctttcccttttcctaagcctttttgctctacactcagacttctctttatccatctcctttgctttcttttaccat

SEQ ID NO: 495653 - DNA, 467 bp, Homo sapiens
  misc_feature (215)..(215): n is a, c, g, or t
  misc_feature (217)..(217): n is a, c, g, or t
  misc_feature (225)..(225): n is a, c, g, or t
ggtcgaactgtgtcccggttcatgggtaacactagtaaaggttagaattgaaggcaagaaatccctagtggagagtgtttgacgggtcattagcataatgagtccttcaatcataatggcaagtaaaggagtggaaagaccatctgcacatccaatgtggaagtcaccaaagtgctgggattacaggtgtgagccaccgcacctggccaagaatnanttctcttntgttatatcccaagaccttgtgacataacaacattgaataatcgtttggtcagccaaagaaggaagggaagaaaagaggaaagaagacattgcagataatacaaacaagttgatatcctcagagtttttggttatgttaaagaggtttggtgagagagaagttaaacttgaagaagagtttgttcatcacagaaatagaattgtgtgggtcgacgggccgcgaatttagtaagtagtagtag

SEQ ID NO: 495654 - DNA, 315 bp, Homo sapiens
  misc_feature (291)..(291): n is a, c, g, or t
cattttgaaaactactaatcagaccgggttcagtggctcgcggctataatcccagtactttgggaggccaaggtggaaggatcgcttgagtccaggagtttaagaccagcctaggtaacatagtgagtccctgtatctaaaaaataaaaaaaataaaataatgccaggtgtgatggcatgtacctatagttccagctactcaggaagctgaggtggcaggatcacttgagcctggggagattgaggctgaagtgagccgtgatcatcatgctactgcactccagcctgctngacagagtaaggaccctgtcttca

SEQ ID NO: 495655 - DNA, 109 bp, Homo sapiens
gtctggctggcaggcaaggtctggcaggcagtcttcacttggcaatctcaacaacagcaggcagtccaacaggggtcacggcagctcggcatattcggtcaatccatgg

SEQ ID NO: 495656 - DNA, 231 bp, Homo sapiens
atatgtacagcttaagaactgctagaatgttgtcatcgctagcctctctgaatggaatctgttagaattctgtccgcttgtgttcatacttgcttgtgatacatgtatccattctcaatacacaagctgattctattcctggaagtgttcccataaactcactgttgtgtgatgagcagaatgaacttgcgttttgagtgctttgtatacccgcacactgtagctcacctc

SEQ ID NO: 495657 - DNA, 281 bp, Homo sapiens
cgttctgaagtattaaccatgcgtgaccaaagaaactaggcttagaaatcagatatacttctgatgctacagtgaagattctcattacaaaagtagaccacccaatcttcgaaaactggatcacagagctccattatggatatcaaagtattgcagagtgccttagcagccatccgaacatgcccgcgtggttcgaggaaaatgcttctcagtccacagttaaagttctcatcagactactgaaggacttgaggattcgtatacctggctttgagcccctc

SEQ ID NO: 495658 - DNA, 1109 bp, Homo sapiens
  misc_feature (199)..(199): n is a, c, g, or t
gtgtttcgtgcttgttttgttcttcgttctgtgcttttttttttttctgcttcttgtttttttctgttaactcgcttttttctttcttccgttctacttcttttcttccttcttctttctcctttttgcttgtcttggttctcgcttctcttgcgctacttcccttctcccctttatcctgttgcgttgtgtgtgtganaggcctcgtgagagaagaagaaagagggaagaaacacgaagaccccgggcgcacccccccggctggactgcgtccacacaccggctttcttccccggcacatggcaactccggcttttagactcccccacgtggcccccccggggtcccgccgaggactggaaaattccagttcaacgtccttgtcgggtggcacaaccacgcagacgggtccaagcccccatcctgagaggtacggttcggaggccgcacccgcggggccctggtccggtgcaaacatttccggcgacccacgactcccaccatcctagataaggtgatcttgcccccgcttccgcaggcttggacccccgggcgcggtcccagaccccaggccagaaaatgtgcgctgtccccccagacgagccacaatctccgcgagggcctgcgcccacagggcctccagaaagtggctgcaccaccaccctagtttccacataagtgggcactttgcctgggcgtctggcctatcatcgagagctcgggttcattgacgctctcgaataattcctgtgcacgaaaccctggagccaccgtttagcaaaccggcttcgcttgataccgcttagggccccgccccttcccccaagttccggccccgcccccgttcacgtgcgctgggcactttccctgctgcctgtaaatatgttggttaatcaccccgtttcgccctggaggccctcccggcccttcacactttcccctcggggagacccacacgctggctgcgtgcccctgctgctgtcacacttttcccccgggacctggggcttttgtcccccagcttcctgtccccctctgtcggcctaccccccccccccagattatttttcaccccccacctccaaataaatcccctgcgtttttggtta

SEQ ID NO: 495659 - DNA, 821 bp, Homo sapiens
  misc_feature (27)..(27): n is a, c, g, or t
  misc_feature (138)..(138): n is a, c, g, or t
  misc_feature (148)..(148): n is a, c, g, or t
  misc_feature (203)..(203): n is a, c, g, or t
  misc_feature (209)..(209): n is a, c, g, or t
  misc_feature (227)..(227): n is a, c, g, or t
  misc_feature (248)..(248): n is a, c, g, or t
  misc_feature (254)..(254): n is a, c, g, or t
  misc_feature (270)..(270): n is a, c, g, or t
  misc_feature (276)..(276): n is a, c, g, or t
  misc_feature (290)..(290): n is a, c, g, or t
  misc_feature (293)..(293): n is a, c, g, or t
  misc_feature (298)..(298): n is a, c, g, or t
  misc_feature (300)..(300): n is a, c, g, or t
  misc_feature (304)..(304): n is a, c, g, or t
  misc_feature (310)..(310): n is a, c, g, or t
  misc_feature (323)..(324): n is a, c, g, or t
  misc_feature (330)..(330): n is a, c, g, or t
  misc_feature (332)..(332): n is a, c, g, or t
  misc_feature (338)..(338): n is a, c, g, or t
  misc_feature (341)..(341): n is a, c, g, or t
  misc_feature (344)..(344): n is a, c, g, or t
  misc_feature (357)..(357): n is a, c, g, or t
  misc_feature (371)..(371): n is a, c, g, or t
  misc_feature (385)..(385): n is a, c, g, or t
  misc_feature (389)..(389): n is a, c, g, or t
  misc_feature (392)..(392): n is a, c, g, or t
  misc_feature (395)..(395): n is a, c, g, or t
  misc_feature (402)..(402): n is a, c, g, or t
  misc_feature (408)..(408): n is a, c, g, or t
  misc_feature (416)..(416): n is a, c, g, or t
  misc_feature (434)..(434): n is a, c, g, or t
  misc_feature (440)..(440): n is a, c, g, or t
  misc_feature (449)..(449): n is a, c, g, or t
  misc_feature (457)..(457): n is a, c, g, or t
  misc_feature (461)..(462): n is a, c, g, or t
  misc_feature (509)..(509): n is a, c, g, or t
  misc_feature (518)..(518): n is a, c, g, or t
  misc_feature (528)..(528): n is a, c, g, or t
  misc_feature (533)..(533): n is a, c, g, or t
  misc_feature (536)..(536): n is a, c, g, or t
  misc_feature (540)..(540): n is a, c, g, or t
  misc_feature (543)..(543): n is a, c, g, or t
  misc_feature (548)..(549): n is a, c, g, or t
  misc_feature (552)..(553): n is a, c, g, or t
  misc_feature (556)..(556): n is a, c, g, or t
  misc_feature (561)..(561): n is a, c, g, or t
  misc_feature (563)..(563): n is a, c, g, or t
  misc_feature (565)..(565): n is a, c, g, or t
  misc_feature (568)..(568): n is a, c, g, or t
  misc_feature (575)..(575): n is a, c, g, or t
  misc_feature (577)..(577): n is a, c, g, or t
  misc_feature (586)..(586): n is a, c, g, or t
  misc_feature (589)..(589): n is a, c, g, or t
  misc_feature (592)..(592): n is a, c, g, or t
  misc_feature (609)..(610): n is a, c, g, or t
  misc_feature (612)..(613): n is a, c, g, or t
  misc_feature (616)..(616): n is a, c, g, or t
  misc_feature (622)..(622): n is a, c, g, or t
  misc_feature (628)..(628): n is a, c, g, or t
  misc_feature (636)..(636): n is a, c, g, or t
  misc_feature (646)..(646): n is a, c, g, or t
  misc_feature (663)..(664): n is a, c, g, or t
  misc_feature (683)..(683): n is a, c, g, or t
  misc_feature (685)..(685): n is a, c, g, or t
  misc_feature (692)..(692): n is a, c, g, or t
  misc_feature (703)..(703): n is a, c, g, or t
  misc_feature (707)..(707): n is a, c, g, or t
  misc_feature (757)..(757): n is a, c, g, or t
tagtcacctgattaacaagagccaganttcattgcatgctgatcaacgaaccaacacaacttttatcatacactaaaaaaagggtagaacaaaggccaacttaaagcctggaaagtcatctaatctgttaaattagtntcccgccgantcattttccccgccttctccttttcccttcccttctcctctccccacccactctngcctcntgtcgcccagcgcgtggngtcgcagcgctgccgctcatnggcgtnattgccaccctccccnccccgngttaaagcctattntcntgccntnaccntcatgngtagctgggattnnaggggngngcggcnaanccngggtaattttttntattttagtagggncggggttctaccgngcgnccnagngtggcgnagacancgtgacantagggaatcggccaacgntggcancataaaggntaggattnaagnngtgaggaacagagccaggcccattattttttttaaaactaattttantaaaatttncttaaaaatnatttnttnattngtngaagnncannaanctacncngnggngctcatnanggcttgctntanatncttttagaaaccaatcnncnnaanttttangactangtaatagnccgataacanccaatgagtgcttggcnnccggtttgttgtgggattngnaataaangagaaagggtncgtnaatcatcatggcgttaatttcttatccaacattccggtcgtgcaggtgtnttgggcaggtgatcccgaggcaatctgccgtgttctgtgaatcttggcggaagggaggcgagct

SEQ ID NO: 495660 - DNA, 127 bp, Homo sapiens
atttttattacaaaattttttttaaaaaagacgaaatagacaacatcctagaaaagaccacaaagatttaactattgatagcgtaatgtacctacgaagttgtagcatgtgctagctaactctaaga

SEQ ID NO: 495661 - DNA, 440 bp, Homo sapiens
gtgcttagggaagggagctttgggtatagtgcagacatgaagagattcactgaatcaaagcaaggatagtaggtgtggatagaggaattgttagaagctggcggggcaccactaggacctgtcagctaaaagcagggcagagtggtgaggaagaaagaggaatcggagatgcctctttgatttcctccttacttgtccgagtaaatgaaaatcaaaacaagggaaggaaagcaggttttagaaaagcttgagctttgggatactgagtttatctgtgtaacaaccaagtggctgttgtcagtatgtggttgaagagatgtctgtgctagagataatgggtttaggagtgatcaatgtgtgggccacaatgaaagccttcaggtgtctatccaggggcattagaggtgggttggccatcagaaggaagcctagacaggtcc

SEQ ID NO: 495662 - DNA, 909 bp, Homo sapiens
ctgacgtcacgtggcgcgttcgtttgccgtggtgagtcccggccccacccaccttacttcgggccatcgcgtggtgtcactcccgattctgcgagtgcttctcggagatttgaggccttttgagccttggtccttttggggttttaccggatcccggatgcgtttcccgagtcagctctgtgcctcctttgagggcattacagcccccggacccccgccatccataatgtgtgagggttctgtaaggacaagctgctccatctaagcatggtgttctgggttcccggttaaattacccggtggtgggttttatcccgggccaaaccaagtgccccaccagggggctttacagaggggtgccctcttgtttgagttccccatgtactgtagtactctgtttagaattatttcctaggtgcctgaaagtgttctgacatgacacttgctactttgtaggccatctgtgatggcaggtaataaagccactgttcaccgtgaaatggtcatggaagtgtacataggttaggccctttcagcagaccttgccgttagtcagccaggacccccttgtttcgttatttggtagccttaaccaaattttttttgccaattggtttcattctcttgatgaagctgagccactgtcccaccaggtttagtttgtacttgaaaactgccaagtagtctccaagtattttagaggggatccctattgatggcccaagaaaatttgcagctataatttgcttctgacggttccttctctgtgaaaccttatttttggtgattctaaagaagccttgcctttcttggttgccattttacagctatacttttttgtgtaatgttacggttccctttctgtaaaatgttctttttggtgatctaaataaagcctctcttgtttga

SEQ ID NO: 495663 - DNA, 473 bp, Homo sapiens
  misc_feature (5)..(5): n is a, c, g, or t
  misc_feature (27)..(27): n is a, c, g, or t
aatanagggttttaaaaaaccctttanaaattattttcaaaaaactggttccaaatgaaaaatcccccgaaaagtgcattactgtttttcctcacccccctagaagaggcaatattatcattcctcctaaggtaatcctaaattgccccccaaaaatgtaataaaatctctgaatcagcccaggtgcagtggctcatgcttgtaatccccagttctttgggaggctgaggtggatgaatcacgaggtcaggagttcccagaccagcctggccaatatggtgaaaccccatctctactaaaaatgcaaaaattagttgggtgtggtggcatgcacctgtagccccagctactcgggaggctgaagcagaagactcacttgaacatgggaggcagagattgcagtgaaccaagattctgccactgcactccagcctgggcgacagagcgagactccatctcaagaaaaaaaaaaa

SEQ ID NO: 495664 - DNA, 910 bp, Homo sapiens
tagagcactcaggtcataggattgttacaaggattaagtgagttaacatgtaaagtgctcagaaagttaccatggttaaagtccaataaatacaattgcttttaggatgtttttctatgcttcattatcgatgaaatacacggggtgtttctcttttcctccttttagactcactgaagatttttgttatattatgtcacagttctcagtatatacctttgtcatgaaagtgaagccccaagtctctttttttttttttccttgggggcagagtctcgctcctttcccccaggtgggattgcaggggggcagatctcgggtcattggcaaggctctggcctccccggggttccttggccatttcttttggcctcagcctccccgatgtagcgtctagggactacagggcgcttggccaccaggcccgggctaattttttttgggttttcttcagcgtaagaacacggggtttccccccggttgttacgcccgggttgggtctcagatctcctttggacctcggtagatctggcctggtctcgggcctccccaaagtgggctggggtttcacgggcttggaggccaccttggcccaagcgcggtggatatccccccagaggttcttctaggagccccatttggggttaaagtatccaattgagggaccaccatctccctttgcgaacatctcacgttcaagggcgccaggtcctccctggggataaacttgcgcacgttactaccttttatttgggccattaacccaattaggggcacgtttcgacgtggcgtttggcacaaactcgtccctccctggttttggccccttttcccttttctctccttttcccttctttgcccagcccaggtgggcccactctcctgggatttccccttttcacttcgaact

SEQ ID NO: 495665 - DNA, 107 bp, Homo sapiens
gtcgtgagaagcgtgcggaaagagaaggtggacctgtacaaccagctggaggaggagaggaggaaggtggagtgatctgcagttcctgcgatgtattggagtccatg

SEQ ID NO: 495666 - DNA, 643 bp, Homo sapiens
  misc_feature (201)..(201): n is a, c, g, or t
  misc_feature (230)..(230): n is a, c, g, or t
agattgacaccgaggcggtaggcaccttctcagtagcagcaccagtcatttttaaaagctgcgcagagaacatctgtgtcctgctttaaagtccagaataataatccttaactgccaactttttaagattcccagagaagctaatatagacagggatgtcatgtcttgtccccactgttgtcaccatgtgaagtgctgggngctcctacactttacataaaaacgtacangcccttaaaagttgaataatgtaagaaaaattgtattttaactgcaccataaaagctagatgaaagttaaacctataattaaaaaattaaaattacaaaagttaaaaaataaaaaaaaaaataaaatgacaaaagttaaacatattcaatttataagtgagttgtgctttatacttgacatatgtaagcagtattagaaaaactaaacagtatgtcccactcctccctgcccctagggcttaataaataactagcatgaaaagaacacattacatcaactgcttctttcaaacatatttcactggagagcctgaatatactagaattatgttttatacggttcatgaacttcataggggaaagttccacaatcaactactattatgagcaagcttgtgtgatacctgttccat

SEQ ID NO: 495667 - DNA, 165 bp, Homo sapiens
gctcagcaccggccggatcagctgtcttccagtttctgtcctcagcaagggtctagtcttcatccaaggtcgatcagcaggggatcaagagctcgagcctcagtgcaggtgagtagctcctactacaataggtgaaaaatgctcatcgagtgtcacagtgcgcat

SEQ ID NO: 495668 - DNA, 233 bp, Homo sapiens
acgcttcagtacctgaccagctgtccaccatacttcccaccatcctccactggctccctcacccaagacccggtcgcttcgtttgagagcattccacccagcctgagtgagtgacggctccccgttaatgctcatcttcgtcgtcgtcatcctcctcctccttctataatgggagccgccctgggagtctacaagtggccatggaggacagcagccgaggtgtccccagcaag

SEQ ID NO: 495669 - DNA, 814 bp, Homo sapiens
ggtgaaggcctcgatagagagaaggtctcattacgagtgtttggggaagagagtcgtgtgggcccaggtctgtggctgctatcagatatgccgctgtcccgttgcgctgcgaggacccgacttgtgccaagagaggtatcctcaaaacatctggagcctgaaccagaggaagagatctattgcctgaggactatgacgatgatcctgtggactacgaggtccagactaggttggagggtgctactcagctaagctggtacaaggtgttcgacccttcctgcgggctcccttactactggaatgcagatcacagaccttgttatcctggatctccccaacatgatcccaatctccgtggttaccaaatcgtgcccaagaagtctctagatagtcagttacatgcagatgcttgacagaaaagtttgggaccgggaccctaggacaagtcggacaggggccatgacgaagttcggaacctgcagctcatgagaaactagacatgggtgccacgacctaagtcgagaccggggccagcgacaagtctgacagggcatcgagagcgatggctactgacaaaggatcgaacagacgagagacgagccgagacagggaacggcgatcggggcaagcgcagggctcgtggagaattgcgaagcaccacggagaaagagcggcaacaagaaaacggaggtccatccaaatacgaccgaagaagggaccgaaggatccactatcctcaacaggagcatggaaagggaagcaaagcccagaaggattgaacagctcagaagccgaggcaacctagggactacaa

SEQ ID NO: 495670 - DNA, 144 bp, Homo sapiens
ctgggcaaccgtttacacccggaatccggtttcaccgggcggccgttttcaacgggaaaacgctttcaacttgaaaacgattttcccgggcgaacccttttagggggcaaacgcttttaatttgtataaaggtgccacgttcca

SEQ ID NO: 495671 - DNA, 981 bp, Homo sapiens
tgtggctggcgtgcggctggtgtgctggcggtgactgctgctggtgaaggaggaggagtgagccgagctgtggcgcttgcacctgaggcctgaccatggacgaggaatacgatgtgatcgtgcttggggaccggtctcaccgaatgcatcctgtctggtgcatcactgtcttgtgtaactgtgtgacagaatgtgtgcttgcaacatgtgaccggacaccctctactactgtgggtgcgatgagctcctccatcacacccctgtgatgtgagctgtataagcgttttcagttgctggaggggccccctgagtcgatgggccgatggccgagactggaactgtagacctgattcccaaaattcctcatggcataacagggcagctggtaaagatgctcctgtatacagaggtgacctcgctaccatggacattcaaggtggctggagggcacgctttgtctacaaagcgcggggccacagatctacaaacgtgccgtccacctgagtactgacggcctctggccttccaactcttgactggggccatgtactgacgaaaacgcgagccttccagcccagttccatggatgttatgtaggcaagaccttcgactgacgcatgacccccaagcacccacagaaggcgcgctcgaccccccagaactaacacaagcacatgcgctgacgtcccaccaggaaaagtctgcacctcgggccacggcatgatcatccgaactgcaccatgaggcaaatgccccgtggcgcgccacctaccagagcacatgaaatggacgacccatgggacacaagacccgtggcggcatggaggagaacggaaaagaacaggcactcaaccagaggaaccaaagagcaagatccagatggagggccaggggagaaggacaagaagacacccagcaaactaaaaccccacgcggcacagagcgattggcgccagcacggcgcacacgggcgtatggcca

SEQ ID NO: 495672 - DNA, 661 bp, Homo sapiens
aagcagcggcggttaggaggctgccatggacgacgaggaggagacgtaccggctctggaaaatccgcaggaccatcatgcagctgtgccactgaactgtggctatctggtgacccaggactgagcttgaccagaccctggaggagttcaaagcccaatttggggacaagccgagtgatggtgtgctgtccgctggcgcactggacctcacctgtgctggtggcccacaacgatgaccccaactgacacagatgtttgttgttctataccagaggagcccaaggtggtgcatcaagacacatcaaggtgtactgccagcgcatgcaggaggagaacatcacacgtggctctcatcgatggatgcagcagggcatgacacacctcctgccaagcagtcccatggtacgacatggcaccccaagtacaatcacatggagcagtatctgcagcagtgagctgctcatcaacatcacggagcacgagctagtccctgagcaatgtcgtcatgaccaaggcaggaggtgacacgagactgctggccctgatataatgcgtccgagagcaccaagctgcccaggatccagtgcgggaggacactgtgtcgcgctactacgggaataagcgtgtgcaggtggtgaaatccatcggcccagtgaagagga

SEQ ID NO: 495673 - DNA, 1107 bp, Homo sapiens
  misc_feature (125)..(125): n is a, c, g, or t
tacaatttttcctgggagaatcatggcaatggctggccagctttgggatggcaacccgggggccacaatgttctggcacactccctttgctactggtgtcctgtatatgggcaagaacctttcantctcgccttttattggttcatctatgactcctgctttatcttccaaatataagagaaacaccgcctattcttttcctacggtgtatggatctttcgttggtcagattggaccccctggctgggtatgtgtcctcttttttcctggacgctctggggtttggccttttcttggactgggtgggcctatccaccttgtgtcccccacaacccgagcagagggggaaagtctctgtgtttcgagccgctcccttttggtactcccctttcaagcgggaaaatgaattatcacgaggtttgtggggcctccgtgtgtgttgtgctcgagcacacaatatgtgatattacagagctctccctcaagcggaaagcacccaaagggagaaaactcgcggaaataatttcgcccaccgaggaaggacacccccacacgaacgtctccctcgcgtttttcgaaacaactcgcggggggcccgcctggaatgggaagggtgcgggaccaaaggcggaacgggacgcgggacactgtgaacagcgggggcggaccctcccaaacctttgtctctccccctcccctgtggcgttggccggggttcccccctattgggtgcatatctcatgggggcggggggagaattgacgcgggacatgggggcccgtgcgcgacaagcaaggctgttggagggggcgcgccacctgggagggtgcccccggggcagtggttaagttaaacttcccttcccccggggcccttcggaggcgccgctttttgttccccgggagaaaaggggtgcctttggggcccctctttgttatgcccgcgcggccgggggccccggaaatttttggggcctcgggggaaaccccggggggtggaaccggtgttctctggcgccgggagatcctggggggactcttgtgtcttagtgggccccaggtcaaggaaccgcggggaaaaacacctcccttgggagggttccttgac

SEQ ID NO: 495674 - DNA, 729 bp, Homo sapiens
actagttctagatcgcgagcggcgccctttttttatttattttttcatgtttaacatctttaattcaaatgtaaaacgttcaatacaagccatttactagggcttagaaattgtgtgggcttttttaaaacacaagaaaagtggggacaagtgccaacgaaacgtgcacctttctccaatttttcaaaagcttttcaagttaagaggcatagcatcatcagggcctatcaaaagaatccatttaactcaaacccacttttcacccccttaccaattgtggtctttacaccacatttccacaatctctttaatacattatttccgtgaagattttccagatctcagctttgtgctttacattaaccattttaaaaagattatttcgcacccaggtgttgtcttacgcatattattggccacaacacaaaattcattacaacatatactctctcaatatattgccatttctctttcttgtttatacaaacccaaaagggggggacaaactaatcttgtgtacgacacacgcaatttacttatacgcccctcacagaatgtgcatttacgccaagaacaatgtgggctacttatgtgccactattcaaagagggcctataaaaacacctcctacagtgctatcccaaagtggtgcagaattagcggttaagccctttaaataattgcctttaacaacgcattggaatgtgggcaaacatttgcaaaagattc

SEQ ID NO: 495675 - DNA, 447 bp, Homo sapiens
aggctgattctgtcatcttgtgctattgtgataatgctgtaatgaacaaacacaggagtgcagattatttccttaacatactgattttatttcctttggatatatacccagtagtggggttgctggagcatatggtagttctatttctatttttctgagcacctccgtaatgttttctataatggctgttttctataatgtataatgtatgattttataatgttttctataatagtaatttacattcccaccaacagtgtgcaagggtaccctcttctccacttccttgccaacaccttaacctttgtgcattttttttttttttttggagacagtggttcattttgtcccccaggctggagtgcagtggtgcagtcacagctcactgcagcctcaaactcctgggctcaagtgatcttcctgcatcagcctgtccagggggtcccg

SEQ ID NO: 495676 - DNA, 103 bp, Homo sapiens
cgtcagactccttcctgaggacagtgaaagtgatcataggagagacccttttgcttgctacttcattctgttcttgacctaataataaaatgttatgaaccat

SEQ ID NO: 495677 - DNA, 192 bp, Homo sapiens
  misc_feature (53)..(53): n is a, c, g, or t
  misc_feature (99)..(99): n is a, c, g, or t
  misc_feature (111)..(111): n is a, c, g, or t
  misc_feature (125)..(125): n is a, c, g, or t
agctaatactatatgctcagccctactactagaggcttgagtatttggttttngagtgagtaatataagataagccttgctaggttcgccaactatgcnccatttcccctnaccccatcttgtcngagggcgtgactaccccatgatccaggaagataattcatttaggcctatatggacaaaataccacgt

SEQ ID NO: 495678 - DNA, 234 bp, Homo sapiens
tctagccgatccctttggaggttatgccctgcttcagctggagctcaaagtacgaatgcctgagctgggtgcagtggatcacgcctgtaataccagcactttgggaggccgaggcaggcggattacaaggtaaggagtaagagaccagcctggccaacatagtgaaaccccatctctgctaaagatgcaaaaattagccaggcgtggtgctgttgtgcctagtaggtcccagtt

SEQ ID NO: 495679 - DNA, 189 bp, Homo sapiens
atctagaggatcccggtcacctgcgacagtacttttcaaaggttgtagggttcaagcaatttttaaaaactcaataaaatgcttatatcaacaaataaaatcagatagaagaataattctcttctattactaatccattcagaaagtgggttctacatcattccctaataattatctaggtcccaatag

SEQ ID NO: 495680 - DNA, 142 bp, Homo sapiens
agtcgttacaagcttctaaaatgttgcaaaattaaagtctgctggatggttttcgccttaacccatattcttccattcattccaaatactatctccagctggatagcagttttccccacttcctgtactgatttcacaatct

SEQ ID NO: 495681 - DNA, 143 bp, Homo sapiens
  misc_feature (7)..(7): n is a, c, g, or t
  misc_feature (9)..(9): n is a, c, g, or t
tgcatgnanagcataggatcatggttatgatatttgctaatagagcagcattgttatgtaagaaggcggttatacatgggtggtggtcagagagcaccactgctgctgctacttagccacttgtgtaacctttttttttaagc

SEQ ID NO: 495682 - DNA, 273 bp, Homo sapiens
tagccggcgggatgttacgcgatgtgatttctgtcccgtgctctgaatgtccaagtgactgacattcaatgcagcgcgcgtcaaacggcgggagtaactatcctctcttaaggtagccacatgcctcgttcatctaatcagtgacgcgcatgattggatgatcgagattcccactgtccctacctacaatccagcgaaaccacagccaagggaacgggcgttgcgcaatcagcggggaaagaagaccctgttgagcttgactctagtctggca

SEQ ID NO: 495683 - DNA, 1560 bp, Homo sapiens
  misc_feature (98)..(98): n is a, c, g, or t
ggaggccgacgctgggtggcccgtgtctgggctgcttgcgagtgcgaatggtgactcgggagatccgagtcactatcggatctgcgtcgcgatagagnctcgggtaacaccggcaaccagtgtttggcttagccagcggcatgtctgatgtgtcacaggagccagctagcttctagagagttgtgacctctcacattctattcagcacataggtactacctcacatgggtatcgtgagacgaaatggcacaaatgctactggcatttagactcaattggtgcgtgtttcacatctaaccgtaacgtaggagggaatagtaggcatccaacaagaacatagggaagtttggggactccggtgtctgtgggggaagaagacgttgggtccaaggaagtctcaggtacggaagggtagggccaattttggggattggcctattatggactcgcggttaaaatcacgttatttataggagatactttggaattccagggattaggggaaaggagtagtggttttcgattgccctagggcacggaggggccttgtggcatggttttggggacccttttgagtatgccaattcttggtaggtcgtaaccttaatgggttggttgttgggagaacttagttctttgggattaggacggaattcagggtgaggattttaatttcggaaaaaacgagagggttggctaaagactagttaggtgaaccgctatcggagtttacatttgctttcccattgcggctagttacggccaccacgttgtcggattttaactcccaacgagggttgaatatttttgcttaacctttccacgtccacgggggaaggaacatttcgggcgactcttttacacacccactgtcattgtgggctgcacctagggcaccattggagctccgagaatttcaaggggcacgaacaacgcggcgcctaggtttccttcccacttgtaaaaagttgtgtccattcgacaactggtcagcgaagggtcccttcatttggcgggagctttgatggcacactttgggaggtggattgaagcccctgattgtgacgcacaacacccagtgggtgctgtcgtgcgtcgcatcttggggaagattgctctggggtctcaaccggagtccaaagtcacagcccacctaatgtgaatcccccggaaagtcccttaagggaacgccaaaggcacgcaattcttttagccttttggcggcgaggaccgtaacagagttccttggcgatggcttgacaaaggggcagttgcacacagggtgtggctgggcgcatccacgtcgcttgggcacacaaacatacacttacgcggggggagagtaccaggcacggtccacctacaaatccaagtggaagggccatcgtcaggtatgaggtatccagaacacacaggagatggtgcacgtctagcgacggagaggaacagacgcacgtagtcattgcgaaacattgggtttcgctgagccaagcttgagtaagtatcagcggcgccgacacagatgtgacgcacatacagagggagccgtatcgtgcgacg

SEQ ID NO: 495684 - DNA, 134 bp, Homo sapiens
tcctgaccacgatgatccacccacctcggctcacaaagtgtaggggttacaggtgtgaggcaccactcccagcactatcttggttatcaagtctgaatttaggtatcacaatcacaccacatttaacaaacaga

SEQ ID NO: 495685 - DNA, 447 bp, Homo sapiens
ttagtccgacatacactctcccagtcttaggtattttctcactcttgttcatggcagccctgatcatgttttattctggccaaaagccttcaaagttctgccttttgtcaagacctctttatctttaccctctatttgctctaccatctgcactgtgcttatgttctcattcctccccctacttgatacaaactggacaatcactgcatccttaggagattttacctttgcgtttgctgtcctttcttctcttcgttgagttttcctaaaaaccaatataaatttatttgtctgtaaatatcgacactcttccagatccagctcacattttgcctctcaccttaagctgcttgggttctcttttaatcctttgcagacagagtgaatatctcctcttctccctgaattgccattgtacttcctgcgattttattttatttcattgta

SEQ ID NO: 495686 - DNA, 408 bp, Homo sapiens
tctcatctcgattccagcgtgcatgtgcacagtgcttttcccatatcaggggctcaggctgcacatgccatgcagttttcctgcagttcacggcagacgttggcgttagggtgctagtggtcgcataaatactgttgtgccaggttcatgtctatagttcgtcttttgaaaagccctgcgggagacagcactggcattgggtttggacgtggcatttacgggcagaggtggataaagaagacccatggagtagccttagcaaaagagtggtatttgggtagtaggactttgttcatgtggctggagtgtacatgtgtactaggagatagagtgaaaaggtggaggtaatagtaatttaaaatataacagtaaaaagaagcagctgtgtattgatcacttactgtgcac

SEQ ID NO: 495687 - DNA, 498 bp, Homo sapiens
gcgtgaacctgttacgcaggcgggtgagcccggcaccacgggatctggattctttctatagtctgccctttccagaatgttacatatggggaatcatacagtatataggattctcagagttgcttccttggcttagcaagtatacgtcccagcttcctccatgtcttttcatggcttcataaagcatttctttttagcactaaataatattccattgtcagaatgtatctgttcagcccctcacctacacaaggacatcttagctgattctaaattttcgcagttagcagtaaagctgctaaaacatccatgtacaggttttagtgtggacgtaagttttcaactcctttgggtaaatcaacaaggttgcaattgcttgatcatatggtaagagtatgtttagctttgtaagaaaccgccaggctgtcttctgaagtgcctgtgccattttgcattcccacctgcagtgaatgggagctcctgttgctccacatcctc

SEQ ID NO: 495688 - DNA, 119 bp, Homo sapiens
gcaacaacaagtatttcctacaccagcaactctgacgaccacctgctgaaaacatcgagctgtttgacaagctctcctgcgttcaaccggccgcgtgctcttcatcagatgtcatgtga

SEQ ID NO: 495689 - DNA, 370 bp, Homo sapiens
gccggctgaggtggagctggaatactcccggggcctggaaaagcttttcgagcgcttctccagccgaggaggccgccgggcgagcagccgggagcaccaaagcttccggaaggagccgtcacctcctgtcgcccttgcactgctgggcggtgctgctgcagcacacgcggcagcagagccgcgagagcgcggccctgagtgaggtgctagccgagcccctggcccagcgcctgagtcacattgcagaggacgtggggcgccatggcaagaagagcagggatctgcagcagcagctgcagtatgagctcctgtaggtggtctcagagctccagacggccaagaagacgtaccaggcatatcacatggagag

SEQ ID NO: 495690 - DNA, 424 bp, Homo sapiens
  misc_feature (81)..(81): n is a, c, g, or t
  misc_feature (358)..(358): n is a, c, g, or t
  misc_feature (411)..(411): n is a, c, g, or t
tgtctgaaaacctccttttaactggttgtccctccaactggttacccatcatcatccttcaaagtatttggtacgataccnccctggtctgtcctatactcctaacatcctgataacactttttctgttacatttaaggctcacccaggccttcatttctgcatcaacaaactgtgttccccctccagaccatttctccattgaaactttatgtagggggaaaagctgtaattgcctctaaccctaggattttagtccacaaatcactatggcatagaggatgagtactttttttaggaacagagcacatccaggccgggtcagtagctcatgcctctaatcccagcacgttgggagntgaagcaggaagactgcttgagcccaggagttcaagactgacctgggcaacantggtgaaacccca

SEQ ID NO: 495691 - DNA, 165 bp, Homo sapiens
atgactcatctatactgacgctatctatactacatatctatactgactatctatcaccatactacgtatctatactaccctaaatgaatctaatgtatagtaactatctattatattcatttagggtagtatagatacgtagtatggtagtataggtagcgtcag

SEQ ID NO: 495692 - DNA, 285 bp, Homo sapiens
aagtcgtctttagagtatccccttgtatcatagatatacaacaactataattctcatatgtagcaaaagggctagtgtttcgcttctatagggtactcaatttttatgttaccttttggcattcttagtgcaaaaagaagcatgtggtggctctcataaaaatttcaaaattcattatttttatctttaacagattactgataatacagaatatataatctattggaagaactgccacatacattttgtccttctaaaaatattgaaatttaactagtaagggta

SEQ ID NO: 495693 - DNA, 396 bp, Homo sapiens
taggcctcctgctccaccttggttcatgtatgcatgcatctacatcctatcttcagcatcacaaactcattctcagcagtggtactgcttgttgatttcatcctcatacttgttcttgaatgtctaccaccaggtcctgcatgtttctcagctctgagtccatgcggcccctgttccccacatgatgcttgtccagcttgcctcctgaggttgttgattgtacttgctcgaacaacggctccaggttctgcctcacatgtcttgtgttgccctgctccttgcagcagggtccacttggtgtaccagaaaccttgtacttgctgctccatgtgaacctgcaccttgtctgatgatgtgaggcaaacttaatagttgagggtcttgatgctggacgat

SEQ ID NO: 495694 - DNA, 1328 bp, Homo sapiens
actagttctagatgccagctgggaaaaaaaaaaaaaaaaaaaaaaaaaaaaaaaaaaaaaaaaaaaaaaaaaaaaaaaaaaaaaaaaataaaaaaaaaaaaaaaaaaaaaaaaaaaaaaaaagaggcggcggcggcgcgcccgtgtatatattttttcctctttaggaggagcccgatatgttaccgaccagccgtagtatttattatgaggagaaggtgtggccctttatatagggacttgttttttatactactggacgcgggtgagcgtgtgtaataaaagatatcggtgctagggagagaaaagaagggataaagtgggatattattgtgtgagaaaaagaattttttattgggtgaggggggggtgaaaagaaatgttatgtggacgaaattaatatcttatcttatagaaatttgtttataaatgcttgtgaggaggtatttttttattagtttgagagagatttttattgagggtgcgtgacactacctatcgtgtcatatttctgcccgctcggcgacatgaagaatgttgcggcggcgcataggacgtgttatttaattgtataatagtattttttttaaaccacgagggcattttttgttgattaaatataaaaacacgataattgtatataggtcaacgatgataccaaatacaaattgatcaataaatgatgataataaaaatatgaatgtttaggtggttacattactaaattggaaccgtaaaattagaatagactaacgagaaatatatcatgaatgtatactagcaaatcagataacgtaacaaatagatgaagcgtctcatcagaaaaaggatatagaagtcaactatttcaactctacgagcgccagcgagaagggtcgacgaagaggaatagaagcggctaggtctgatcttttatatgagatgcattgaaaagaatgaattaagtcgtacactataacagctaatagtggtaattattattccagtggaacgtaaatgaaggagagagaagaaaataacatagataaccgatgaataacaaggtggatatctacaaaagacaataaatagaagagcatacggaaaagcactaccatgtgagcagcgactgtgaaaaatgagttataaaagagagacgcggaaccatacacaaatgagctcacagctgacgcagacgctccgtgtagacatgtgtggtccacgacgtgtggtagactgagctcgacaggctgaagcgtagagcgctataagggcggagggtgatggagcgaatcggatgcgagtgtgcgttgggtagcttgggacgtagacacgagcaccgagagcggg

SEQ ID NO: 495695 - DNA, 289 bp, Homo sapiens
tcatacacaacaaacgcaaatacacagagggaccctggaaacagaatccctccccatagagaaagacgcaggcacagagactcgagccaagttacccaacatgtcggtgtatgcagaaaagtccggtcacatcacacacagcacagaggcacgcagcgaaggcagtggcattcacaggactactttatattaccgtttacttacctttggcacatctcctgtacaggcaacaacccattggattaagtagagttttgccacaagcaaaagactctcactctttggcaca

SEQ ID NO: 495696 - DNA, 255 bp, Homo sapiens
gataacctaattacgccctcatcacgcaggcagtcccagccttctcttccaagtctgtgtcactttgcaatgtagcatttagaagacagacagaggagccaggggatttgctcaaagtggtagagctccttagaggaggagctggaaccagcatccttgtgccctaaccccccgcccactgctttggccaaaaataccttcttaccgggtgtgtattgaccccctactcaacagcttgtaacccaagcccttaac

SEQ ID NO: 495697 - DNA, 111 bp, Homo sapiens
tccacactgggttcgagttcagagtgagggccagcagacagcgcgacagcaaaggctacagagacacgggctctttgaggaagagaatgggataagaaggaccgggaggaa

SEQ ID NO: 495698 - DNA, 1648 bp, Homo sapiens
  misc_feature (237)..(237): n is a, c, g, or t
cccgcgtgtgtgtctgttagtgtcggtgcggtggtgttacttctctcgatcggtgttatggtggccgtctggggtttttgtgtgtctcccctgtctttactgtgtgagtgggtgacgtcttcatcgcaattgtgtcggcgccctccttgtgtttgccgtccctacctgtgtgaggtggagggtgtgctctctcttatttcgttttctcgtcgcccgagcgcgggcacctccactctngtggggggcgaccccccgttgtgtgggcttttcccactcagggtgggcaccacggtcgtacttcttgtctttttatgaaggggcataatgatgtgttggtggcgacgatctgctgtggctgccctacgattgcttccccaccagggggtggctcctcttggggggggtaggagacgcttttgtttcgtcatgctgcgagcacaagtttatgagtgcgacgcaaagtttggtgttgggcgccacgcttgggtaaggagcccgctcgtgcttcagtagtcgtcaccagacggcgtgtatgttgatgcctcttccctccacggaggtgattttactcctgggtgaccccgcgagagggggccgtcttgtggtctttgagaaagcttgttggtgccttcgtcgtcgcccacccctgtgggggggcgcccccccctcgccccacaatgtgggtcttgggggaccccagctcttttccatctctgatcgtcctgggagaccccctgtgtctgacgcctctggacccccgagattcccccagcgccagcccctttccctgggggatgcccaccagggcgatttttctttgtgtgtggtgtatctgttgaacccccacccacggggctggtggagcccaacacccagagagacgcttgtttctcactcgggaatggactacttcctctgtatgatggttatagccgactagccgttatcccacgatgtggccgccctggtggtatacacacacacgaaatgttcttccgttctggccgctcctatatgtgtggagacaccacttgtgggcacactgtcccccacatggcacacacacacacacacgggggaggctctcacactccacgggtggggggttttaaaatgtttgtgtgtgaatgtctctggcctctgaggagaaatttttttgtccacacatgccggtggcacaccacatgttcccgcgtgagaacacacaccacatgggagggtctacatgtccgtgaatcttgtaacttttaccacagaggagttccctgaaagaagaattgtgaaaaagagaagacccagagcttgtctgtctttgagaaagcgccagtgcacccagggaggaatttccagggtgaatggactgctccccgctccctggagttctcacatgcttacctccaccctggaggttccacagaacatggtttgcaaggtgtaccaggtgccctctgtgcctattctagccaattccctactgaagaactggagcgctcagcctgcccacggaagactggtttcgccagctccccactgctccaggcccactgaatgggttaggaccaacccctgactggtcttaagaccctttttgcataggcttttaacccagcctggaaaaatggttgatggaaaattaacatccagtttt

SEQ ID NO: 495699 - DNA, 316 bp, Homo sapiens
gctactcttctgtcatactcagttacctcacgtgatccacagtttgatacacatgctcctggtggttcacaaaatgatttcaggtggtcatgtgggtgcatgtttgttacaattgataattatgtgcattcatgttcagggaaaaacctagcatatcagcagttgcaaatttcatgccatcattcatttctttggcaggcaggctaagtcattgctttttcaagcacacacaggtgcacttcaaacaacaatgttcacatgcagtccatcagtcccaacatgtgcagttagcattccttcacagtatcgcagcata

SEQ ID NO: 495700 - DNA, 165 bp, Homo sapiens
gatagggaaatggttttgtccatgttcttggaaatacttgggtatgtacagaaggaagggagggatgatttttctacaaagtaatttatgatttctaattttctaatggcgcttggatatgtgccaaatgatgggaaagaaacagtgaactttatgagtcttgga

SEQ ID NO: 495701 - DNA, 1170 bp, Homo sapiens
  misc_feature (45)..(45): n is a, c, g, or t
  misc_feature (203)..(203): n is a, c, g, or t
  misc_feature (205)..(205): n is a, c, g, or t
  misc_feature (442)..(442): n is a, c, g, or t
  misc_feature (474)..(474): n is a, c, g, or t
  misc_feature (513)..(513): n is a, c, g, or t
  misc_feature (637)..(637): n is a, c, g, or t
  misc_feature (767)..(767): n is a, c, g, or t
  misc_feature (967)..(967): n is a, c, g, or t
  misc_feature (994)..(994): n is a, c, g, or t
  misc_feature (1039)..(1039): n is a, c, g, or t
  misc_feature (1042)..(1042): n is a, c, g, or t
  misc_feature (1051)..(1051): n is a, c, g, or t
  misc_feature (1054)..(1054): n is a, c, g, or t
  misc_feature (1064)..(1064): n is a, c, g, or t
  misc_feature (1168)..(1168): n is a, c, g, or t
ctctatatcattgatcaacattgataatctgaatggtttaaaatntttccatgacattaacaactctaatttacacccttctttaaattactgtcattattattgttgttttctttttgagatagtgtctcactatgtagccctggttggcttgaaactcagagcaatccacctgcttctgccttctgagtgttgatattaanangtatgtgccactattcttgacctgaaacagtattttaagagagaattagccttatcttgctgtccaggcagagggcctatgtgatgtccctctcaattcatgtcacaacaaaaacaaaaaccaaattcacacagtttctggaacacttgatatcctgccagtggagaaggaggatgtcctcaaattctttgcagtaagaacccccttaggtggcaccaatcttgtcttccttatggnacagtaaatcttccaaagacaaagtgagaggntttacgttaaaacaaaacaaacaaacaataacccgaggnggagctgggagatgctgctgctttcagctccagccattactggcattgggaacctgcagatgtcaacttcattgcctccaggaacccctggggccagctagctgtcctgacttttgctcctgcnaaagactttcattactcaaactaagaggacttcaggaagcgatggcttttgctagtcaccaatcccagagctgatccccagcccatcacaaaggtgtcttatgtcaacctgtctgccgttgctctgtgtnacgcacattctcctcagtactattgacattgacattgcatgcaacaagggtactcacccagtgaatcctacttggtggatgttggcttgggaagttctgcacacatgtgacaccatctctggggagcacccatagttctcatcaggtcatgtctaatctctactcctatagggagcctgaagagatggagaaggaaaaanaagtgtagccgaaaaggctgtgactanaaaaatctgtcagtgtggaaggactatacctgctcctgagttcantgntccttgganaangtggaagaanggaggtttgaaggtgtcttctgtgcccaaccagaagttcccagtgaagacttgatgttcagacactccagggactagtctgcaccgctcatgccactgaatcanat

SEQ ID NO: 495702 - DNA, 136 bp, Homo sapiens
cgtatgacgaggaggaagaaggtgacacaggaggatacatagtagaagtagcatatcttgttacgagcgaatcagaggtgtgatgacgcgttattgtctgaggttgacgaaagacacaagttgtgaactaagactg

SEQ ID NO: 495703 - DNA, 865 bp, Homo sapiens
  misc_feature (584)..(584): n is a, c, g, or t
  misc_feature (760)..(760): n is a, c, g, or t
  misc_feature (771)..(771): n is a, c, g, or t
  misc_feature (789)..(789): n is a, c, g, or t
  misc_feature (798)..(799): n is a, c, g, or t
  misc_feature (804)..(804): n is a, c, g, or t
  misc_feature (824)..(824): n is a, c, g, or t
agcggcctgcgtcctccgcccgcctcttttccgccgccgcctgggaggggacccgggctgccaggcgcccagctgtgcccagatggatgggacagagacccggcagcggaggctggacagctgtggcaagccaggggagctggggcttcctcaccccctcagcacaggaggactccctgtagcctcagaagatggagctctcagggcccctgagagccaaagcgtgacccccaagccactggagactgagcctagcagggagaccgcctggtccataggccttcaggtgaccgtgcccttcatgtttgcaggcctgggactgtcctgggccggcatgcttctggactatttccagcactggcctgtgtttgtggaggtgaaagaccttttgacattggtgccgcccctggtgggcctgaaggggaacctggagatgacactggcatccagactctccacagctgccaacactggacaaattgatgacccccaggagcagcacagagtcatcagcagcaacctggccctcatccaggtgcaggccactgtcgtggggctcttggctgctgtggctgcgctgctgntcgggcgtggtgtctcgagaggacagtggatgtcgccacaggtggcacgttgctgtgtgccagcagtgtcctcactgccttccttgcagcctttgccctgggggtgctgatggtctgtatagtgattggtgctcaaaagctcgggttcaacccatacaacattgccacgcccattncagccagcctnggagacctcatcacactntccattctnnctttngttagcagcttcttctacanacacaaagatagtcggtatctgacgccgctggtctgcctca

SEQ ID NO: 495704 - DNA, 846 bp, Homo sapiens
agcggcctgcgtcctccgcccgcctcttttccgccgccgcctgggaggggacccgggctgccaggcgcccagctgtgcccagatggatgggacagagacccggcagcggaggctggacagctgtggcaagccaggggagctggggcttcctcaccccctcagcacaggaggactccctgtagcctcagaagatggagctctcagggcccctgagagccaaagcgtgacccccaagccactggagactgagcctagcagggagaccgcctggtccataggccttcaggtgaccgtgcccttcatgtttgcaggcctgggactgtcctgggccggcatgcttctggactatttccagcactggcctgtgtttgtggaggtgaaagaccttttgacattggtgccgcccctggtgggcctgaaggggaacctggagatgacactggcatccagactctccacagctgccaacactggacaaattgatgacccccaggagcagcacagagtcatcagcagcaacctggccctcatccaggtgcaggccactcggtccgtgggggcctctctggcctgccttggtggcctgcgccctgctgttgggcgtgggtgtctccgccgcagggaccgtgggcttgtccggccacggggtgggagtctggcctcgtgttgccagccatgttgttccctcaacgtggcccttccctatggcaagcccctttgccccttgggggttgcttgagtgggcatgtattcgtgcgatcggtgctcggaagcctcgggggtccacccagaaacctctgccacggcccattggccgcccgcctgggacaccttcattcccattgc

SEQ ID NO: 495705 - DNA, 757 bp, Homo sapiens
  misc_feature (476)..(476): n is a, c, g, or t
  misc_feature (652)..(652): n is a, c, g, or t
  misc_feature (663)..(663): n is a, c, g, or t
  misc_feature (681)..(681): n is a, c, g, or t
  misc_feature (690)..(691): n is a, c, g, or t
  misc_feature (696)..(696): n is a, c, g, or t
  misc_feature (716)..(716): n is a, c, g, or t
agcggcctgcgtcctccgcccgcctcttttccgccgccgcctgggaggggacccgggctgccaggcgcccagctgtgcccagatggatgggacagagacccggcagcggaggctggacagctgtggcaagccaggggagctggggcttcctcaccccctcagcacaggaggactccctgtagcctcagaagatggagctctcagggcccctgagagccaaagcgtgacccccaagccactggagactgagcctagcagggagaccgcctggtccataggccttcaggtgaccgtgcccttcatgtttgcaggcctgggactgtcctgggccggcatgcttctggactatttccaggccaacactggacaaattgatgacccccaggagcagcacagagtcatcagcagcaacctggccctcatccaggtgcaggccactgtcgtggggctcttggctgctgtggctgcgctgctgntcgggcgtggtgtctcgagaggacagtggatgtcgccacaggtggcacgttgctgtgtgccagcagtgtcctcactgccttccttgcagcctttgccctgggggtgctgatggtctgtatagtgattggtgctcaaaagctcgggttcaacccatacaacattgccacgcccattncagccagcctnggagacctcatcacactntccattctnnctttngttagcagcttcttctacanacacaaagatagtcggtatctgacgccgctggtctgcctca

SEQ ID NO: 495706 - DNA, 1045 bp, Homo sapiens
gctgggccgagagcgggtggctgagccgggacctcgtcgttgattctcggaaccctgaggagaagcggctgtccggggctatggctgtgactctggacaaagatgcttattatcggcgagtgaagagactgtacagcgaattggcggaaaggagaagatgagtatgccaacgttgatgccattgttgtatcagtgggtgtagatgaggaaattgtgtatgccaaatcaactgcgcttacagacgatggctctctggttatgaactaagctgatactatcatggttctcgatgtgagtgacataaagtcactactgtatggcacagcagagaaaaaagtgggagttcgttgaacacagagttgccagacacgtaagggcaagtgagaatggctaatggagccccgtggcatcacagctgctactacggagactacgaactggaaagctaactaaggagctaggctcttgacaccaatgactcgcaagcccgtttatcgagcacagggcaccgcactggccctcaaggacttgcgacgtgtccaggccacacacgcaccacagtgcccgtggcaagcaacgctgcactctgaacgtagcctcgcgtacactgcactctgccccttccaatacctaacgtacatcggcctactcgcacccaacagcgtcgcagtattcacgcggccacgtgggcaggcacactcttcccgtacctcagtcccggatctggctagcacggggaacctgcgctcgcccgacgcacgcctctagccccacgctaccgtggactccgcaagaccgccacgtccccagaccctcccccctccccctctcgaaacacttcctatccaacccccccaacatcacccctttccacacgcgccacccatcgacctccccttgcaccccacacaaggtcctccaatctgcccacccccatcgcatctcacccacaaccctatcccgcacgccccacccaacaaacaatcccggcccctcccacatccttatcccgcccacccatccccccatcttccaacacgcacaa

SEQ ID NO: 495707 - DNA, 204 bp, Homo sapiens
ataccggcaacacgatagtgaaatcagtaccagagcttgaagaccaggataccacccaggaaaacacacaacaagcccagctggcggcagcagctgaaatagaagaagaaccagtcagtaaagcaaaacagagtcggagtgaaacgacggcacggaaggctatgtccaaacggggtcttcggcaggttacaggagttactagag

SEQ ID NO: 495708 - DNA, 173 bp, Homo sapiens
taatatgcctaacaagacagttctacaccatgtgtacgactcagataatctttctagtagcgacgacttggttcgctatctgattgtcacaatacgcgtatagaaagggaactatatgggtatcttgctctctcgacagtcgtagagactctgaggagagacataggtagaga

SEQ ID NO: 495709 - DNA, 169 bp, Homo sapiens
gtacgagccgaaacgggccctactcctcctaggactaagggtgacgtagccgcgctatgacctaaaagcaagtttcacagcaccaaatctccacctgcatcatcacctctagccaaaaaggcataattaaacttcacttcctctctttcttcttcccactcatcctaac

SEQ ID NO: 495710 - DNA, 344 bp, Homo sapiens
  misc_feature (16)..(16): n is a, c, g, or t
  misc_feature (97)..(97): n is a, c, g, or t
  misc_feature (247)..(247): n is a, c, g, or t
attcaaacctcatctnccctgaggggtcccctggggagggggcttgaaagggctgcatccccccaaagggaggggcatccaagtcttcccctccctnccccaagagatcattgtcttttacccatttgaaagcactttcaccttgttcctcatttgacacccctaagaatcagataacccagagatttttttgatacccgtttttcagttacagaaactgaggcttggcccaggcgtggtggctcanacctgcaatctcagcactgggaggccaaggtgggcagatcgcttgagcccaggagtttgagaccagcccgaggaacatggcgaaaccccatctctac

SEQ ID NO: 495711 - DNA, 1282 bp, Homo sapiens
agcgggcttcgggtccggtccctgtgcggcatttacacttccctcttagaactgcctttagtggcatcccagtagagttggtgaacgcacattaagtagagcctagtagatccttggtggacaaatggtcttcagtgatcttacatcgagggactgtgcgatcttatatgatgaagtgggatctaagagatgctgatccataggagttgaagagtggacgtgccgtgcatgtcgctcagtcgcgtcatgcgcggcataaccgcatcacgtccttcagggagtgctctatgtgtcatatctattgctaccaacgttcgccgtctgggtgcacccggaagagtctctcatgcgcatacagatcgctcatagcccgttgtggaaactcaagagaaaacgcgacatggggattcacacgagtgcatcgaaactttaatcctactagtgagtgtgcacctccttgatgtctacctagccttggctgcatacattgtgtggctcctcattggccagagtctctggctaggcatcgctgcgtgggacccttgcggtgcgcatgatccagggatcctgattgacgcatgtttcccgtgatgctcggcaccagtacccggtcctgcagctttgaatctgccgagcggagacttctaccgcaaaaggccaagcgcgtctcattggcaaagcgggcaatagaggacccatcccgtgttgaacccccctaaggcgctccggggccgtatatgacaattttggagccctcttgcgtcctccgagaacacacttcttgctcaactcctccgggacggagccttcaaactgcttgcgcagagcaaatatcaaccaaggaaacatccaccatttcttatcatgtcatacagggggctaccccttaggtaccgggcccacaacagggacaatcggcgggcaaagttttacgcgtgcacgcccaatagggcatttgacacaccatttctctcgcccaaatacatcgtcccacctcgggtttcagatattcgcccccgaacttcctgacgcttgagtcggcccgagaccttccccaatttgggccccctccggactgcgtggcggacagcccccgcttgggcgcccttgcgggacatctatctgggcggagcgtttttccgcacagcacatttgtcctggtccgtggggcgactggcgcgcttggggcgcccacccgggcgcgccaaccagcacccgattttatgcccgacacttgtgctcccccccgcgttctccgttgtatgccattctcaccgagggt

SEQ ID NO: 495712 - DNA, 681 bp, Homo sapiens
gacggcgatggagaccctcatcaacgtgttcaacgcgccactcgggcaaagagggggacaaggtaccagctgagcaagaaggagctggaagagctgctgcagagcggagctctctggcttcctggaagtgaaagagcttaatgctgtaggccacagaagccctcaagacctttgaggaggcctagaagagtcccataaggtcaaagcagttcctcctcgcgtcatgctttgcctcctgctcctcaaaccatcccccttgcctctgaactcagtgctgtacccttccctatatcacctcccttttcctctcctcccacccaccaggcccacgaaggaatgtggatgctgtggaccaaggtgatgaaggaggctatgacgagaatggagacggggaaggtggacttccacggagtaatgtggtgcttgtggctgctctcacacgtggcctgtaacaaatttcttctgggagaacacgttgagcagacagccaccacattgggcagcgcccttcctctccacccctcccagagcctgccttttccccctgcttccacctcaccccacttatccctttccataaccccacccttgcccaccccacccccacccccaccaagggcgcaagagtacggtccaagcctgcaaatcatctttcattaaaggcttctctctcaccagcca

SEQ ID NO: 495713 - DNA, 707 bp, Homo sapiens
aatctgcgtgagcctgcgggacggctgtgcggtgtgcgccgtagtgcagccgggacagtgttgtacagtgttttgggcatgcacgtgatactcacacagtggcttctgctcaccaacagatgaatgacatgatgcaccaacgatggctgatgggaaccatcctgtagaggtccatctgctgttcagacccagacgatgccatgagctatgacttgggcctgcaggtgtggctgccagaggggagatcagccatggagcagccacagtgatggaagcccctgagggtccgggaagaggaggagaaagacggaatgtgtgcaggaggcatgatatgtgagccccagatgctcaatggtggtgaccacaagcatgcacttccttccagcatgctacacagacctctcccggagctcctcgccaacctcactgctggaccaactgcagatttggcttgtgacgggggcctcatgcggcagcctcaacatggcagtgaccgggtgtgcggggacaaggcatcgggcttccactacggtgtacatgcatgtgaggggtggaaggggcttcttccgtcgtacgatccgcatgaagctggagtaccagaagtgtgagcgcagctgcgagatcagaaggaggaccgaacaggtccagactgcggtacaaaggctggatgggatgtcaaaaggagcggtggcggtcggagctgaaga

SEQ ID NO: 495714 - DNA, 932 bp, Homo sapiens
  misc_feature (685)..(685): n is a, c, g, or t
  misc_feature (698)..(698): n is a, c, g, or t
ttagggttcgtcgaccacggcgtcggaagacgggggcgcagcacacaagaagccctccgcccaccgcccagccggacggcaccccaacaaggcgcggcgccggctccggactcaggcggactcagccacacaaggaggggaggaacggccggcacccaccccgggggcccaagatgccctggggaactgatgcgaaccagcagagcgcggcgggtcaggcgtctgtttctcagccagcgggagccgcgtggcctggttaagccacgatagcaccgtctgcctggttgatgccgacaagaagatggccgtcgcgactctggcctctgaaatattaccactgctggcgctgaccttcatcacagacaacagcctggtggtagtgtgcacgattgcttcccggtgctgttcacctatgacgccgccgcggggattctgagcttcggcggtcggctggacgttcctaagcagagctcgcattgtggcttgacggcccgcgagcgcttccagaatcctggacaagaaagcgagctccgagtgtggcacgtttctggcgcgtgcctatactcgctgcacaagaacagtgtcagacatatttcggtgctcagcggtggcaatgacaagtgctcgcagttctgaaccaatggcatggatggcggcatgagtatctgagatgtgaagagctttncagtcagctttanggactcagcatcaatgactgtgagaatatgttgccttctctaactgtggggaacgggaaaggtaaggagctcaggtcttgataatttttggtttattcaatcccttgttttcttaaagaggacaattggatttctatagaaattttttcaattattttaaaaaaggcttattttggcattcctttacagctaatataaaggctaaaaatttaaatgttaaattttatgttttag

SEQ ID NO: 495715 - DNA, 126 bp, Homo sapiens
tctagagttaaccgcagctgttcctgttcgtctggtaagtcgaatcatctcacacccccaggtcatctgagcgacgatgttgcgttgactttcgtatgctgcccgcgtagatctgtcgtcttgcgc

SEQ ID NO: 495716 - DNA, 730 bp, Homo sapiens
aacgaaaacatctagaagatatgaagtagttaaaaaaaaaaaagggcaaagaaataaatatacaccaaaaaaaaaagataaattgtagctataaatataaaattaaataaccagtaaataaaactataacagttctaatacaaaccaaaaccagcctgaaagacccaaccttaaaaaatagctaaaaaattaagggcataaatactagcataatatatggagtataaatattccatatactactaccctataccctctagtaatagtaatagcttaacctagatactgcctctagagggctaatacagagaaaaccgggttatccgagtttccgaactacaaataaagacctccaaatgtacctgaaccaaagtattcggtataatctagcagagggtaatattgagtaaggaaggctaatagaacatacattattttcaactaaattaagtaaattaaagatccgtaagcgcccaaatttaaaattcttccattggaatataactaggaaatgaatataaccctaattaccgtgcctagcccttgccaagaaataatgtataaacaaaagaaaacccaaatccaccccaatgggcttaaggagatactaatccttaaaccgaaccgcaaagctttggaaactcataacctaggccgaaacagactttgacttaaattcgtccgggagaattaatgtaaaactagtagaacccttggtaaaacatccaat

SEQ ID NO: 495717 - DNA, 681 bp, Homo sapiens
  misc_feature (359)..(359): n is a, c, g, or t
caaggcatctccagtagcagaaagcccaaaagtcatggacgagaagagcagtcttggagaaaaagctgaatcagtggctaatgtgaatgctaatactccaagcagtgaactagtagccttgacccccgccccttcagtaccgcctcctacactagccatggtgtctagacaaatgggtgactcaaaacccccacaggccatcgtgaagccccaagattctcacccacatcattgaaggctttgttatccaggaaggagcagaacctttcccggtgggttgttctcaagttactgaaggagtctgaagaagccactacagactggccttccgacagggctggactggagaatcagtcaanggtgggccctttggggaagtgggacagcccaatctgctggaggttagataaagaagggcgaaatctcctgaagtgcgagtactgtgggaaagtacgcccccgcaagaagcaagttttcgtggctcctaaagaaggttctgctccatggaacttgcgctaaagaggtacaatgtgagcctgttagccatcaagttcccggctgaagaaggaaaaaaaaatgaaaggaagtttcaaagaaagccaactatggctcgccgttcgcaagggcggtggacccccgccgcagctcctcctggacaattgccccgtgccaaagattcaa

SEQ ID NO: 495718 - DNA, 673 bp, Homo sapiens
  misc_feature (55)..(55): n is a, c, g, or t
  misc_feature (101)..(101): n is a, c, g, or t
  misc_feature (265)..(265): n is a, c, g, or t
  misc_feature (282)..(282): n is a, c, g, or t
  misc_feature (300)..(300): n is a, c, g, or t
  misc_feature (344)..(344): n is a, c, g, or t
  misc_feature (352)..(352): n is a, c, g, or t
  misc_feature (385)..(385): n is a, c, g, or t
  misc_feature (527)..(527): n is a, c, g, or t
  misc_feature (538)..(538): n is a, c, g, or t
aaatcgagctcggtaccggcatgtgctgtaggccagcgatgacgacgaggagggnaggtagaaccttggtccatattcagtactgctgggttgtgtgttgncagaaatggtacatagttcaggtgtcacccagccttatgcttcctgactaacacttcatggttagggaacactttcttcattagtgggaccttgggctgaaaatgttatgaggccaggctcctgtaggggactggggcctaaacctgaatttttctgaatgccnggaaaatctatttggcnatttgctattttactccnttctgaatactattttacttctaaccgtgtgtgttgaaaagccnaatatgcnagattacttcagaaaaaattttttttttttttngagacggagtctcactctgtcacccaggctggagtgcagtggcatgatctctgctcactgcaacctctgcctcctgggttcaagcagttctctgcctcagcctcccgagtagctgggattacaggtgtgcgccaccacaccnggttaattttngtatttttagtagagacggggtttcaccatcttgggcaggctggtcttgaactcctgacctcgtgatccacccgctttggcctcccaaagtgctgggattatagccgtgagccaccgcgctggcctcagcacatg

SEQ ID NO: 495719 - DNA, 785 bp, Homo sapiens
aggcaccatgagccaggacacctgaggtggatatgaatggagtgtggagctgaatgagttagagcccgagaagcagcctgatgaacgcggctgtctgtgtgtgcgtgccatgtccctgtgcgtgtgagcctgagaagaattggtcttggttgaatgatcagagggtgtgctggaatgactgatggctgtgatgtgctgtgcatgcctgctgtgctaatgtttcactgtgtgccttgtaccaatgtgatggatgcttgcttgaatgtgttgtgctatggcatgccctcgtgctggtgtactgcagccctgcttggtgctacttgctttgcttgtctcttcttggctctgtgcttgtgctctgtgcattgcattgcttggtgcctgtgtgtcagtatatcatgtgctgatgctgcctgcctggatgtacgcagatgctactctgtgttgacagaagtgtgttggacacacagtgagacctgcccttactatcctgcatctggcgaccttcagtgccttccatgtggcccatcgtgctgctggtgtcaaaccttgtgctgtggtcttgatatgtggtgcgtctacgatttaaccttgatgctctactgcataggttgaattgtgccttgttgctagggtaccaattcactaagaacactcagaagggatgattgtctgctcagacttaactttgcttgcagatcgacccccaattgtggcatccagaggaagacttctgagagtctcttgcaatcgggttgcaaacacgagcattcctgggtcttctg

SEQ ID NO: 495720 - DNA, 526 bp, Homo sapiens
  misc_feature (79)..(79): n is a, c, g, or t
  misc_feature (93)..(93): n is a, c, g, or t
  misc_feature (110)..(110): n is a, c, g, or t
  misc_feature (113)..(113): n is a, c, g, or t
  misc_feature (120)..(120): n is a, c, g, or t
  misc_feature (132)..(132): n is a, c, g, or t
  misc_feature (135)..(135): n is a, c, g, or t
  misc_feature (156)..(156): n is a, c, g, or t
  misc_feature (168)..(168): n is a, c, g, or t
  misc_feature (224)..(224): n is a, c, g, or t
  misc_feature (244)..(244): n is a, c, g, or t
  misc_feature (250)..(250): n is a, c, g, or t
  misc_feature (253)..(253): n is a, c, g, or t
  misc_feature (265)..(265): n is a, c, g, or t
  misc_feature (267)..(267): n is a, c, g, or t
  misc_feature (274)..(274): n is a, c, g, or t
  misc_feature (289)..(289): n is a, c, g, or t
  misc_feature (292)..(292): n is a, c, g, or t
  misc_feature (294)..(295): n is a, c, g, or t
  misc_feature (307)..(307): n is a, c, g, or t
  misc_feature (312)..(312): n is a, c, g, or t
  misc_feature (319)..(319): n is a, c, g, or t
  misc_feature (325)..(325): n is a, c, g, or t
  misc_feature (345)..(345): n is a, c, g, or t
  misc_feature (382)..(382): n is a, c, g, or t
  misc_feature (387)..(387): n is a, c, g, or t
  misc_feature (396)..(396): n is a, c, g, or t
  misc_feature (406)..(406): n is a, c, g, or t
  misc_feature (423)..(423): n is a, c, g, or t
  misc_feature (446)..(446): n is a, c, g, or t
  misc_feature (448)..(448): n is a, c, g, or t
  misc_feature (455)..(456): n is a, c, g, or t
  misc_feature (460)..(460): n is a, c, g, or t
  misc_feature (462)..(462): n is a, c, g, or t
  misc_feature (497)..(497): n is a, c, g, or t
  misc_feature (499)..(499): n is a, c, g, or t
  misc_feature (502)..(502): n is a, c, g, or t
  misc_feature (510)..(511): n is a, c, g, or t
cagggtgccttgaaatgaaaaaaggagttggacccgtccgcaagtaaaagtttaaaattcggggcgtgtgttatggggncacaggcaccaaantccgccaaggccccttnaanaaggggngttacaatgttnagngccagaagaccatcggggtcnccaagccttgcncccccaagaccaaagcaaaggccaaagccaagaaagggaagggaaaggattaaacnccaagcttggatgccaaggngccccnggngtcaaatggggntnggcccangccctccttttcccnggncnnaaatgtgacccnccagngcctttngttggntggttagctttaaaaataangcccggccttgtccttttcattccccagccccccccntaagngcccaaagnggggaggganaagggattttgggaagnttgagcctcccccaaagaaatgngngtcccanngccngnttttgtttttccccccaattccattattaaaaaananatnaaaaaaanngattttttcccccca

SEQ ID NO: 495721 - DNA, 133 bp, Homo sapiens
tcatttctagatctgtgtcttaaccttggcactcactttcactctccccttacgttattgccattgacttgcttgtctctgcacccgcccttgcgcattcacattcactctctcaactgcagtggccaactgt

SEQ ID NO: 495722 - DNA, 467 bp, Homo sapiens
  misc_feature (7)..(7): n is a, c, g, or t
ccttaancctccttatacatgctagtggtaatgtaaaatgctgcagttactttagaaaacagtctggttgttcctgaaaagattaaacagttaccatatgacccagcaattccactccttagcaaaataacataagtgcctaccaaaacttatacattaatttccctagcagcattattcgtaatagccaaaaatggaaacaactcaaatgtccttcaactggttaatgaattaaagtggttattatccatacaatggaatattatttgggagtaaaaagcagtgatgtgatgattcatgctatggaaatggattgacctagaaaacattatgctaaatgatagaagccagacacaaaaagctacatagtctaggattctctttgtatgagatccctagaacaggcaaatctatggagataggaaataaatcagagtgggttagagggaaataggtagcgactgcca

SEQ ID NO: 495723 - DNA, 341 bp, Homo sapiens
gatagcctgatgtgtgatctatctccttcagcaggtcctatcttgtagaggaagagtgatagatagacgtgtctgtgaaccacttgttgttgcagatgctatcgaatagcttcatgctctcatgcatgcggttcatctcctcgtcctccgctagcaccaggtcataggtgctccctgcttcacagaagatgatggctgtgacgccctcaaagcagtggatccacttcttccgctcagaccgctgaccacccacatcaaacatcttgaagtgtaggtccttgaaggtgaagtgtgtctccacgatccccgtggtctttacgcgggtccatctgacccatctt

SEQ ID NO: 495724 - DNA, 311 bp, Homo sapiens
gatgcatgggtaaagaaaatgggagctgggcacagtggctcatgcctgtaaatccccgttctttggaaggctgaggcaggaggatcgcccgagcccaggaatacaagaccagcttaggcaacatagcaagaccctatctctataaaaaaataaaaaaaattagctggtcatgttggtgtgtacctgtggtctcagaatctcgggaggctgaggtggcgggattgcctgagccttagagggtgaggatgcagcgagctgtgatcacatcactgccttccagcctgggtgacagagcaagaccatgtccaaaa

SEQ ID NO: 495725 - DNA, 429 bp, Homo sapiens
ggcaaatggtgcgtgcggaacacgatctgaccctagttccatacggggagcctgtaagagctgaggccctacttcacggaccgtggttggcctatgcaccggcccctctagacgtgcaccacatataaaggctaatacccatcccctcagctgctcatcaacagttatccttccctgcgcccatcccaatctgggcatcgtcaagagacacttcgataggatagccgtgggacccagaccccagcacctgagtccatggtggcgtatgtagtcacatactgtggaggctcctaagctctggccaactgcggccctatattcaggacaatccttttcccaagcgctaagggctttgatcttcgcataccaccctactcatataagcccagcctggggctgtgccgtccacacgagttgacactggtcttg

SEQ ID NO: 495726 - DNA, 277 bp, Homo sapiens
cactgcaacctgaggaggatgacgatgaggatgaagaagatgatgatgactgatctcaggcctatgatagctcagaaagggacttctcactcattgatgatcatatgatcctagctaactcagacaccagtgaagttaatgatgagtgaagccccagcatgggccccattcaataggcggctactatattttcatgtaatctggccgatggactatggaaacgtgggaggagcaggggagatgtgcagaagtccaggactccaggaggtggaaagga

SEQ ID NO: 495727 - DNA, 1153 bp, Homo sapiens
gaagctggactgggcccgcgagagtgcttgagcagcaggttaactgtagagccaatgctgtttgcggcagtgatgagatgatcgacagatcatacggggtgacacaagggcgaaaggctatcacacatgagggtcaccgagtcgtttggcacacttaacgatacgctgccccgtcatagacccatcgacggcctgctgcgaaaggttggcctgtgatatgtggagcatgcgtcatccgtgcgtcagtgtagtcctttctgctgatagtgcaacggcgctggggcgtgataacggggctaccatgtcgcaccgacacttgacgactccatgatagaaccgactttagtacaggacttcggcccgagggtgccgtacccgtttatttcagatgggaccggggcaaaggccttgtttccagacgatacaacagttgggcttccaatcttgaactaattgaacgcgtaatcctagagcccagaagaaggtcaacttcaagacacaccattcgtggcggatggggccttttgtgaatccccatcctgttaggtgaggtggaaacggcttggaacaccaaaaggttgaaccgttaacgttgtctgatgccagtttgcgacaccaggcattggctgagttggtagtagagggaagcgcccaagggggaagaggccagggtgtatgccgtacaacaactcgttttcgcggaccaagagggttcaccctacagtacattgggtgtctgtgaccaagaaaccggcaagagtggcaggttggtaagctgtgaccgtcctgtggggacagggacacgtaacttttgtgaaccccctttataagacgatattcacaattggcagcgaatcacattgccaatttaccaagatggatagatgggtgctcccaattggagacccctgacaacaatcgcccgagccaagccgaactgggccaagagggaagacaactgaagacaacggccacgtacacaacaggagtgacaacccaagacgtgcgcgcggcgggaccagagggaaccaccggcacagcgttaggcaaagaaaacggaggaacacgcacacaggggaacaccgttacatagctgtggcccatgaggcagcagccaacggacatttaacaggccccaggcgctagtagcggc

SEQ ID NO: 495728 - DNA, 137 bp, Homo sapiens
tgcggctcagtgagaataagcaggtaagtgccagcccttcctgccctgaggcgtgcaaactcgcctgcaacccctactccatagccgcgtagttagatcgagccgcgtagtcagatctgagccgcgtatgtcagatc

SEQ ID NO: 495729 - DNA, 203 bp, Homo sapiens
ctctctatctgtctgtctctgtctctctggacctctctgtctctctgattctgtgatgcaacagtactcaacattattaggcacataagaaccttaggttaaaatatgtaaaaagtccatatacccggacatataaacactcgtggtcgtttgagattctgcagatgtacaatctccagcattccccctcaaacctaaaaaaa

SEQ ID NO: 495730 - DNA, 268 bp, Homo sapiens
ttttcgagacagaggattgctctgtctccaggctggagtgcagtggcgccatctcggctcactgcaacctccacctcctgagttcaagcgattctcgtgcctcagcctcccaagtagctgggattacaggcacgtgccaccacacccagctaatttttgtggttttagtggagaaggggtttcatcatgttgcccaggacgttcttaaactcctgaccttgtgatctgtccacttcgggcaaaaacagacaaggtcgacgcggccgca

SEQ ID NO: 495731 - DNA, 226 bp, Homo sapiens
  misc_feature (44)..(44): n is a, c, g, or t
  misc_feature (82)..(82): n is a, c, g, or t
  misc_feature (87)..(87): n is a, c, g, or t
  misc_feature (148)..(148): n is a, c, g, or t
  misc_feature (164)..(164): n is a, c, g, or t
  misc_feature (197)..(197): n is a, c, g, or t
gaggacagtctaccaattatcctgcacaatcccttccacgggtntatgaaagccgcacgatgcctccaaagtggcactgaanggaangagccctgtacggcataaccgcgttgggtacccaggtacgtaatgcacgccacccgccttnctctcctcttctccanttgcggttcctcaccaatcggggccttaggtcnatatgttaggactcaccaaaatgatagta

SEQ ID NO: 495732 - DNA, 267 bp, Homo sapiens
acatcaaacgtaaggggggatcttagaggaaggtttcgtcggatgaatttcgatcgttcttcgggaacatagtcacaaacacaggaatctgatctgttaccacgtacacatctttcactggtgcgaggggaacatatgcccgtccatgtcttctgtagacagtcactttcatgagtcgaggcccaagtgtcacatgggtgtgtgtcacagaaactctcactgaacatcgtcccaagtttctggaaatactgaccaggtgggtaccga

SEQ ID NO: 495733 - DNA, 211 bp, Homo sapiens
gaaaaaaaacaatttttcccggggtgtttttgtttttccaaaaaaaaagacttttttcccccggggaacaaaggggtttaaacttttttttggggttttgcccttaattttttttttaaaaaggccttttttcccccaaatttttaaaaattttccccccccttttttttttgatttttttttttttttttaaaaaaaaatttgccccgga

SEQ ID NO: 495734 - DNA, 163 bp, Homo sapiens
ggtttttagtaatttgattacaacaggtctggatctagttttctttgatttatttgtttggagtacactgaactttttggatctgtgaatttatgtctttcatcaaatttggagagtatcaactgttatttctttatgtttttcagcagccattttttccctc

SEQ ID NO: 495735 - DNA, 100 bp, Homo sapiens
attcaggtgattcgccacttggctcccaaagtgctaggattacaggtgtgagctactgcgccctggctaatggttgtatttttttgtggacatggggtga

SEQ ID NO: 495736 - DNA, 139 bp, Homo sapiens
gtgtgtcgagataagggaggatactgcaacctgtagaggtgctatgatttggtaatcattttagtcaagttcgattcaggcaagaatcatcagtggatgctacatccagtggtgtgggattcaatgatcatgcaggcta

SEQ ID NO: 495737 - DNA, 268 bp, Homo sapiens
  misc_feature (155)..(155): n is a, c, g, or t
cggcacgagcggcacgagctcagagccaacatcaaggagtagctgaagggctgggcgcagtggctcacacctataatcccagcactttgggaggccgaggtgggtggttcacctaagctcaggagtttgagaccaccctggccaacatggtgaancccatctctattaagaatatttttaaaattagccaggcatggtggcaggactgaggttgccatgagccgagatcacgacattgcactccagcctgggcgatatagtgagactc

SEQ ID NO: 495738 - DNA, 170 bp, Homo sapiens
ggggcccccggttttgggggggcctttttttttttcccccgggggggggatttttcccttttttgggcccccccttgttttttttggggggggggggggggcaccccccccccccctttttttttttgtttggggggttcccccccccctggggggtggggttttcccca

SEQ ID NO: 495739 - DNA, 1040 bp, Homo sapiens
ggaccagcaccattgcggttggcaacgaacatgcgccttacgaaaggcggtacaaaagggagccaagaagaaatgtggttgatccatttctcgtacagaggagattgcgtcactgatgtgaatagcaccatgcatactgttctagagtactatacgaagatcattcgcgaagggaacggctctgtcagcgcgacggactccaatgggaacccagaaattggcactctgcatggtctcataggggttcgtgtgtttgacaggtgacgtctcgtctgatttgcgagacatgaatgaacgattgcatttaggaacacaatttccacagtctgacttactgcatagtactgttcatgggatacacagacactgtcctgacctaatctgtccatggccactgagatgcattacccgcgttgtgatcaacaaactggtgttcccactggctcaagagagaactggtccggaactacgtgagttcgatacgctcacagttgatcgtcaagcactgacctgaatggttcacttagcttccgtctttgtatctggtgttcgagttgttcactcaaagagaacggcagagcaatcaagataccggaagacctacttatctgctcggtgccaatcaggtccgcctaaatccggaagaatgatgatggaaatctatgtaccccgagaggtgcagacaaatgacttgaaagaagtggtcaataaattgattccagacagcattggaaaacgacatagaaaaggcttgccaatctactttatcctctccatgatgtcttcgttagaaacagtacacactgcttgaagaagcccaagttttgcctttgggaacagctcatggagcttcatggtgacaacggacacgtagttcctgggaaaaaggccactgggggacgaggacagggtgctaaaagttgaacgaagcctgactggcatattgaacccaccagttccaagaaatctgtttaaagcttcaggaccttcaaatcagtgggcaaataacaaacggtgctcattcgtgaacacacccatca

SEQ ID NO: 495740 - DNA, 387 bp, Homo sapiens
  misc_feature (69)..(69): n is a, c, g, or t
  misc_feature (87)..(87): n is a, c, g, or t
  misc_feature (259)..(259): n is a, c, g, or t
  misc_feature (291)..(291): n is a, c, g, or t
  misc_feature (349)..(349): n is a, c, g, or t
agaaacccatggatccaacaagcttttccccccgaaatttgagaggttttacccgagatatatcgaaanacttccaacccatctggnccataggttaagggcctggatgtcccaaagtttgtaacaaaccctttgcatataatttaacccggggaccacatgccctagatttatgtcagaaatatctgttggttttccaagggttgttaacagatgaagtttatgtgcaaaaaagggtaagatataaattcaaggaagnaaaaaagttgatagctaaaaggtagagtgtgncttcgatataatccaatttgttttatgtcaaaatgtaagtatttgtcttccctagaanacctcagaatgatttctataataaagttaatttcattt

SEQ ID NO: 495741 - DNA, 150 bp, Homo sapiens
tctcttgtgtgcttgacgacgactgacgctggggtgactctagctacttcctgatgttgcccatctcatccttcaggctgtacatctcgagggaggttcatctcaggtaggccagtatggggcaggtcctggatctgttttaggtaccgc

SEQ ID NO: 495742 - DNA, 141 bp, Homo sapiens
ttccattcctgccatctagctgctggaactctgaaacttttatgcctctagccaagtagttcccgcctctgggtgcacaggtggaaccatctggggcattttcaaaaactcgtttggccctggcctggacccccaagaatt

SEQ ID NO: 495743 - DNA, 284 bp, Homo sapiens
aaacctaattacgccactgagtggaagccagagatcaaatattgcatcctcacgaattctgtgtagggttctgcatctttttaccttcccaccagcaatgcacaataattccaatttctccacatcttagcccacacatgtgggctttctgtttttatttttctatggataaccatcccagtgagtgtgacatggtgtctcgtggtggttttgatttccttttccccatggtcagtgatactgagtatcttctcatgcgcttatgggccatctgttggtgttcc

SEQ ID NO: 495744 - DNA, 553 bp, Homo sapiens
caaaatgaaaagttgatatcaggaatttattcttaaaatagaaacttatactatttttagtttattcccttaatatctcctttttccaaaatctttaaaggcagttttttggcacaggctatatttattaataattgacacattcttaaaatagagcccaatcaaaaaaaagatgagccctttaaggagaatataggtcaggggcagacctaccgcacaggcaaacagagaaatttccacctcctaaccagccaagaatgtttccatagatttaatttcaccttcttgcccttttcttcactttcacactctttccctcccaatacctggcccaccaaaggagtcggtacgttgtgagagccataggccattttattctgaattcctttacggtagacttggcccagaaacaatttccaggcccttggggtaattccatcccggccctcaaaaatgccaacccaccaccaagggagactcctggactctgcagccaggagccctcatcccaacagcccaagggcatagacgtaggtactgaggagcacaggat

SEQ ID NO: 495745 - DNA, 322 bp, Homo sapiens
ctgtatcttggcctcccaaaatgctgggaggcatcccaagttgctagggattacaggcatggaccaccatgcctggctaattttgtatttttagtagagacggagtttctccagattggtcaagctggtctcgaacatctgacctcaggtgatctgccctcctcggactcccaaagtactgggattacaggagccacagtacccggccttgttttgcttatcattgtgtcctgatgcaggtatgtgatctctttgagggatcaggaccacagcccccaacccaatttatattcccagtgtccatggtgggaccctgaatgaa

SEQ ID NO: 495746 - DNA, 103 bp, Homo sapiens
  misc_feature (36)..(36): n is a, c, g, or t
agtgaatgcgtaaaagttagtccgtattgttcttanaggtggaatcggttcctcctccccaccgcccagacgccacagtcaggttctgggattagaacagcta

SEQ ID NO: 495747 - DNA, 420 bp, Homo sapiens
  misc_feature (187)..(187): n is a, c, g, or t
gaccgcctgacggtgccggcagacgttgctcaggagctcgacaccattgacgttcctgaccagggtcttgccgtggccatccactcgagggtgtggtaatcgccgacttccggcaccatcagctcgtggccgatgtagccgggaccgccatcgaagaggaggcgtttctcccattcgtagatggccnggatcgaaataccaatccaccggtagttgcgtgggagtgcgggcgagacggcgacgttggccaggtcggacatgatgctcgtgctacctccgtgatcgtgagttgaagacagcgggttgcagcggtgcttggggggccgatcaaagcaaaaaggccgtccccgcggtaaacgcgttgtaacggcccttttctcgtcgtccccgggggaaagtacccccaaacaccccccgggc

SEQ ID NO: 495748 - DNA, 384 bp, Homo sapiens
gtaagttacagcgcaggagacgagtcccttataggagtgaagaggataaacttctcctccagaacaagtgcaatacagaaggcagctctgagttcgacctgcttgaatggaagtggtctgaagcttatactggcctcttgtctctagtgggccagcccctgaagtgctgaggtctaagtggttgacctcgggcggatagatggccaacactcttgtgagagtagttctcataagttctagaactggtagctcggtcgtttcggacactaggtggcagacagggaggagcaggtgttcatatccttgatttagagaatttcccctcaagtatgtggcagtaaatacaagaagacactctatgtattaatgtctccattggcttaa

SEQ ID NO: 495749 - DNA, 410 bp, Homo sapiens
ccaccgctctccacagactctttgtgatctgaaggcagtgggggagaggtgacccgtgacataatgcgcctttgctaacatgtggctaggtgtcttgttggcttgtgcatataactttatcataacatagcaatagcctgacacagaagactgcacctgatagttgtcttagcacatctcaaaattaaatgtttatgaatagactactttttcaagacaatgctatttcctgagacgtagtactttttctgctaactccattctttgatgcatactttctgtcagtcaatgctgaggatcctcctatggttgtggtccgaaaatttgtccacctgctggaccaaagtgaccaggattttcaggaggagcttgaccttatgaagattgcggtgtttggggtaccgagctcg

SEQ ID NO: 495750 - DNA, 1216 bp, Homo sapiens
aacaccatcttctggagcccccaacaccacgaactgtccttgggggctccagaagatggtgttggcgggcctgaggagtatgaacggtgccttagcagtttgtggacactttcggcactgcacggtcatgaacatcgcagagcactacatggacttccgacgtcgaatgggatcctactggtgcgctacgatcgtctaccgtctgatgtcctggtggagcctataaggtggacaacgcgtactggcatgtggactttccagggacgcctcctgcagaagaacaacaaggacctgcgttctgccagcatgctgtggcggccccggcctcccacactcctgagccaggaacagatcaacgcaatattaaaacaggatctgaacgaaatactctaagatctttgaacagaaggatcgtttgagtcagtccaaagcctcaaaggaattggtggcgagacaggcgcaccatgatggaagatttccggaagtaccggaacaatggcccaggagctctatatgcgagcagaaacaacgagcgccgtggagtcgcgaggagggcgtggacactgacgagcgtgcgcacaggcaacgtggacgacttgggaacgaggagaccattggagtgcttcgtcactgcgcgaactcattcccctcggggaatcaggagtgaccctggagcactgtgccgtgtgtgctcgtggagccgaggcgtcctgccgggcagccgccgtgactcccggctcgtaccctgtgctctctgcgtctggcctgtgacttgcgcctggatctctgccattgccacacatttttggactttcagcccctggggtctgcacgcggggacttcaggccccggtcgccttctcccttgctaggcagttttctggtttaaacccgcggatcctatgatccgtaagcacctcagcagggctcatgggggaccaccttcctcctgcagcccagggacgattcactggggtgcgcttatcacgaggcaggacaattcgcgagacgcagaactaccatgaggacaagcgacgatacaggaaacaccgatgggcgcactctgatccacccggggtgtgcggttcacaggtagacacaagacctgctgacataaactgcctgagtggcagaggcagcgatcacagcccatggcgaccgcctgtgcattgactgctcggagatacagagtcgctatcactatgactagctatga

SEQ ID NO: 495751 - DNA, 259 bp, Homo sapiens
  misc_feature (154)..(156): n is a, c, g, or t
  misc_feature (158)..(158): n is a, c, g, or t
  misc_feature (231)..(231): n is a, c, g, or t
  misc_feature (244)..(244): n is a, c, g, or t
aacttatgataacaatttatgtctagataattcaaggctgggcgtggtggctcacacctataatcccagcactttagaaggccaagacagggggatagtttgaagcccagaggtgtcagaccagcctgggcaacattagcagaatcttgtctgnnncnaaaaacatttttttttttaattagctagatctggcagcacgtgcctgtactccaagctactctgggggctgangttggaggatccnttgaagcctgggagg

SEQ ID NO: 495752 - DNA, 270 bp, Homo sapiens
ggacctcccggcgctgctcccctgccccgactgcgctgcggagggcaacatggctggcggccccggccctgctcctgccgagccccagcgccgctcggcgcgagccccgcgcgcctgcctgcctgctactggtgctggggccctgaagatggctgggccctggtggctgctggcccggtggaggcctccgggccaagcccgccgccctgcctgatggactgacatgcgactggcgactctttcttggtgctgctggaagttgccgcactg

SEQ ID NO: 495753 - DNA, 162 bp, Homo sapiens
tctctctacgtaagacttcagttctatgttgactcacaggggcgacagtgggcgtccttgccgaggtccagatcttagaggaaaaactttcaggcactccctattcagtatgaaactagctgtgggtatgccatatatggattttattatctcgaggtatga

SEQ ID NO: 495754 - DNA, 460 bp, Homo sapiens
gccattattcaatgctggtttaacaaagtctacatgttatgtgttaatgaagcaatattagatgatgatggtgccgttagctgcgtcaagattctgggctagacaattgaagtgaaatcttccctcgaccctctgcctttcccagtatgtcatatctctagagtgcaaatgtctcctgcccggctttaaaagaatgcagttcgaaagaggggattgttaagaacttttatttgctttgttatttctataagaactagagcttctttatgtaaacgttagggctttaaaaagtcactagatgctacattctagacaaacatttttatttcttcatttatcccaatatatctataaattctgatttcttaatcacgattctatttcctttaaaagtcttaacgcgaaactgttattgttctgtctactacctgctgtttaacaaaagcaaagtgtgcagcat

SEQ ID NO: 495755 - DNA, 271 bp, Homo sapiens
atacatcctcttccccacagtgagcttgtctattcgaagcttaagttcgcatgcaacgtggactcgaggaggctgaaggaaagagatctcgacaaatgccgttcctctgacatgaaggtttaggacagatctatcgaacaaaagtcgttgtctcgtggaagccctcctagacggtggatccccatacctgccctccagagagtattccttatttagcaagctttttttggtaaaatgtgcaactggtcatgtcttcaaccctcttgtgaaa

SEQ ID NO: 495756 - DNA, 929 bp, Homo sapiens
ttcttttcgttgccgtgatcgcgcgccatcatggactcgcattcatgctcccgggatagtggcctgtgccagtcggtcgttatatcctatcgtagcgcagccgttccccacttggcttgaagttagatcgatcatgatcgacgtgagactccagcagcatttacaaacgtggcctactcgatgggccgatactcctctcagaggatcgcgtagtcaagtcctgcaaacgtattgcgactggatgatcgcacattgtaccgtatccgtagagcaggccacataacatagttttcccagcacctttctcttaagtcttcagggcgaactttggtatcctgtatctatgtctgaaagaaatcgttcttagccaattgttacattctacctgcaatatgcccttgtgcattgtttcggataggggctaattcgttgcaagaacggcaactacgtagaacggcataaacgggactgcgtaaaagtgttcgcggtctcgcattacctaagtctggagacaggcccagcgacctctaccaactcggtgtatgagtttttctgaatcatgtgaataagaaggaactctaacgggcgcagtactctaactaccgtctcaccacattatggggcaaaagtagtagtacattcgattcttatcaatggcacgtactgggatccctggggtgctgcattaacagtataggtcctagttggttcacctacaaatgactacatgctcacgtcgcactacgttcaagggcccgtggcaaatttagaaaaagccccaaggaagaattacttccccgttttttccacaggtaaccccaagagactggattgaaagaaaagctttttaaattgtagctcccagttgttgaaaggcgttgctcggggccacaatggaaggcttttggcgctttactggaagggtcccc

SEQ ID NO: 495757 - DNA, 825 bp, Homo sapiens
  misc_feature (137)..(137): n is a, c, g, or t
  misc_feature (154)..(154): n is a, c, g, or t
  misc_feature (162)..(162): n is a, c, g, or t
  misc_feature (185)..(185): n is a, c, g, or t
  misc_feature (278)..(278): n is a, c, g, or t
  misc_feature (282)..(282): n is a, c, g, or t
  misc_feature (285)..(285): n is a, c, g, or t
  misc_feature (288)..(288): n is a, c, g, or t
  misc_feature (291)..(291): n is a, c, g, or t
  misc_feature (296)..(296): n is a, c, g, or t
  misc_feature (319)..(319): n is a, c, g, or t
  misc_feature (325)..(325): n is a, c, g, or t
  misc_feature (398)..(399): n is a, c, g, or t
  misc_feature (421)..(421): n is a, c, g, or t
  misc_feature (426)..(426): n is a, c, g, or t
agcggaagtcgcgaggagcgcggacggctgggctgctgctgggcggccgcggggcagcggagggcgccggcactccggtccccgccgctccccgtccccgctgctcctagcccctgccgcgtccccggcggacggcnatgggcgccacccgcgncgcctggnccgggaccgtgtgggccgtgagnatgaggacggctgggagacgcgaggggaccgcaagcccggaagcccctggtggagaagaagcggcgccgcggatcaacgagagcctgcagganctgnggntgntgntgggngggcgccgagggtgcaggccaanctgganaacgccgaagtgctggagctgacggtgcggcgggtccagggtgtgctgcggggccgggcgcgcgagcgcaagnntgcaggcggaacgagcgagcgnttcgntgcggctactccagtgctgcacaaggtgcacaccgttcgtgtccacgtcccaaggcccattcgacgctaccgttcgctgccgagctcctgaaccatctgctcgaggtccattgcccgctggcggtgagaggcagcaagcttcccagagatcttgctggggggacgcccttggcgggggcccacctagagccacctcatctcccaatattgcctgggtccgaccccccagtggccactaacggtggggatccttcagggcgctctcccagcaaagcatgtggccgccgagccgcgggatccacttggccgcagaaggaaaaatgccagcgtggaccagagtggcgcccgcaaaccctcggaagcccggggaatttgggatctcacacagaaataactggc

SEQ ID NO: 495758 - DNA, 398 bp, Homo sapiens
ggtacggaatgaattacaaaacagcaagtcattacagctggcctttcttccacccgtcatccccagtgtgagctctttttttttttgtgagatggagtttcactctcatggcccagacgggagtgcaggggcgccctctcggctcactgtaacctccacctctccgattcaggcaattctccggcctcagcctccccagtagctgggattacaggcacctgccaccacaccgggctaatttaagtagagaaggggtttcgccaggctggccaggctggtctcgaactcctgacttcaggtgattgatccacctgcctcggcctcccagagtgctgggattagaggcatgagccatcgcgccgggcctagattatggaattttggtattaccatgtatg

SEQ ID NO: 495759 - DNA, 298 bp, Homo sapiens
catgcgcgcaaggctgtctttcccctgccacgaccggaagtgtaggagagatctgcctctaccttgcgaccagatccaaccgtgaccgttcaagccgccaggatagatactaattctagttccccaaccgcctcaacctggtaggtccatcaactacatggtagctgacggtgacttcctgatcttctgtgtggtcttggactgagatcggccggtccatgggccccaatataggccgctcgcccctgagctgcagctcgcccctgagttagcagctcgccccctcagttgcagctcg

SEQ ID NO: 495760 - DNA, 993 bp, Homo sapiens
  misc_feature (1)..(1): n is a, c, g, or t
  misc_feature (544)..(544): n is a, c, g, or t
  misc_feature (546)..(546): n is a, c, g, or t
  misc_feature (963)..(963): n is a, c, g, or t
ntctagaaaaacgaccgtcctaggcctggccaattgggcccatgacacgtgacggggctgggaaagagacatcccaggatcaagtggccagagacgttgacggacagggggtgccggtggttggatccgcggccacctccgtccccggccgggaccacgttggggacccgtgggaggctggatccgcctcgccccccacgggcgatgtgggtctggttgaggagcgccagtcgggagggggtccaccctgttccccttgtccaacaacgacgggggtagtaccgccaaatcccaaccggaggatcgacaatgtgaagcaggcggtccggtggtaggtccacaaccttgcgcgggtccaccaccggaagatcaacgtccaaacggcgatggtcaaatccgaggacgacacacatggtccgacttacaaacattattgggactatcaccaaaagatgagagaggtcgaccacgacatactccatcctaacatcaggaatcgtgacattattgttgtgattcagaatcggaccatccgactccatcngntgaaggtgaactatcaaaatcaagagtggtttaacaaacagttccaaattcaactgcacccggtggcaacaggttacagaaggtcaggattctgagaagacaggtacaagaccacctccaaccaatcaccaaacacgtgattgtgatcaacaacgaggatcacgaccaaatccacaacgatgatctcggaactcagttgaatctgaatctcaacctccatagacctgggacccaacatgtcattaacctggtccaccatatcacagaacaatatcacgttataataaacaacaacgatgcacagttccagagttcctataaacaagactgtcgacggatctgggaccaccgacggactggacggagtctcgacacgacagaacctcagatggagcaagtcaacgcgagattggaccnggtccacattcaggtcgaccagactagacg

SEQ ID NO: 495761 - DNA, 563 bp, Homo sapiens
cggggggcccccccctgggggaggggggtttttttcccggggggggggcaatgtgccccggtttaccccccccgcccctgttattagggggggggggggggggcccttttgaacctgggggcttttccccccctttttaaaggggggggggggcccccccatggggggaaaggggcccccatatccatgggggggcccggggggcccggcagggaaggtttttcccccaaggggtctgggcccgccccccccccggggtgggggagggtttttttcccccggggggggggggggccccccccccccggctgtttgggccccccggggggggggggggggctggggggagggcggggggttttcccggggcccccccggccgggggggggggttttgggggggggtttggcccccccccgggggggggttgggccccttttggggttctgggggcccctttggggggggggggttagcccttttttttttgggggggggggggggggggtggttggcccggggggtttgcgtttttcccttttaaagaggaaaaaagggaaaga

SEQ ID NO: 495762 - DNA, 261 bp, Homo sapiens
cttggctcacctgtgatctactcgatatgtcactggatactccttcattcatggtgcaagtagtccttgagcgacacacatctcatcaccagaggcagctgtgtagtaccttaacagctctgaaagcttcttccgattatgagagtcttcgtgatatccacgactttatgatttttacaagaactgcatcatcgcataactagtagtactctttatctaccgcacagtacagaaacgcgttcatcagcatatatagacaca

SEQ ID NO: 495763 - DNA, 922 bp, Homo sapiens
  misc_feature (1)..(1): n is a, c, g, or t
ntcttgagcccgcactttatcacattaggtttcttccgtctcgaattccgggttgctcttctccgcgggtagactatgctgttcgccgccgcgcgcgcgcgaggtgtttagttaatattttcgttcttttcaaaggggacgcaaattgggacgcacgcagaggtgtgtcgcgcccgctcccggcccgcttgttgttgctggcacatgctccgcggcccgcccacatatttggtccgggcgcccacaaaatcctggcggcccccggctgtgttcagcttgtccgcccccgccccttgccgtgaccgccccctgctgtctataggggtttacacaaacacaaccggtcaggccgtatttgacgccctctcgggtgtctgacagcagtgcagcggcaagctgccgaatgtgtgcccctgcccccgctttgggtgtcccgccagctgttggccccgcggttgccggctaccatatggatccacgaagaggtcccttgttcgcggtacaattgccccgactttgcaccgtcgcaacaccccccttttgctgccgccaccgggtgacgccccctgacgagtatggggtccccctggcccccatcccgttgcctgaaattctactattgcccgcaccccgagtgctatactctcctcgctccgggcccactaaacactttggggtaactaaaatggaactcgtagtccgaaacattctggttccaaacttcacgggtcaataaagcctttaatatgcccccacccttcccgccttaaataagagcactcccgcgtggagtcaccacggtgactattcccctcgtttaagcacccttcccgggaggcttccccacaccacatttggtaattttcgttcttggggggcccccccaaacccccaaacccggggccggggcccccaaaaaaaa

SEQ ID NO: 495764 - DNA, 1040 bp, Homo sapiens
agcggggtccgctgtaataccggcccggcgcagaagcgggaggtcggcttctaggggcccaggacggcggcggtgcaatggcctcggcagcatgtggcagcagcctctcgtgaccaagccaacatggtaccgtgcatggaagctcgagagcagacgcggcaggtggcaggcagcgccagggtcctgggcgagggagagaccatcggctctgcaaagagctccacgcagtcgaggcgctgatgatccagctgacatggctgacagggctactccaagaccacgtacgtacatctggggactgtaccggagcggacatgcatggatcaaccttatatgacgtgcccagtgcgatctaccggggtccgcggacacgactcctttgcacagataaatcacgcctttgacctatcctgggctcggactcactaccgagtgtgtgacccttgggtaatccgacatgcctcgcgttaccctcgacgaggtgcaactgcttcacagtcatggggcacgacccttgagtgactgcgctcaggaccacccaagagctggttccaagaccactaagctacatggattacgggagcctccaaccaggggtacggagccccatcttgggacttcgaagttgcttccgcagccaacagcaggaacagtgggtgcacccaaccggcggctgcagcagcgactgtccgagcgcacccccgaggcacggcacacggatagatgcttcgccaataacagcaacggagagcatgggcgggccaacacacaacaaccagggcgtggcgacaccaaacaactgggaaacgtggggttccaacatgatacacggaacgggggacgaggactccgactggaaaaacccaagcaacaacacccgccccacacaactagctcactacacgggccaccctcttgttatgcgcaaaggggacacacccagcataacattgcgaaagcacgcccgttggctggggacatacaccacaggaagcagcgtcgcacagtacagagcgcatcacacactggaaacggcatag

SEQ ID NO: 495765 - DNA, 451 bp, Homo sapiens
tagaggattcactactggatgcaagtgtccaggaagctctctggaatcccccaaccagctggagtaagtacctctcctgtgctctccagtgcctcagacttcccaccattgtgacaccaactctgcctgctgaatctgtctctgtaatcctaccctcaatatctagcatgggccccatgaggcatcagattttgttgaaagaataaatgaggctgggcacggtgggtcatgcctgtaatcccagtactttgggaggcagaggcgggaggatcgcctgaggtcaggagtttgagaccagcctggccaacacggtgaaaccccgtctgtagttaaaatacaaaaaaattagctgggcatggtggtgctcatctgtaatcccagcttcttggaaggctgaggcaggagaattgcttgaacctgggaggtagaggttgcagtgagccaagatcgc

SEQ ID NO: 495766 - DNA, 792 bp, Homo sapiens
tggatggaagtcaacagtgccttatatttaccatctgacgtttagtagggacctggggaaccgattgcccgaggaatgcggcggagaattgtgttggctgtgaacgtggttccaaaattcactcctatctcattagaagaaataggtagcagcatcactcaccagtcttatgccatgacctgctgcttaaacatctcctggaatgtcctgggagaaaacgtttcgttggcttgtcgcccgactctgtcattttggctgtttattaaactctgatgtatagtcatctaccaccgtgcggtcctggccggacgaaacaacccgtgttgcttcctcaggcgaaaagaaacaaccaaaatgctagtgacaaatgtgctctatttggatagcaatataccatcttttatgtcattattctccctatacttgtaaaaggttcttcttcttcacactctcgccttctgaagaccctatgccttcctaagaactaattagttcctaaatctttttacccttcctggagctgcaattatttttgcccttagcgaagtggctcatttacacagctgaaaaccaacagtaattcttgaagatttgctcccacgctgcttggatcgcgcaatcccggttcacggcctcccgatcttggtgcaggcctttcacccatatactgtctggggggggtttccctgaagattaccgaggtgttaaacggcgccccgtcgtcgtttttcccccacatgtcgaaactgccacaacccgtgtcagcctcattaccctgtcacccggtataaa

SEQ ID NO: 495767 - DNA, 407 bp, Homo sapiens
  misc_feature (349)..(349): n is a, c, g, or t
  misc_feature (359)..(359): n is a, c, g, or t
tatgtgtggagggtgtatgatcggggacacacattcctaggactggagctgctgagtctcgggttctatgttagcttttgaggaactaccagactgtttccacagtggacgtgccattttacgctagcatcgataacacacgagggttctgatttctccacagcctcaccaacgcctgttgcggtctgtctttcgtttttttaaacttaccaatttaacttaaggattgttcctttccttaacaattaacatgaccaattttaaacacaaaaagtaactttccagggatattgcacaggagatggagaaggaggccagcaggtgtgacaggtgtggggtcccacaccgncactccaggngggtgctggcatgtttggcccccgtgggctccacgtaggtcgcagggt

SEQ ID NO: 495768 - DNA, 141 bp, Homo sapiens
cccaccagagcgtacccagcctaccgctcaggtaccaccagacctactaggagcacctagtagtagcgctagagaccacaccccctagtagaaagtactagcactatccaacgctagccagccgtaactagaacggagaat

SEQ ID NO: 495769 - DNA, 110 bp, Homo sapiens
ccattatgtagatcttgtagcaagacttggattcaggagtgagatgcaaaacaaaaaaacaaacaaacaaaaaaccaggaacgcttatgtggtgtgggtgatttcagagg

SEQ ID NO: 495770 - DNA, 258 bp, Homo sapiens
cctgtaatcccagtactttgggaagccaaggtaacaggattgcttgagcccagaacttcaagatgagcctgggctcatagtgagcccccatttagacgaaaaatttttaaaaattagcatggcggctcacatctgtaatcctagctacttggcaggctgaggtgagaagatcattggagtttaggaattggaggcggcagtgagccatgagtatgccactgcactccagcctgggggtcacagcaagaccctgcctca

SEQ ID NO: 495771 - DNA, 434 bp, Homo sapiens
ggctgcaggaattcggcacgatagagatagagttagagagagagagagagagagagagagagagagagatagagagagagtgactcctgtgatcgccatctatttctccatctctccctttcctctgtcttctctttctctcgtcttccaccatgttcttcttcctcctgcttttgcatttttctttcttactcgatttctccctgtctctcttccttcttctgctctcttcctcccctctatctctctgtctcatcctcccactgttctgctctattccacccctgaccctctcctcccttctcatcttcccttcctctattctttctgcttcctacctctccccttgtctcctccttgtcttccatttctccctcttttgtccttcttcttttttcccccctttcctccctttctcttcctctttcttttcc

SEQ ID NO: 495772 - DNA, 240 bp, Homo sapiens
tggatttaatgatgaggctgtccaagggtctaagaggtgatagtttgacaaatccctacgtgcccatccatctcctcttgtgtaaagtattccaagggtgccgtcagccagggtctactaacacgattcccttcacgtgtacaatacttgagaatcgaatctttaagtttgatggaatcgtgagacatttcctccactggggctacagtatgaatggacatacaatgcagccattttgag

SEQ ID NO: 495773 - DNA, 281 bp, Homo sapiens
ctaggtggaagcgacgtgtgtgtgtgtgtgtgtgtggggatgtgcatgtgtatgtgtgtggggggacgtgcatgtgtatgtgtgtgtggggatgtgtatgtgtgtgtgtggagatgtacatgtgtatgtgtgtgtggggggatgtgtatgtgtatgtgtgtgtgtggggcacgtgtcatgtgtatgtgtgggtgtgggtgccaaccaagaatatataaagagtcatacttatattcgtgggcatccagcaaggagattgtgttaattcttgcagcataagt

SEQ ID NO: 495774 - DNA, 225 bp, Homo sapiens
gatccttggggtgaatcagtgtagtacaagagatagaaagacagtccgtggctgaaagacaagtctggaatgctccactttttcaattctctctccattcttcagtaggtcaacttcaaggtcggatggatcgaaacccagaacacagtagcatttcagggaaatttggacttgaccagttctgcggctgggatgggagcgaggcggggataccgaagcctcgaa

SEQ ID NO: 495775 - DNA, 680 bp, Homo sapiens
  misc_feature (58)..(58): n is a, c, g, or t
  misc_feature (100)..(100): n is a, c, g, or t
  misc_feature (118)..(118): n is a, c, g, or t
  misc_feature (120)..(120): n is a, c, g, or t
  misc_feature (131)..(131): n is a, c, g, or t
  misc_feature (174)..(174): n is a, c, g, or t
  misc_feature (179)..(179): n is a, c, g, or t
  misc_feature (186)..(187): n is a, c, g, or t
  misc_feature (191)..(191): n is a, c, g, or t
  misc_feature (194)..(194): n is a, c, g, or t
  misc_feature (200)..(200): n is a, c, g, or t
  misc_feature (206)..(207): n is a, c, g, or t
  misc_feature (238)..(239): n is a, c, g, or t
  misc_feature (271)..(271): n is a, c, g, or t
  misc_feature (308)..(309): n is a, c, g, or t
  misc_feature (313)..(313): n is a, c, g, or t
  misc_feature (323)..(323): n is a, c, g, or t
  misc_feature (399)..(399): n is a, c, g, or t
  misc_feature (454)..(454): n is a, c, g, or t
  misc_feature (521)..(521): n is a, c, g, or t
  misc_feature (524)..(524): n is a, c, g, or t
  misc_feature (546)..(546): n is a, c, g, or t
  misc_feature (560)..(560): n is a, c, g, or t
  misc_feature (565)..(565): n is a, c, g, or t
  misc_feature (577)..(577): n is a, c, g, or t
  misc_feature (599)..(599): n is a, c, g, or t
  misc_feature (606)..(606): n is a, c, g, or t
  misc_feature (609)..(609): n is a, c, g, or t
  misc_feature (665)..(665): n is a, c, g, or t
tgaacattcgtgtccagggaggcaaggatggagcccccaatccacgtggaatacagtntctcctgaggtgcagatatcctgatcttcacatcttttgganctagtttcttcacttcantnaggagcctgtnaccaaaacctttgaacagggtagagcctcctgagaggacaatnttagngaaaagnntgcnccncaggtnaatgtnngacttatgaatggcgaacaccaggacctcgnngatgccttcactctcctctccaataatctggnctgaagagcaactcaggggcccggaattgggaaggannaatntaaatggtgntgccatcaggcaggtagtactgagctttctctgtctctagcgtctcatcccttttgggggtttatggataggtaanaggctctttcttttatggccttgacaatctcaaactcagaggatgagtggaagtngtagccctccttacgcaggtagaggcgcaggaagcgagagacgtcccggcccgcgatgtcgatgcgnatnaaggagtggggaatggaaaagnctaatagaatgggnacagnatgggttgaatncatccccagaatccagcaccanccctgtngtnctgcctggtagcgtaaaaggctggagttacagccttgcatgggagaatgaaaagangcgggcacattgaag

SEQ ID NO: 495776 - DNA, 429 bp, Homo sapiens
  misc_feature (156)..(157): n is a, c, g, or t
tcagcgtattacgctgttacttgcaaaataagcccactttgaatggggcccttctaacaaaaggttctagaatctgtcaaattgcaatacagcagacattagtgccctcctgagtctcattcactgtggacaggctttggcacacctcctctcatnngcctcctgagcatctcataggaccacccatgaatggccatggagcttactgatacaataaaacaaaccaaaatccccaagaagcgtgttctccttcagcctcagcactatattgctgatagaagtggcaacgtgctggctgcattccatagcccttctgagagaacggaggctctacacaggccacagtcgtgtggctactttacacgcagctgcccatcatgtgctgggtcatggacggcagcacgctgcagggcaaccacaaaacacatt

SEQ ID NO: 495777 - DNA, 113 bp, Homo sapiens
aattgcggcggcccgcagcgggataaccttgaggctgaggcagtggctccttgcacattagctgcacgcacagaaaaaaaaaagtacattggcggttttcgcagcccgagtcg

SEQ ID NO: 495778 - DNA, 221 bp, Homo sapiens
tgttgtatctgtaaaacaatggataatctgatgttgtcaacaatgcatctaataacgagctggttctgtaccaatgaccctggtgaagaattgcatctgtgctcatctgacatgcacacctgtacctgacatgtggtactgagtcccacatatgctgctgccccttgtggcctgcaagaatgggagccaagactgactccgtgagtgaagacagagatttt

SEQ ID NO: 495779 - DNA, 751 bp, Homo sapiens
  misc_feature (50)..(50): n is a, c, g, or t
  misc_feature (76)..(76): n is a, c, g, or t
  misc_feature (225)..(225): n is a, c, g, or t
  misc_feature (227)..(227): n is a, c, g, or t
  misc_feature (261)..(261): n is a, c, g, or t
  misc_feature (292)..(292): n is a, c, g, or t
  misc_feature (317)..(318): n is a, c, g, or t
  misc_feature (338)..(338): n is a, c, g, or t
  misc_feature (340)..(340): n is a, c, g, or t
  misc_feature (364)..(365): n is a, c, g, or t
  misc_feature (375)..(375): n is a, c, g, or t
  misc_feature (377)..(377): n is a, c, g, or t
  misc_feature (379)..(379): n is a, c, g, or t
  misc_feature (381)..(381): n is a, c, g, or t
  misc_feature (426)..(426): n is a, c, g, or t
  misc_feature (430)..(430): n is a, c, g, or t
  misc_feature (466)..(466): n is a, c, g, or t
  misc_feature (485)..(487): n is a, c, g, or t
  misc_feature (501)..(501): n is a, c, g, or t
gggcaccgcccgaggtgcgggtcgcctccagagatcctgtgccttcaaancctacgagtccatactttaaaacaanaatgaagaaagtaaggcttaaggaactagagagtcgcctgcaacaagtggatggatttgaaaagcccaagctacttctggaacagtatcctaccaggccgcacattgcagcatgtatgctctatacaatccataacacttatgatgacntngaaaataaagtcgtggcagatctaggatgtggtngtggagtacttagcatcggaactgcaatgtnaggagcagggttgtgtgtgggattnngacatagatgaagacgcatngnaaatatttaataggaatgcagaannagtttgagtnancnanatattgacatggttcaatgtgatgtgtgcttattatctaacagantgtnccaagtcattcgatacagtaattatgaatcctcccntgtgggaccaaaaataatnnngggacagatatgcntttctaaagactgctggggaaatggcaagaacaggagtatattccttacacaaatcctcaagtagcagaaagagttcgagtatgacctggcaggatcatacaagtatcacaaagaagaaatcagtggacattggaagtggacctaatgcgggttaacgttttaaaagccccggaaacgaaagttcgtgaaagctatgaaagatgaatagaaaaatgggttacagagagaaaaaaagacagaagaaaaaaa

SEQ ID NO: 495780 - DNA, 131 bp, Homo sapiens
cttctctcttggccgacaccaccaggactcggaactacaggagcaacggttgagggtcgtgtctccacctcctaccgagcgaagaatatggaaaccggatcactgtccatggcaacggttccctggacatc

SEQ ID NO: 495781 - DNA, 440 bp, Homo sapiens
gtgccgtttagtttgactctcaacaaaacttgccacatctgcacagacgtgactctgggacgtgggtgtgcagatgtttcctcatggccgagttatccctgaacatctttgtgcagcctttatgagggcaagctattgtccttggagcatcatcttctttaattttccttgctttcatcctagcaaattctgccagttgtttgggatcctgagaggtccaatggccaggtattcctccaggaggaagtttctttcctgtccatatattctgaataatccggaggtgagttcctcctccaatgatctgttcttcaaccaactgtctcatgtcaatatctttttttcatctgaggaccacatgtgaccgagaactcgccctccaggtcttgatctgacctgcttctgctcccacttcttgttgcccgggtcgcgcccgccgc

SEQ ID NO: 495782 - DNA, 1348 bp, Homo sapiens
tcacgcttgaattcactttatttttctggtataaaaaccctatgttgtatcccacagcgggagcctgagtccgctgcccggaaactcgtgggtgtgggtcttgacgagggtggctcagatgaacctccgtgaatagggacaactgggatgaaatacagtctcctttccaaaaggctcgggggctcaggatagcgtgtaggctctataaaaagtggcatcaaagggtggccttgggacgaagtgtgtgcccagggtgtggcaggtgcagcccgcgggtgtgaggtgtgttaccagctacattcgaataccaggccattcattgtagcaggcttcatataggcccagggtgcggaaaacgagtgcacaagtgtgcccgcgggaggtgcaggggaatagaggcgatacccagcaacaagagccgacagggggcctgtggtcaccttgtggagaggggaaaggtggtgggtgcttgtgccagaaatcgtggggtcccaccaaaatagcgccctcgtgcgcgacacgggggggacagacggagaaacgcttgtgcgccacgggaagtgagtggcccccagagggatgtggcgggggtgcccaccatccttggggaggcccaacataaaacaacccaaagacccggaggttggggcacactgggatagagtcccccgagaattacgacaaacaaatatgcgccttatagaacccctgggggttgccagcttggagcccggcaagagggagatcatggaatctactggcaacgggggaacttaaaattcttccaaaaaacctcaatcctttgaagaggaagagccccccaaaaggaaaaacaacagactcaaaatgaggagccatcgtggatatcccactaaaattgtgggcgacgggcgacacaaagaaacaaaaagagaccccccaccacaggaggaaagtaggagaacactctacatgggtccttagaaccaagggggggcacacaaattaggagaaacgcggcactccaaagcgattaatcacatcagggatttgtggcccacgaaaaagccccgaggaggtccaccggggccagcaggcccccggaacagaggggcgaaaaaccccaggccctagtctcgtcagtggagaaaaatccaggggggaagcccacgggggagccccaccacggggggccaacagagtctcaggaggagcccagagtagagcagagggacaccgcaagaggggaaaaacgaaacaagcacgcaagattagcgacggcagaacaccaggagggcactgacaaacaggcgaaataaaaggaagtcggagagctcaccaacacacacgcagcacacccagagaaggg

SEQ ID NO: 495783 - DNA, 528 bp, Homo sapiens
cctgcaagttctgcacatgtatctcagaacttaaagtataataatttaaacaaagaaaaaatgtaaaaaaaagaaattaaaaagagttggagcatagaagaaagaaaagaaatgcaatttgaagggcagtatgtgcagtgtaacaaacctgcaagttctgcacatgtatctcagaacttaaagtataataatttaaaaaaagaaaaaatgtaaaaaaaagaaattaaaaagagttggagcatagaagaaagaaaagaaatgcaatttgaagggcagtatgtgcagtgtaacaaacctgcaagttctgcacatgtatctcagaacttaaagtataataatttaaaaaaagaaaaaatgtaaaaaaaagaaattaaaaagagttggagcatagaagaaagaaaagaaatgcaatttgaagggcagtttgttacactgcacatactgcacatgtatctcagaacttaaagtataataatttaaaaaaagaaaaaatgtaaaaaaaagaaattaaaaagagttggagcatag

SEQ ID NO: 495784 - DNA, 146 bp, Homo sapiens
ggggggccccccccccggggggccggggggggggggcccccctttttttttccccttaaaagggggggggggggttttttttttgtttttaccccccccccccccccccccccccccccatttttcctttttttttgggggggaga

SEQ ID NO: 495785 - DNA, 330 bp, Homo sapiens
tggtatccatctatagttgcaagttgtgtgacaatgagatactaggctagagatcgacgtttcagatgatcatgactgtgcccagagggcacttgacatttaaattgtcttaaagttttggaagtacatcttctggccccttgagtactgccagaggcaaaagatgttggtttcttattcattccactttggtctcctgggatcccttctgtagcctaaagtatggctgggaaatggacttgagaagatgggcttgacttagatcataatcatgtgtgatcccatcatgaattcatgggaattggtgtggcatgtaaggcaatcaagctg

SEQ ID NO: 495786 - DNA, 208 bp, Homo sapiens
ccgggatggtgccatgtgcctccagcctgggcgagagagcaagactctgtctcaacaacgataacgagaacaacaaaataaagaacaaaaccagacatggctgggcaggtggctcaggccggtgacctcagtacttggggaggcaggggtgggcggatcacttgagtccaggagtgcaagaccagccgggccaacatggtgagacccg

SEQ ID NO: 495787 - DNA, 675 bp, Homo sapiens
tctggctaccgtgactaaaagggaagcgtttggggggtcgcggcccggacttgggggggggggtccggccccaggacagtttaaccgctattccgtccactcccgaatctccttcagtggactccgggcgttcgtgcacttatacagaaggtctccaattcacggcggacccagaaaccccagtgggtgaccgggaccctcagtcctcggcgtaaagtccgagggcggaggtggatgatgtgccgaaaacattgcggggactcctagcggcctccgtgggctcgttctccgaaacattcttcctcggcaatatagtggcgagtctcaaacaaacgagtaccagtggcgtggggtgccctctggggcagacataccgccgtgatttcccagttatttgaagcaagtttcctcggaccagatgtgggtgatgtgagtgaggagctctcgggagagagggacacagctaatagctccatagaagcatatcacatcacagggcgtgaccggggccagtgtacagccggcgctcgaagatgaccccttgggtggaacaccagtggtcatcggaggctatgctgatggaagagagcttcctcggtttatgtggaactgctgtggtgtagcctatgatgccccttcgctgggccacgggtttttggggcatacttgggctca

SEQ ID NO: 495788 - DNA, 462 bp, Homo sapiens
aaggtaatcaccgcgagtctctatagtatactgttctagtaagtgagagtgggtgctttgctgcctgaggatctgtagttcagtgagaacgaaggagacaagaaacgggtaggaaatgtatcccctcattgtcttggttcattcgggtcatgatggttctttttcattacaacaaatattaattggttgcttcctgtaatgccaggctccgtaacagaggctatgggttatagtcagtgaataaagccaaggcctctgtcttggaggcacttacattttggtggggcatgtgaatccatctaagctaccttgaagggcagggacggtagtcccctgctacaacagtgtagtacatcagggaccaacctggccttggatagagaaacttgctcagtacattgtggcagtaactagtgcttcagccatttcaggagtgctgctgggtgagcagaatgcatggag

SEQ ID NO: 495789 - DNA, 1191 bp, Homo sapiens
tggaaaatgcgcccttcagctggtttctagccaccgaaaggttttgttgggtcgaaaagtccccacggggggctactcatagccccaacgaggcgccttcacaaagtggtgttgattacaaaaaccgtatgatgtgaacttaggggggggccttttttgcactcacggctgcgctgtgaagaatggtttcaccgacacaaggtgcctaaattttgtcctcgcgtcccacacacaggggggggccacctctctcaacgggggtaaagggggttaatgcaccgtgacaacttgtgtaacatgtcttctagtcgaaaaagaggcctctatttgtttggtgaaccccgcgcgtagggggaccccaaaagctaataagttttctcccgcatctttgttgtgaaaagcatctgccacgcggggtgtgttttgacaacacgctttgggttgaaaaatagggggagtatcactaataattaaaccggtccgcggctaaatacactgcgccctttaagcgggtttgtttgtcgagaggacacaagagcagtgctggttgtgagaagtttttctgatatataaacactctgtagagagatgcactacaggtgttagacttaaatagggggtggtttcacacagggtggtttttatacaagccggggggcgcctctttccaagagacccacacattgttcgccaaacccgtttttctcccttctcctttgtgtaccacgcggggaacacacgaaatcgttgttgtacaaaatggtgattacaagacacggggtactctttgacccttactgggctccgtcggagtacatgctgtccacatatattggggaggtcacccacaccacgaataaatgtgaaaaggagagaaggaggctgagatttgggggatctgaatcaccccagggtctcacaaccacgtggcgagcaatcaaaggtgtgctattggagctcttctctgctgggggaaaaatctgtgcgggaaaatctaatgagcgatattttttaggagagattttggcgaccagaggtctcatattccagggcgccacctgtaaagccttaacgtggggatggggagcccccaccccacactagagagaatcctcttttaactgggggtgtttcttaaaatccaccccttttttaacgggccttttttaaagcaaattctcagaagttata

SEQ ID NO: 495790 - DNA, 248 bp, Homo sapiens
ctgcgccatggtcatgtatgctgatgtgacaacggcgacattattctccctagcaatggccggatgccagtttagtggcatgatgttggcgacgctcctccactgggggggcccctggctgggcggcacgagccgcctggccgagccatgccccccccctctcgcgcgctgctccgactgccggcgcactcagctaagagcatcgagggggcggctgctggctggggggcgggccgtggctcgggggt

SEQ ID NO: 495791 - DNA, 332 bp, Homo sapiens
  misc_feature (17)..(17): n is a, c, g, or t
  misc_feature (234)..(234): n is a, c, g, or t
  misc_feature (237)..(237): n is a, c, g, or t
  misc_feature (242)..(242): n is a, c, g, or t
  misc_feature (321)..(321): n is a, c, g, or t
  misc_feature (325)..(325): n is a, c, g, or t
cactggcattatcgagncctggaagctatggccagaatccaccaggcgcagagcccatcttcattgatgccaacttccagagcacagtccctggaggacccattggagggcaaaccagagttactctgaggaacgagcatctgcagtacatcgtgacctggtatggactctctgcagctacatcctacctgtggtttaagaaattcctacgtgggacacctggtgtgtgacagntcngcgtntgaagccctgtccctggataatgcagtatttcaagactgcctttatgctggatcatgtgctactggtataaagttctgntaanctacctt

SEQ ID NO: 495792 - DNA, 473 bp, Homo sapiens
gcagtatggctaagatgatccagaccgcctcaacctcccacagtgttgggattacaggcatgagccacatgcctggaccaccatacagatctttaagagtgatttatcatacacctgaggatagatgaggggaaactgccaattcatggaacaatgctttcctctttttattcacaataccataatgacttcttacttgatttcatctcatctcagatgtgtgcggttcagggagacagggagtgagaagaggatggtgggtggtaaaggcggtgaacacagcagctggtctgtatgcaagggtataccagggatctggttccaccttcgtttcccgtccatatttcctctataacctcgggtgcagggtgtcagccacactggccttcttgcagacccaggacacagcaaccgttgctcctgcctcacggccttctgctcccaaacgccttcacaaattgcgaccaggcata

SEQ ID NO: 495793 - DNA, 675 bp, Homo sapiens
  misc_feature (14)..(14): n is a, c, g, or t
  misc_feature (137)..(137): n is a, c, g, or t
  misc_feature (145)..(145): n is a, c, g, or t
  misc_feature (157)..(157): n is a, c, g, or t
  misc_feature (165)..(165): n is a, c, g, or t
  misc_feature (174)..(174): n is a, c, g, or t
  misc_feature (186)..(186): n is a, c, g, or t
  misc_feature (189)..(191): n is a, c, g, or t
  misc_feature (214)..(214): n is a, c, g, or t
  misc_feature (217)..(218): n is a, c, g, or t
  misc_feature (231)..(231): n is a, c, g, or t
  misc_feature (244)..(244): n is a, c, g, or t
  misc_feature (255)..(255): n is a, c, g, or t
  misc_feature (268)..(269): n is a, c, g, or t
  misc_feature (271)..(272): n is a, c, g, or t
  misc_feature (274)..(274): n is a, c, g, or t
  misc_feature (294)..(294): n is a, c, g, or t
  misc_feature (296)..(296): n is a, c, g, or t
  misc_feature (308)..(308): n is a, c, g, or t
  misc_feature (314)..(314): n is a, c, g, or t
  misc_feature (323)..(323): n is a, c, g, or t
  misc_feature (325)..(325): n is a, c, g, or t
  misc_feature (332)..(332): n is a, c, g, or t
  misc_feature (337)..(337): n is a, c, g, or t
  misc_feature (344)..(344): n is a, c, g, or t
  misc_feature (349)..(350): n is a, c, g, or t
  misc_feature (353)..(353): n is a, c, g, or t
  misc_feature (356)..(356): n is a, c, g, or t
  misc_feature (365)..(365): n is a, c, g, or t
  misc_feature (369)..(369): n is a, c, g, or t
  misc_feature (371)..(371): n is a, c, g, or t
  misc_feature (380)..(381): n is a, c, g, or t
  misc_feature (398)..(399): n is a, c, g, or t
  misc_feature (406)..(406): n is a, c, g, or t
  misc_feature (415)..(415): n is a, c, g, or t
  misc_feature (417)..(417): n is a, c, g, or t
  misc_feature (430)..(430): n is a, c, g, or t
  misc_feature (433)..(433): n is a, c, g, or t
  misc_feature (435)..(435): n is a, c, g, or t
  misc_feature (441)..(441): n is a, c, g, or t
  misc_feature (447)..(448): n is a, c, g, or t
  misc_feature (467)..(467): n is a, c, g, or t
  misc_feature (479)..(479): n is a, c, g, or t
  misc_feature (565)..(565): n is a, c, g, or t
  misc_feature (572)..(572): n is a, c, g, or t
  misc_feature (586)..(587): n is a, c, g, or t
  misc_feature (672)..(672): n is a, c, g, or t
cataaccacacagnatagacaatgaaagcataattagtcattatacacaattataatttgataaaaaatttcaacatatacagaagtataaagaatgtgtatctatcatgcagcttctacaattatcattccaactnctcgaatnaataaaattgcnagcaattnaaaccctgncccaattccaantannnccccccgtccccgcccttcctcnccnncccccttcccccntcccccctgcctnccccccccccncctcccccccgcnntnngngggggggggcggggtctctntntgtggcccgggntggggngtgttggtntnttttttnttctntgcttcntttgnntcnttngttcttgcntttntnctggtttgnnttcccgggtggctgggnnttcgggntctctcctntnctcttggtccgtnttntntttttnttttgnngttttttcttgtttttttngttggtctcatncttctgatctcaggtgatccgcccaccttggcctcacaaagtgctgggtttttaggcataagctagattgccaagctttgttttanaatttantctttatgctctgnntggaaaggctataaatggagttcaatgaaaggaaaaaacatttaaaaaatagaagttctttctttcttctttttaagatggagtnttg

SEQ ID NO: 495794 - DNA, 751 bp, Homo sapiens
actcacaaccaggcccctgacctcacatgccctgtttggttcatttgtttttttcttcacttgcttatgccccctctgaattgccagtgctaccatttttcagtaaacaaccagagcagaaagtcgagctctgaaccgatactatctcccagacagaggaatgtattcgagttcatacttcgaggaagtaattctctgggaacatgcagtagtgcaggtgatgctatcgaaactggtgaaacctaaaactcctactcactacctgcctgagagggcaggaaatggggccgaggccctttccctacatgctccccctgcccgttttggtctctcgcagtcattactaaacttagcaccgtaatcaaatgaaagctgtttcccagctgtatggccttgggtaagtccctgatctccttggttctgttaccaatacacactcatgcacacatgcacgtattgtgggtacccattcaccacattcacacacattccagagacatctccttcattttcacctcataccgagatgagtctctagagaacagctgctgtcttacttatcctgcaaaacaccagagctacctcctaggcattcagaaagtgtctccagacccagcatctgaagctctgacttgaattcctccacgtcccattgggctcctgggtccatcccatttctcctgcccatccttcacgtaggccctcttctccaaccatttgccgttgcctacattaggcctgtggcactcca

SEQ ID NO: 495795 - DNA, 210 bp, Homo sapiens
  misc_feature (7)..(7): n is a, c, g, or t
gcggtantcgcgacttcgatggtcaacaccggcccatgccgcacgtccagcggccgtatgccgccggagcgccagcgaaaccgcaagcgacagtcgcgataatcccgcatggtgtcgtagcgcagaagcggggtggtcatggaacatcctgcgatgcccaagatcaacccggtcagatcaccctgcccataaaagacgcatgtcccccgc

SEQ ID NO: 495796 - DNA, 152 bp, Homo sapiens
acagagtgtgagtgaacatgacccctgcaatgtgcactgctgaatgtgatgaaaccaccccagtgtgaaactggtcccccaccatgctgtgcctgtctcgcctgtgcactgaaaaggccagtcctgtctcagctgtatactccacctggatg

SEQ ID NO: 495797 - DNA, 92 bp, Homo sapiens
ctgaaattcgtctttgatgcggtcgcaggagtccgaggtggtgaatttgagttgctggggaaggtgcgaggagcccgaatgcctgctttgtg

SEQ ID NO: 495798 - DNA, 124 bp, Homo sapiens
gaggcaggagaagcagtcaaaagccagattatacaggggtcatgaagaataataaaaatttggaaagtgttgtaacaatcagatccgggtctcttagagaatcaccagtctggagtagggggaa

SEQ ID NO: 495799 - DNA, 278 bp, Homo sapiens
atgggggtgcacaccttcagtcccagttactcaggaggctgaggtgggagaatctcttgagcccaggagtttgagattacagtaagctctgattgcacaaccacactccaacctgggtgacagagctagatgctgtctcaggaaaggaaaaaaaaaaaaaggccggagggatggcttaaaaggccccaaaggggggggaaagacataattccaaaatttaaccgttaagcctaaaccgggatattgaaaaaacccagcccccttcgcatggcaattgg

SEQ ID NO: 495800 - DNA, 135 bp, Homo sapiens
tggcacccagaggaaggcccgtacctgttggtctctgtgcttcaagaggccagtggatggggaccgagacaaacaggccagtggtgacgcagtgctgacaccctggcagcactggacactgagagcacacaacct

SEQ ID NO: 495801 - DNA, 145 bp, Homo sapiens
gatctacgtcatgattgtcgctgggcacagggcggcgctggtgcccacggcagctgcaccttctccaccagcccggccactggcgctgcatgtctcccaccactgcctcgtagccccaccactgcctcatgccccaccactgcct

SEQ ID NO: 495802 - DNA, 101 bp, Homo sapiens
caaggatcaaaagacccagctgagggcgatggggcccagcctgaggaaacaaccagggatggcgacaagccagaggagactcaggggaaggcagagaaaga

SEQ ID NO: 495803 - DNA, 395 bp, Homo sapiens
tcataggtcgcaggtggtgttatgcctgcagatgcaccgaagaattaacgttcatgaacctccgcctagatttcagaagatgtatgaaaatgcctggaaatccaggcaaaagtttgctgtgcacgggagcggggggccctcatggataacctctgctagggcagtgtcacagggaaatatggggttggagcccccacacagagtccccactggggtactgccaagcagagctgtcacaaaggggccaccatcctccagaccccggaatggtagatccactgacagcttgcactgtgtgcctggaaaagctgcagacactcaatgcagccagaagggggggccgtaccctgcaaagccacaggggcggggctgcccaagaccctgcgaacctatga

SEQ ID NO: 495804 - DNA, 921 bp, Homo sapiens
  misc_feature (6)..(6): n is a, c, g, or t
  misc_feature (11)..(11): n is a, c, g, or t
  misc_feature (13)..(13): n is a, c, g, or t
  misc_feature (19)..(19): n is a, c, g, or t
  misc_feature (245)..(245): n is a, c, g, or t
  misc_feature (365)..(365): n is a, c, g, or t
  misc_feature (377)..(377): n is a, c, g, or t
  misc_feature (380)..(380): n is a, c, g, or t
  misc_feature (383)..(383): n is a, c, g, or t
  misc_feature (390)..(390): n is a, c, g, or t
  misc_feature (392)..(393): n is a, c, g, or t
  misc_feature (415)..(415): n is a, c, g, or t
  misc_feature (422)..(422): n is a, c, g, or t
  misc_feature (441)..(441): n is a, c, g, or t
  misc_feature (514)..(514): n is a, c, g, or t
  misc_feature (522)..(522): n is a, c, g, or t
  misc_feature (553)..(553): n is a, c, g, or t
  misc_feature (585)..(585): n is a, c, g, or t
  misc_feature (599)..(599): n is a, c, g, or t
  misc_feature (601)..(601): n is a, c, g, or t
  misc_feature (650)..(650): n is a, c, g, or t
  misc_feature (678)..(678): n is a, c, g, or t
  misc_feature (685)..(685): n is a, c, g, or t
  misc_feature (717)..(717): n is a, c, g, or t
  misc_feature (735)..(735): n is a, c, g, or t
  misc_feature (755)..(755): n is a, c, g, or t
  misc_feature (761)..(761): n is a, c, g, or t
  misc_feature (781)..(781): n is a, c, g, or t
  misc_feature (798)..(798): n is a, c, g, or t
  misc_feature (812)..(812): n is a, c, g, or t
  misc_feature (820)..(820): n is a, c, g, or t
  misc_feature (920)..(920): n is a, c, g, or t
tcctcnatttntnggggtnggggactgaagtttttagccagcatggacctaacctactttttgggataaaattctctgttttgttacaggcaaaattctgcgtatggcgtgcaatgccatgggtcattctgaatatatttttttctgtaattttatcattacacgatgtttgcaatacgtgctttgttttttaatttgaaagcaaactttttccattgttgaacagcagcattttttggaacaancttggacccttgcctgagtgattgagttctaagttgaggactgcatcttctcgttttttacagtatagcagcaacaaaattgcacattatgtgtgtggaaaaatgacatatcacattggnaattgcgtgtcnttnggngtgcaananngtggatacaagaaattgagttntcaattnaatttcctaacatgggttngaagaatcaactcgatgcaaacgaaaagttggggggggaaaaaaaaaacaaaaccgtttaaaaaaccctcaantccctcangtatggaaaggtaagattaacaattaaggtngaaattaataaggtaaatctaattgtattgtngctaaatggggggntngcgaaaagaacctttacaagaagcatatttaccctggataaaactgggntgttggtgttttggggagaacaaaactnaataagngatttatttgtgtctcctgagtttggtacctnggggagcaatttgacatngccccctttcaagaaccttnaactgnttagtaagcagtgggctgtnacaacacaaaaccagtngaccaagagataanagcttttnaggccaagctggcctgacggtatggctgcaggaagtgactgagcagtagcggtactcagccagaccaagacggagagggaagagtccacagctttctggna

SEQ ID NO: 495805 - DNA, 173 bp, Homo sapiens
agcagtgggctggcctgtcatgcatcccctgctctatcctggcactgcaggctccctcggtgtgtcttgagaccagctgcagcacctccagcagaggcagagtgcctggggatccactttcctgccccagtgacgtgtgctgtcggcctagtcggggggtaccggagctcgaa

SEQ ID NO: 495806 - DNA, 763 bp, Homo sapiens
tggtaaagcgctgatcctgttaatttgggcacggaaaacgagacaatccatgcagcccaggagggacatggggtgacttaatcctcctacctcgtcagtctccagccccagccccaccctgggcccttctgtggcattcttcctcttcactgcgagccctgggcaggccacccccgtagtggagatgctgcaagagagaatgtcagactgtagcttctgggagaatcacagtgctggacacatgaatgtgactggtgatgttcaccaccatgctatgctggcaccactgatgatgtgcacgcttggcagtgatcagacacgacgagctgtggatggatgtgacttgtgccaagcccagcttgaagacctgggtctcgcagagctgtctctctaagaaaatcctactatctatcagagcccaggatgtaatccagcttcatcttgccctcatccagcaccccaatgcgtgaccagtcctgccgacagaagggacgttgccttctgaacagagcgccgtgggtcctatctacatacaagcgatcagaagatcccggagcggaccttgcgaatcttggcccagggtaaaatttgaccctcacagaccatcactgttggttccgggagccccataatcagccagatacagttcagatttgggtcacaaagaaattctcgaaagagtccccgggggtcacaataagttggcgaaaacccagctccggcctggctgtgatccgatctaaccgccgaatgtgtcaaacag

SEQ ID NO: 495807 - DNA, 440 bp, Homo sapiens
  misc_feature (24)..(24): n is a, c, g, or t
  misc_feature (99)..(100): n is a, c, g, or t
  misc_feature (103)..(103): n is a, c, g, or t
  misc_feature (109)..(109): n is a, c, g, or t
  misc_feature (113)..(113): n is a, c, g, or t
  misc_feature (116)..(116): n is a, c, g, or t
  misc_feature (130)..(130): n is a, c, g, or t
  misc_feature (138)..(138): n is a, c, g, or t
  misc_feature (153)..(153): n is a, c, g, or t
  misc_feature (192)..(192): n is a, c, g, or t
  misc_feature (195)..(195): n is a, c, g, or t
  misc_feature (226)..(226): n is a, c, g, or t
tttacattacaaagaagaaaatcntccaaatgggacggatatgagtatggtttatggttacacacacacacacacacacacacacacacacacacacanntgnggttgngccnagngggggggggggggngggggagngcttaccagcaacgngtactgagagggtaaccttttccaagatgagtaaaaggnggngggtggggtggggagtgctgtttactttgcngaaacaaggtcagagatgacacatcatgaataatcaaaagaaaattattctatcaaagctcagtatctagctgatacataacacttatttgagcacacatataatcactgacttattaaacactattactcattttctaagtgtaatcgtccatttcattctcagaaataatagtataattgaaaaagaaatgatataatctcaagcaagtgga

SEQ ID NO: 495808 - DNA, 554 bp, Homo sapiens
  misc_feature (48)..(48): n is a, c, g, or t
  misc_feature (270)..(270): n is a, c, g, or t
  misc_feature (277)..(279): n is a, c, g, or t
agcaccgtctacatcatggccatggccatgcagatggccacttcgccnatcaattacaaaggcccgcccttcatggagagcctgcccgagaacaagcccctggtgtggagtctggcactttcactcctggccatcattggcctgctcctctggcctctagccagacttcaacagccagtttggcctcgtggacatccctgtggagttcaagctggtcattgccaggtcctgctcctggacttctgcctggcgctcctggccgaacccccnccggggnnnccgggtccctgaccaggttcttcctggggaccccgaagctgaaagtgccttcctgagatggcagtgctggtacccactgcccaccctggctgccgctgggcgggaaccccaacagggccccgggagggaaccctgcccccaaccccccacagcaaggctgtacagtctcgcccttggaagactgagctgggacccccacagccatccgctggcttggccagcagaaccagccccaagccagcacctttggtaaataaagcagcatctgagatttt

SEQ ID NO: 495809 - DNA, 221 bp, Homo sapiens
  misc_feature (36)..(36): n is a, c, g, or t
tgttgggcctaaagccccctcctgggggtttcctgntgtttaggtccttttgggccccccccccatccaggccctttttttgcaccttttttcccccccctttaggctttttcccccccctgcggtgttcggcctaaaggtggtgggggtgagggggggtttggcccttagcctttcatgtttttccccaaatgaaaatgccctgcaaagggcggtaccca

SEQ ID NO: 495810 - DNA, 1331 bp, Homo sapiens
  misc_feature (845)..(845): n is a, c, g, or t
  misc_feature (1021)..(1021): n is a, c, g, or t
  misc_feature (1072)..(1072): n is a, c, g, or t
tggaaacggagtttggttctggttgcccaggctggcagtggcaatgggcacaatcttggagctcactggcaacctctggcctcacaggttcaatgtgggttctcctggcctacagcctcttgagtacgctggggattacaggcttgcgccaccatggcccgggtaatttcggtattttttatgtacagaagacggagacgttggcaccattgttggcgccaggctgggtcttggaattcctggacctcaggtggatccacctggctatcggcctcccaaatgtgctaggatttaacaggtgttgtagaggcacacacacgctctgggctaatttgtggttatttataagagtaagaagatggggtgttttctcacaaaggggctggggtctgtggaatctcccagacctacaggtggatccggccacactcttgggcctcccccagaatgtggctgggagattcacaggcgcgtgtagacgccactcggtggccccgggcctgagatggtatttgctggaatggattatggaaaatatgggggttaaaccagcgctattaaaacacctttaagaactgtggagtttcaaaaatgtatttatttaagacttcccgttgttataagacctcaaagatatataagtgctttagagatagtatacatgtggtaagaccaccttatatataagacacattttttcattgcaaagggttgggggatcctttggaggaattaaaggaattgtgcacaatttgtgaacacaaggtgcggtaacgacattttcgactcagcgaagagactacatcatttaccccccagagagtaaaagcaatcatcttgggccngtcggtgtctaccactgggaacttccttaaaaggggggtcgtttacctcacgggatagccctacaatttttggggcttattcacctttaaacattcacattctattcgaaataattctctttaacaacggctggtgttttgagaccccccaatggtatattgcatcctgattgggngatttaaaacagcccttttgaacaaggatgtcccgccaggagaaatttaancgctataggccgagaccgtcagcaagttttccagagcacaaagccccaaaaacaccaagggagacaatcaaagagcatcgtatggatggtgccccacatatcgagattttctccccggatatctcagtcagtgtaaaccctcagtcaagtacagataatggtctctgacttctgtgggtcgcacacaccaacaagtgtggatggacacagcctcgccacacaacgaatatcccacacattcatggcatcagtcgagcaa

SEQ ID NO: 495811 - DNA, 389 bp, Homo sapiens
atgaaagagcaggagcggcgtggcaccctcctggaggagctgaccctgtgtaggcctggagcgcccacttgcagccgcgccatactttctcctccttatccagtacaaaggccagtcatgtggcccacacctttgcctgcagtgtgaaggcccagaacacacagggcccgaactgtctgcccactgctcctgcctcctggctagcaagatagggccagaaagaccagatcatatcccatataagccccttcaaggaggccgtgattgatcacggggcccatgcccagatcgtccctcttggatccctctctagtcgaggctcccaattcctccactaggaagtggcacgccttgtgcctgggggtgagatgctcaacagacgctccatt

SEQ ID NO: 495812 - DNA, 771 bp, Homo sapiens
agcgaggggtgggggtggagaaaatgagcgatggttaatgggtacaaaaatatagttagatagaattaataaaatctaatatttgataggacaatggagtgactacaatttattatacatttaaaaataactaaaagagtataactggattgtttgaaacatgaagaaagcatcagtgcttgagctgacggatactccatttaccctgacatgattgttacacattgtatgtctctatcaaaatatcttatgtaccccattaatatatacatctaataggtacccataaaaataaaaaataggctgggcacagtggctcgcgcctgtaatcctagcactctgggaggccaaggtgggcagatgacctgaggtcaggacttcaagaccagcctggcaacatggtgaaacgccatctccaccaaaaatacaagttagccgggcatagtggcacatgcctgcaatcccagctactcgggaagctgaggcaggagaatcacttgaatctggggggtggaggttgcagtgagccgagatcgcgccgtgcgctcagctgggcgacagagcgaggctccatctcaaaaaatactcatacactcatgtttatcctgttattaaatagcatattcatgagcctaggcacagggctccgctgtatcggagccttgggaaccgcgcggtaaatcctgaggcagaatcgaaccatggcacatggaaacctctatgaaatacacttgtggttgtggcgacttaccacgtacgagcgggcaaacc

SEQ ID NO: 495813 - DNA, 257 bp, Homo sapiens
attccaattgtcatagaatcatcgatattctgatagtgccttacagcagatttatcgttaatgagaaaattgaaccataactatattgctcaccctaaaaccttacaccgaaccttacaaagtaaaagactaagtgttggtcagacggaaaaggatacaaccatgcatcttccacagggaaaatgaagattgcaagaacgcagaaatgctgaactcatgggtacaaacacacttttctttataagaccgggtaccga

SEQ ID NO: 495814 - DNA, 255 bp, Homo sapiens
tttttttttaaaaaaattagattttagcgggggcttttgactaatgtaaagtaaaagcccaacccccccccttgatagggaggtttttgtaagttaattttttaaaactttttcccaccccaagggaggctttgctttgggttttaactgtttggccccggcgggggggggggcggggggttggtccaaaaacttgaagcggtttgggaaagggcccacccaaaggtttttccttaaaaaacaaaattaccccga

SEQ ID NO: 495815 - DNA, 270 bp, Homo sapiens
  misc_feature (30)..(30): n is a, c, g, or t
agtggtgtgatctcagctcattgcaacctntgcctcccggactcaagcaatcctcccacctcagcctccagagtagctgagactacagaaaaggaagagataccatggagatgtgcccccagaggaaaggccacgcaaggacccagcaagaaggcaactgtttacaagccaagggaagaggcctcaggagaaccaaacgtgtccaccccttgatcttgcacttcccaacctccagaactgtgagcaaataaatgatgttgtttaatccca

SEQ ID NO: 495816 - DNA, 1032 bp, Homo sapiens
  misc_feature (398)..(398): n is a, c, g, or t
  misc_feature (433)..(433): n is a, c, g, or t
  misc_feature (466)..(466): n is a, c, g, or t
  misc_feature (477)..(477): n is a, c, g, or t
  misc_feature (492)..(492): n is a, c, g, or t
  misc_feature (575)..(575): n is a, c, g, or t
  misc_feature (583)..(583): n is a, c, g, or t
  misc_feature (600)..(601): n is a, c, g, or t
  misc_feature (611)..(611): n is a, c, g, or t
  misc_feature (621)..(621): n is a, c, g, or t
  misc_feature (630)..(630): n is a, c, g, or t
  misc_feature (633)..(633): n is a, c, g, or t
  misc_feature (641)..(642): n is a, c, g, or t
  misc_feature (644)..(644): n is a, c, g, or t
  misc_feature (646)..(646): n is a, c, g, or t
  misc_feature (649)..(650): n is a, c, g, or t
  misc_feature (666)..(668): n is a, c, g, or t
  misc_feature (696)..(697): n is a, c, g, or t
  misc_feature (714)..(714): n is a, c, g, or t
  misc_feature (727)..(727): n is a, c, g, or t
  misc_feature (865)..(865): n is a, c, g, or t
  misc_feature (885)..(885): n is a, c, g, or t
  misc_feature (888)..(888): n is a, c, g, or t
  misc_feature (890)..(892): n is a, c, g, or t
  misc_feature (899)..(899): n is a, c, g, or t
  misc_feature (903)..(903): n is a, c, g, or t
  misc_feature (909)..(909): n is a, c, g, or t
  misc_feature (913)..(913): n is a, c, g, or t
  misc_feature (918)..(918): n is a, c, g, or t
  misc_feature (928)..(928): n is a, c, g, or t
cgatcccacgttgccatttgtgtgtccgggcgcaatatgcacaaactatggcttacaacatcacacccctgcgcagggccacagtggaatgtgtgaaagatcagtttggcttcattaactatgaagtaggagatagcaagaagctcttttgccatgtgaaagaagttcaggatggcattgagctacaggcaggagatgaggtggagttctcagtgattcttaatcagcgcactggcaagtgcagcgcctgtaatgtttggcgagtctgtgagggcccccaaggctgtgcagctcctcgacctgatcggtggtcaatcgcttgaagaatatcactctggatgatgccagtgctcctcgcctaatggttcttcgtcagccaaggggaccagataactcantggggttggtgcagaaagaaagatccgtcaagctnggtgtcattgactaaccacatccacaaagcagnaccattaatcnactatgagtcaagtnggggggaatctggtgaagggttctgaatatctccctcttcatccctcccgaaatctggaatacttattctatgagctattacnccagtttnaacaccttcctcgtgtnntgtttaaaanaaataaatanatttaaganaancattttanntnangcnncagttgcagcctggannnaacttaaggtggcgccttatagtatcannttttaggagctttattntggtgcatttaangcaactggtaattgcgagaaatccactttgccgtgtgtaagtgacaacaatatgggactgttatcttgtgggcctatggaaattctgcgctttccagttatatactctaccttcattaattacttctggcgggatgtnctgccttagcgctcagttgnatncnnntcccttntctncctgtncatnatgcnttaattctgngaccatatgagggggtagaaatatatcatcttctgtagaaattcgcacacattgtttaggccaccctttccttacagcgaggccaacttccacactgtcttctc

SEQ ID NO: 495817 - DNA, 157 bp, Homo sapiens
gtacagccgtgcagcgctgcgggaagttctcaggacggcttcccccgacatggagggatttccgaagcctcgaagcttccatgacactgccggcagtagcccccacgctggcccagcctcagacccaccagcacttccagacaccaggaagccacag

SEQ ID NO: 495818 - DNA, 102 bp, Homo sapiens
accgaaaccactgtagttcctttttattctaccataataattatatacataataatctatattatggttgaaatctttatctcagagtaactaaagccacaa

SEQ ID NO: 495819 - DNA, 536 bp, Homo sapiens
  misc_feature (283)..(283): n is a, c, g, or t
  misc_feature (352)..(352): n is a, c, g, or t
tctggtgttttaggaaagacccacagaaacaaggcgagatggggactggaagggtggatggcattgggggatttgtcttctaggaatgagccacagggattagggggagataggaaggactgatggggcaggaagatagtatgttccaggtatgatccacaggttcagaggggagaaaagtatagtggatggtgtttgccatggatgaaccaccaggatggtgggggagacagaaaaggttgatggtgtggtgggatggtatcttttatgaatgacccaaagnggcaaagggaaggcaggaaagatggatgttgcggggatatcatccaccaacaacccagaggtgtagtgnggagacaggaggtgtagatggtattaccaggatatgtcttccagaaatgagccacaaaggcagggataagataggaagagtgaatggtgtggcctggttgcatcttccaggaatgcccccacagtgttagggagtggggaacaagaatggatccctgtgggggtatggtatcttctaggaatag

SEQ ID NO: 495820 - DNA, 354 bp, Homo sapiens
gatcccacatgtcgcctgtattctaagtgcgagagcgagagagcggatcggataacaatgtacagaactagcctgcagaggctatggagaagtgcatgcaagccagatgaatacagtgaatgcattcgatgattccgaggacattcttcaacgatcggctcagcatgtgcagacgatcattgcgtgactatctgatgtgattgtgttagccatgacctccctttacaagtaggctttgcatcatagagattgttagtaccggtcataatgtgctgtatgtggacttactaacagggaagaacgtgacatggacaactgagctagcgatgctgatgatccactctctgagatgtg

SEQ ID NO: 495821 - DNA, 862 bp, Homo sapiens
cctcacctgtggtggtttatgggtgtgatggggtttttaagattattataaccagtaaaaataagaaaacctcgaaaaaaaaaaaaaaaaaaaaaaaaaaaaaaaacaaaaataaaaaaaaaaaaaaaaaaaaaaaaacaaaaaaaaaaaaaaaaaaatacacaaaatcatcaacataatcagcaccctgcaaaaagatacatcatagaagaacatacactaatgataaaacactcagcacatccagcgaccgccccacacacctcaactaacctatcacccactcaactcacaccacaccaattacacccacaccagatccaaccgctccctctcacatagttcttccccactcacaaccacacatcatgggagcatgcacgcgccggaacccgcgggaacatcacgccaacaaccgcggagccacaccatcaggctgagaggcggacgagccggccggaaagataccggggtagggtagagagaggtgcggtgctgtgagctcggacgagagaaggcacggagtaggggaaggagggaagggagggaggtaggtgaagcgtcgccgacggcgcgcggacgaaagagcagggacgcgagagagattgcccacattaatatagagaagcgccgtcgtcacctgctacacacaatcaatcggtaataccccatcaaataatcgctcaggtgtatttattttgctccacaactgcatcatcagacacacgatcctacccacctattcaccaagagaagtcatgcaaaacagacgtcccacgtcactgatgtactacaacccactacctgtacatgaaaccacacaacacaccaacttcacgctgccctccacatacctacaaaa

SEQ ID NO: 495822 - DNA, 196 bp, Homo sapiens
ctacgataaaattacacaacaggatacaaattcaccaaacacacagtgatgctgagggtaataaccactatggggaacacatcccgtaaacctgcctgttgccatgccaatgaagtgcctcgacctggtgactatctgtttgagcatgctttgtgtggatggtcaaatgccaccgatagtgcatacacttagtaca

SEQ ID NO: 495823 - DNA, 357 bp, Homo sapiens
  misc_feature (24)..(24): n is a, c, g, or t
  misc_feature (79)..(79): n is a, c, g, or t
  misc_feature (96)..(96): n is a, c, g, or t
ggctacctgggaggctgatgtggnaggattgtctgggcctggagctggaggctgcagtgagctgtgattgcaccactgnactccagcctgggcaanagggcaagaccctgtctcaaaaaacaaaaacaaaacctgaagcttaccagaccccttacccaccatgatgcctaaccaaccccccgcttcctgttgaccagctcctcttcctcacccctccctaattcctgtttcccacacatggttacatttcttccctgctataaaaatccctaattttagtaggccagagacacagatttgagacttatgtcctgttccccttggctgtagcacccaaataaactttcttccttggct

SEQ ID NO: 495824 - DNA, 381 bp, Homo sapiens
  misc_feature (304)..(304): n is a, c, g, or t
gcacgagaaaaaattagctgggcatggtgatgtgagcttgtggtcccagctgctcgggaggctgaggcaggagaactgcttgagcctgggaggcagaggttgcagtgatctttttttgcaccacagcactccaggctgggcgacagagcaaaattccatccgaaaaaaaaaatttggtgagaggggggagataagtgagtaaagaacttaaaaaagcccaaaaacaattatctgggcatggtggtgtgctgcctgtactcccagctactgaggagacagaagtgagaggattgcttgagcccanaagttcaaggctgcagagagctatgattacaccactgcattccagcctaggtgacagagtaacaccaccctgtctgt

SEQ ID NO: 495825 - DNA, 243 bp, Homo sapiens
tctagagtatccccgtcaacgctgaacgactgtgtgcctgtgtctatactagcagcattatttataatcctttgggtatgtatccagtatatgggatggctaggggtcaaaatggtatttctagattctagagtccctgatggaatcgccacactgtacttccacaatggcttgaaccacctttacagctcccaccaagcagtgctataacgctgttgcctattttcatctcacagtaggttc

SEQ ID NO: 495826 - DNA, 234 bp, Homo sapiens
agacgtggtagtagtgtcgagtctgtacatgtccgggtcgaagtacgcgtatcgatgggcagttgagggggcgcaatattgatcctaggcctataaatatcgggagtataggtaggcggtaaggtaaacaacgggtacctctagaactatagctagcatgcgaaattttaaggcgctgatatcggatcgcgcgcagatcttgtcatgctgatcatgtgcaatgtggttccatat

SEQ ID NO: 495827 - DNA, 209 bp, Homo sapiens
attgctcagttctgtattgtaccgtgtatcatcacctgttaacttttgtgcatcctgaaaagatccgtacagatcggatcttctccagagacgcctcgagatcctcctgactttcccctagagccttgcactgtgactatacctctgtcctgcacttactgtgctcggaagtaccgggcagtactaaagctcataggcgtccgtagcgg

SEQ ID NO: 495828 - DNA, 207 bp, Homo sapiens
  misc_feature (5)..(5): n is a, c, g, or t
  misc_feature (7)..(7): n is a, c, g, or t
  misc_feature (111)..(111): n is a, c, g, or t
tggtntncttttacggggaagcgcttgtgaatagcctattctctgtccttctacaggagaattgaatagatagaaaccgaccggatactccgtctgaactcagatcacgtnggactttaatcgttgaacaaacgaacctttaatagcggctgcaccatcgggatgtcctgatcccatcgaggtcgtccctattgttgataggactct

SEQ ID NO: 495829 - DNA, 540 bp, Homo sapiens
  misc_feature (1)..(1): n is a, c, g, or t
  misc_feature (41)..(41): n is a, c, g, or t
  misc_feature (344)..(344): n is a, c, g, or t
  misc_feature (467)..(467): n is a, c, g, or t
  misc_feature (493)..(493): n is a, c, g, or t
  misc_feature (522)..(522): n is a, c, g, or t
nccctccctgaggaggaaggcccatgtgtggccccctgganctacctgccccccgagactgattgacggggcgccactgcacccatgagaacggtggatctgtggtgccttggagctgcctttgcttaatgagcctcgtctggtgtggggaaccccacccctcttgaagagtcgcactcaccacccattcgcagacccctcatttcgccgcgcgcactttcgctcccaaggtggacctaaagttccccgcttttgtgcccacgggagcccaggacctcattctccaaactgtctcaggcataacccctcggaacggctgcccctggcccaggtctcagcccacnccttgggtccgggccaactctcggagggtgctgcctccctctgcccttcaatctgtcgcctgatggtccctgtcattcactcgggtgcgtgtgtttgtatgtctgtgtatgtataggggaaanaagggatccctaactgttcccttatntgttttttacctcctcctttgtttaatanaggctgaagctttttgta

SEQ ID NO: 495830 - DNA, 350 bp, Homo sapiens
ctcggccgctctcgtgagactggtgtgtaggccaggttgtatagggagagtgttggcgagcagagtgtccaggagaggttttccagagatagggcaggcatgtgcgggaacaaaggaaagacagtagtgatgacagtagtctgaaggcaaggatgctctgggcaaggggtcttatcccgtgtggtagcttttaccaagatggagatacgtgtaactcccatatgcttatccttaaaaatgagacacatggatactcctgtattgaaatgtggggtttatactgtctcctcatggcctgggtcgaatattgtaactgcttcaaccaataggatacagagtctcacggaaag

SEQ ID NO: 495831 - DNA, 935 bp, Homo sapiens
  misc_feature (43)..(43): n is a, c, g, or t
  misc_feature (63)..(63): n is a, c, g, or t
  misc_feature (70)..(70): n is a, c, g, or t
  misc_feature (134)..(134): n is a, c, g, or t
  misc_feature (279)..(279): n is a, c, g, or t
  misc_feature (294)..(295): n is a, c, g, or t
  misc_feature (298)..(298): n is a, c, g, or t
  misc_feature (306)..(306): n is a, c, g, or t
  misc_feature (314)..(314): n is a, c, g, or t
  misc_feature (329)..(329): n is a, c, g, or t
  misc_feature (340)..(341): n is a, c, g, or t
  misc_feature (344)..(344): n is a, c, g, or t
  misc_feature (368)..(368): n is a, c, g, or t
  misc_feature (388)..(388): n is a, c, g, or t
  misc_feature (401)..(401): n is a, c, g, or t
  misc_feature (404)..(404): n is a, c, g, or t
  misc_feature (438)..(438): n is a, c, g, or t
  misc_feature (448)..(448): n is a, c, g, or t
  misc_feature (454)..(454): n is a, c, g, or t
  misc_feature (457)..(457): n is a, c, g, or t
  misc_feature (484)..(484): n is a, c, g, or t
  misc_feature (493)..(493): n is a, c, g, or t
  misc_feature (496)..(496): n is a, c, g, or t
  misc_feature (500)..(500): n is a, c, g, or t
  misc_feature (504)..(505): n is a, c, g, or t
  misc_feature (511)..(511): n is a, c, g, or t
  misc_feature (518)..(518): n is a, c, g, or t
  misc_feature (543)..(543): n is a, c, g, or t
  misc_feature (547)..(547): n is a, c, g, or t
  misc_feature (552)..(552): n is a, c, g, or t
  misc_feature (615)..(615): n is a, c, g, or t
  misc_feature (620)..(620): n is a, c, g, or t
  misc_feature (739)..(739): n is a, c, g, or t
  misc_feature (862)..(862): n is a, c, g, or t
  misc_feature (888)..(888): n is a, c, g, or t
  misc_feature (917)..(917): n is a, c, g, or t
ccttaaatccagaatctccctccagtttccccttacaactccnagccctgtgtcccccgcctnggccacntcttaccccagttagctcctatcatcttttccagctcttttatccttttgcctgaggcctcctntgtctcttcccccagccatcccaacatcctgcgtctctacaactatttttatgaccggaggaggatctacttgattctagagtatgccccccgcggggagctctacaaggagctgcagaagagctgcacatttgacgagcagcgnacagccacggtccgnncgnatcatcgnaggagttngcagatgctctaatncactcccatgnnaanaaggtcattaacacacacataaanccagaaaatctgctcttagngctcaaggcaganctnaagatagctcacttccgctggtctgtgcatcgcncacctccctnaggagnaanacaatctgtggcaccctggactacctncccccacanatnattnaggnncgcatncacaatnagaaggtggatctttggtgcattgnagtnctttnctatgagctgctggtggggaacccaccctttgagagtgcatcacacaacgagacctatcgccncatcntcaaggtggacctaaagttccccgcttttgtgcccacgggagcccaggacctcattctccaaactgtctcaggcataacccctcggaacggctgcccctggcccaggtctcagcccacnccttgggtccgggccaactctcggagggtgctgcctccctctgcccttcaatctgtcgcctgatggtccctgtcattcactcgggtgcgtgtgtttgtatgtctgtgtatgtataggggaaanaagggatccctaactgttcccttatntgttttttacctcctcctttgtttaatanaggctgaagctttttgta

SEQ ID NO: 495832 - DNA, 1484 bp, Homo sapiens
  misc_feature (1280)..(1280): n is a, c, g, or t
  misc_feature (1343)..(1343): n is a, c, g, or t
gcagtgagcctagatcaaactaccacgctccagcctgggcaacagagtgagactctgtctcataaaaaaaaaaaaaaaaaaaaaaaaaaatctccaaagagagattgacccttctcccctttttttttttatattgggaggagaggagggagggagtattgcgccttaagagacgctcctaaacgcggggccgagggttaacacaccggggaacaaaatttttttcccaaatatttttctttttccctcttagagaagcgagagttcccttctttattatatgcgctgtgcaacaacttttcccaaacaattctattaacccgcgctggtttcttctgtgtgcttgtgagaaaacccctatattatttacagaaacccccgcgtctttgtggtgttttgtgcggcgaagctttgtgcgaacactgtgcggagagaacggacgagcctatctgggggagccatctacatcttatatatgttaaacccctttttttttgttcctcaacacactctttctttagagacacctttcataggagaccaccaacattttttctctccaaacatcttgtttgtgagagagaaatcctccaggggggacgacaaacgcgcgaggtcttttttaaagaggagggcggccctctttttttccccacaagaagaatatatcccacgcttttaaattttttgtgtgtgagggacgagcgcactcattcctctctcctatggacacgatgtcttcaaacagtatgaggagatacaacagactgctgcgcttaatatgagcaccccctttggattatttgttgggcacccccattaatatcattttatttgacgcgacaacccgcgaggaaagagaaaaacgctcccccgaagggtggcttgtttgtgacactgaggtgatgaactccccacaagacaagaggtgggtgggggaccccctcaccgaagagggctctttctaaaagattttgccagagcgtttccccccctataaggaggggctgttgagagaaaactatatatggcggctaagtacaactatctcctcttgaggagagacgcacggggcgcgtcttttcccacagcagtgcgtcacacagccccaccagctgctgcttcgcctgatgaaggaggaggcgaacacacctttttcttgtcagacagaagcacgcaggcttatattttggacgaaacgaatcgtctttcatccacactctttgttagacaaaacccccacccactttctgttgttctaggagcatttgttgtggcgnaccaccaacaccaatcctactttgcttttcatataagaagcggcgggccacaacgagtcgatnctctcttttcggatggtatacaacccgcctgtggagagggggagggagacaaccactcctcgtggggaggatacgggggggacgcaccatcaaaagagggagatcacacccacccagtcagcgagggttatacaggtcggt

SEQ ID NO: 495833 - DNA, 99 bp, Homo sapiens
agacaccttagccaaaccatttaccaaataagtataggcgatagaattgaacctggcgcaataatatagtacgcaggatagatgaaaattatacccagc

SEQ ID NO: 495834 - DNA, 322 bp, Homo sapiens
ccggcctgtgcagacacagcatgctggccatttttttgtagagacggtttcgccatgttgcccaggctggtctcgaactcctgagctcaagcaatttgctcaccttggcctcccagagtactgggattacaggctatgagccactgaacccagctgacttctcttttttttttttactctttaggggccgtacttttgtttttctttgtgtgtgtctcataatttttttggttgaaactgattttttagagtgttattttttttttacatacagtcagatttatcattgattaatataaccttaagggttttttgtttgtgc

SEQ ID NO: 495835 - DNA, 955 bp, Homo sapiens
tgtgcgggcgcaagtaggaagtggtgacgttcgagaagttaagatggccgtcgcttgatccctgtgcctctgtccccgatactgttcaattagcatacagattcatctgaggacggatcaggaacatgaatgatgcggataccctgtggtggattattgactgtcgtctatacgccttggaccaggactgtagtgaagatcgatagctaaaactcctgaatgtcgcaaacatttttatcaaagtgaagtggatcagttagaagctctacgcgaagcagttggcttgataactgaaagctattactcaaagaaatacgctgggctgtgcccatttggggaatcatgctttgagaaaagtgtcttttgtactggcagacaacatgaatgatcggtgctggacgatttcaccaacatacatgatcaagtccttctattactgcaaaggtcttcagatagaatgtcataacgaggtattcggagaactcactgaatgaaaattgtgcaacaccaaggtaggtttgccagatgtgaaggcaagatacatccataagcgtggttcacagacctggggagactcctcacgcaggcccctgttgcaactcgcggagacctacgcgctttgacgaaatcaccctcgctgaaaccagactctctgccaaaccaacaaccacaccatcatcttaactttatggcccagcaactggcattcggtacccatctgaataacgattggccgggtgaccagccaattatacgccaaattccaagccgtgtgaagtatatatacaccaacaaagtaaccgcataaaacgatgaataatcaggcagtggtacccaaatttcaccaatcaaaacagacacataacaccgtcaataaaccataagagcaaacctgcaagcctctacatgcttgtttctcttttttatatattttgctcccacacaaccaacaaac

SEQ ID NO: 495836 - DNA, 134 bp, Homo sapiens
atggacaggaaggcgggctctacgggcggctgaatggtggggactagatggaggattgccagccgacatcacatggtccggctgtactcgaagccactcttggaaaagatgcccgaccatggaaagaaactgca

SEQ ID NO: 495837 - DNA, 319 bp, Homo sapiens
  misc_feature (36)..(36): n is a, c, g, or t
atgtcgtctcggtcactgcaactctgcttcctgganttcaagcaagttctctacgtcagccccccaagtagctgggattacaggcggctgccaccacactcggctaattttgtatttttagtagagacggggtttcacccatgttggccaggctggtcttgaactcctgacctcaggtgatctgcctgcctcggcctcccaaagtgctggaattacaggcgtgaaccactgcgccaagcccagtccaggttttcatggtgtcctaaccagatgtctgcaccgtggctccccggcgctctgtccagccattgcactccgg

SEQ ID NO: 495838 - DNA, 890 bp, Homo sapiens
gagcgtcccccacaccacagacccgaggcggccgaacatgtttctattttgtctatgtatctatgttattgtgttcttctttttcgtacaaaacgtggtgcactcctctctctgcggccagcaggggtggcaaggagcaggcgtccgtacatccagggagccaacgagcagcatgcaacgctccgccggagttaaaatctcccaccgcaggcacatgacacaccaaacagggtgcgtgcgagagataaccgcggtgctcttgccgcgcctagtggaatgacgaccttcttatgtttatctacgtcggccaagagaggagtgctatgctagggagtcgcttcccagggaggcgtgtgttgacatagacgcctcgtggaggcaggagtgcgagggtccgtcctgtccagcaggcagccagggcggtccatgacatattaaaccgggcattgtgaggcccccacaggacgcttctcactacagaatgagagcagacatggattacttgtttgacagtccttcacttatttttttaacaaatgtattcctactcttgcctgggaaaaaaagcagttgctgagtagcaggcgagaggggcagggctggtcttacacaacaaggaggggtgagggatttttcgagacacggcgggcgttataactatcgaattgccaaggaagatttacagcaaggcgtgcggccttcacaggtcctttggcaggcggcgcgaacggcccttttctggtaccgaggtctccaagttctcgtgtgcaaggacacttgtctcctttgcaccacctttcatatccttcttttgcctaccaatgtgtcttttgaatttcccaaatctaatgtaaattctggaagggcagcctccttgctgaccaacgacg

SEQ ID NO: 495839 - DNA, 309 bp, Homo sapiens
ccatggacctcccaaagtgctgggattacaggtgtgagccaccctgcacttgtggcatgtatttgtatttatggacattagactagggttgggaaacaattctgtaatggagccagagagtaaatattttcagctttatgggccattagtcatagccattcagctctgcctttagagcaggaaagtagacgtggacgatatataaatgtgcatgagcaggtatgagctgcgaggtgagcatgcgtattcattgggtggcaagaacctcctcgcgcgcgcatgcttgctaaagaagttacatatgagggg

SEQ ID NO: 495840 - DNA, 420 bp, Homo sapiens
tagatgtagctgaaagcttatctcgtgataaataatcactgtaatttaggggaagaatgtcctgtagcaaaaggatactcaaagctgcaatccccaaggaaaatcatgtattagtatggctaaatgagggtctgtatcttcttagtttggagaggtggctagatgtttgctgtaaactggaatgggataattatattcgttaacgtttacgccccctataagcctaaagccatctatctggataccctgagagagacctactacgactgggctctagggtatacaatccgtcatctgatcatatacctgacctccccccgagtccaacctaaatgtgctgactcagcacataactctaaaacattatcatcacagagtgcaacatgctacgatccactcaacatcaagacagattctgtc

SEQ ID NO: 495841 - DNA, 505 bp, Homo sapiens
  misc_feature (120)..(120): n is a, c, g, or t
  misc_feature (236)..(236): n is a, c, g, or t
ggggagttccgtgtgggccgtgaaggttctccagtgctgctccactgccccatggcacaaatgtgtttctatccctttggacaggttttcccaaaaacccagcgtcctcccggcttttcncgtgtcccaaaagcttagattgggaaaaaaaacttttggctttatgtcctggaggaagcctatacccccaaaccttggctggtccggataaacaaggtaaagggcctggataatcnaggcttgtccagggcattaatgtcccggcccgcttttatttgtttcgcccctgggccccccccctttagggccggggaaaattttttttttttttttttttaaaaacccggttggaaaaaccaaactggagggcccccaaattgtttggaagttttttcttgggccggatggggtgggcccaaaaaaattatttttttaattttaacccgggtccccaaaaaaaagtcctggctttcccttgggccattaaagggggggatttttttta

SEQ ID NO: 495842 - DNA, 295 bp, Homo sapiens
catgtgttcagcgtgctaaagtcgttggaactcttgctgtgtgttcattgtcgtctgtgctgttaccacgtcctgtcatgtttgacaggggccatgggagattccatccggaggtccaacctttgcatccagtggcgatggagggcttgagtgacagcgccatacgtgtttgtctgaggtttaaaacaattcaattacaaaagcggcagcaggcaatgcatgcccatgcatgcagccctcccgaccgcccctcgtgtctgtttgtgctgtacggaggtgttttttacatttaaga

SEQ ID NO: 495843 - DNA, 122 bp, Homo sapiens
aaagcccccccccccccctggccccctggggggtaggtttccccttatccttttggtccagggcaaggagggggtgctttttggggggggggctgtttttcccttaaaaaaaccccgggcca

SEQ ID NO: 495844 - DNA, 986 bp, Homo sapiens
  misc_feature (619)..(619): n is a, c, g, or t
  misc_feature (641)..(641): n is a, c, g, or t
  misc_feature (735)..(735): n is a, c, g, or t
  misc_feature (851)..(851): n is a, c, g, or t
ctgctttcgccaacattcgcgaaaatgggggcacaatttcacggggtaacaccctgcgggcacaagtcgccaaccacacaaacctttcgtgtgagaaaatgctttgaagccaataatgacattaacgcctaacaggcgttcgggacatgtgggagggtttcccgcccaaggaccatgcttttagcaatcggggcttctaacccccctaacgaccctgggagcggcaccttaggggggttcatagggccaagttcccaactaaggcctgcatcggtcaagggaaccaccgcgtcaaatgcctattctagaccctagggaacaagacccccaccgcccctcttccgtccccctcataggggccatgtcagatagccctggggaaacgctctgtccaagcgcatctgggcacagtggttgccccctttgcaagccattacggcgcaccctcagagctgataggggccctgtgacgagaagaccagtacggcggtcttgacagcggtatgacgatgggaggtcacgattacctattctcaggtatggcaaaggggataggacggccagagtctcccagtggctgatgctctatggctgctggccttaatcctaccccctcttnaaagaagagtgggacttggagngaaaggctccatgcacccttcgctcctcctctcatcatttgcattgggcattagtgtccccccccgttgcaatacctccaagcagactccagcncctggacccctggggtggccagggcttccccatcagctcccaacgagcctcctcagggggtaggagagcactgcctctatgccctgcagagcaataacactatatttatttttggntttggccagggaggcgcagggacatggggcaagccagggcccagagcccttggctgtacagagactctattttaatgtatattgctgcaaagagaaaccgcttcttggtttaaaccgtttggatgagcaaaataa

SEQ ID NO: 495845 - DNA, 436 bp, Homo sapiens
cctccagctccagggctcagcgatactccgggctcagcctcctgagtagctgggattacaggcacctgccaccaagccggctaatgttgctatgtcatcgtagagatggggtttcaccatataggccaggcgggtcttgaaatcctgacctcaagtgatccacccgcctaggcctcccaaagtgctaggatacagtagggagatctccctactgtatcctagactgattactgccagactggaggtagggttgaacatggcaaaattctatgaagttcagatagagcattcatatgtacctatagtttgctttggtataagagacagggtcttgctctgttacggcagccgcaaactcccaggctcaagttatcctcccacctcagcctctcaactatagccgcatgccatcacacccagctaatttggacttaat

SEQ ID NO: 495846 - DNA, 658 bp, Homo sapiens
  misc_feature (34)..(34): n is a, c, g, or t
  misc_feature (96)..(96): n is a, c, g, or t
  misc_feature (99)..(99): n is a, c, g, or t
  misc_feature (106)..(108): n is a, c, g, or t
  misc_feature (110)..(122): n is a, c, g, or t
  misc_feature (126)..(128): n is a, c, g, or t
  misc_feature (130)..(131): n is a, c, g, or t
  misc_feature (134)..(136): n is a, c, g, or t
  misc_feature (140)..(145): n is a, c, g, or t
  misc_feature (147)..(147): n is a, c, g, or t
  misc_feature (152)..(152): n is a, c, g, or t
  misc_feature (158)..(159): n is a, c, g, or t
  misc_feature (169)..(169): n is a, c, g, or t
  misc_feature (173)..(173): n is a, c, g, or t
  misc_feature (175)..(176): n is a, c, g, or t
  misc_feature (182)..(184): n is a, c, g, or t
  misc_feature (188)..(188): n is a, c, g, or t
  misc_feature (200)..(201): n is a, c, g, or t
  misc_feature (206)..(206): n is a, c, g, or t
  misc_feature (215)..(215): n is a, c, g, or t
  misc_feature (227)..(227): n is a, c, g, or t
  misc_feature (230)..(230): n is a, c, g, or t
  misc_feature (235)..(236): n is a, c, g, or t
  misc_feature (246)..(248): n is a, c, g, or t
  misc_feature (262)..(264): n is a, c, g, or t
  misc_feature (272)..(272): n is a, c, g, or t
  misc_feature (291)..(291): n is a, c, g, or t
  misc_feature (313)..(313): n is a, c, g, or t
  misc_feature (407)..(407): n is a, c, g, or t
  misc_feature (523)..(523): n is a, c, g, or t
acaccaagcacacacaacacacacatcatcacanacacacacacacacacatcacgggggtgtcacaccacagcatgggcacaccgtgtctaccanggntatgggnnncnnnnnnnnnnnnnttgnnngnnatnnngtgnnnnnngngtgtngggggnnttgcggccgncctngnnggatgnnngggntgagtgggaggnngaaanttatctcanggagggattgtnatngaggnnagatgttatnnnagtgggtgttgatnnntctgttgnttaatcctaccccctcttnaaagaagagtgggacttggagngaaaggctccatgcacccttcgctcctcctctcatcatttgcattgggcattagtgtccccccccgttgcaatacctccaagcagactccagcncctggacccctggggtggccagggcttccccatcagctcccaacgagcctcctcagggggtaggagagcactgcctctatgccctgcagagcaataacactatatttatttttggntttggccagggaggcgcagggacatggggcaagccagggcccagagcccttggctgtacagagactctattttaatgtatattgctgcaaagagaaaccgcttcttggtttaaaccgtttggatgagcaaaataa

SEQ ID NO: 495847 - DNA, 816 bp, Homo sapiens
cccccgggtttcctttctcttgtaggagacaacccccggcccttgagtcccccccgatcccttcctggtccctccgggtgcccccatagcttgtgcacggcttctcctttagggggcccctcccctgtgcccaggctttttcgcggcggccaccccccaggtgtcccctgcctgtgttgtgggggagtctcccccgaggacccccgcgctgttgctgttggaacccctcttcatggtgcgcttctgccctcccgcaccccttgacacgcccccctcgccccgttttgtgaaggtggtcgcgggccacacgggcgttttctttttcgtgaaccattggcggagcttcccagtgaggccccattgagcttctcctcgcccttgtcgcaccctctactcggggtcttggtcacactccttagggggtctagacccctctgctgttggaaaggggaccttctcgcatgtcttgtggagagcacctgctctccgcggccgggtttcaagaccccccgggagattttgtccctagtggggtcccccccgcgactgtgggtgcttcatgtgaactcgcgcagaacccgggggacacctccctctcccctgccgggttccgccgcaagccccccgcccgacccgggaccccggagagctgttggggtcctctgagcgtcgacatttttttgccccgagggtggtttggttattaaacagatttccctggggccccccccgcccctgggaaaccccaaaggcaaagggggcggccccctctgacacccccaaccggccggcccctatttaaattggcccccccca

SEQ ID NO: 495848 - DNA, 160 bp, Homo sapiens
aaggaccctacctggtgcttctaactactgaatctacagtttgaacagtggaaagaggatggactccccatacccaagtcaaagaaacgccccaaccttcagagtcatgggccattgttccaagatcaagctgtatcaaattaaagctaaaaatccctta

SEQ ID NO: 495849 - DNA, 217 bp, Homo sapiens
aggaatttgggagggcgagggtttcggatcaactaaggtcgggagttcgggaacaggctggccaacaacaagaaccaaaaagaaccattgaaccaacttcttccagaaagaattcccagcccgaaaattggttcttgaattttccagcgaaaggggtcttaaacttgttagccccgcccgaaggccagcttggtgggtgggtggtcaatcaatcctt

SEQ ID NO: 495850 - DNA, 166 bp, Homo sapiens
tttcacgtcaaacaacccgcggcacttggccctcgcggaaaaactgtccagcgtggcagaaactgtctacatgatgcaggagtgcaccactgtattcccgggccgcgtcgaggactactatagaaagtctcctgtgatgcaggattacttctcccggtgtcatcag

SEQ ID NO: 495851 - DNA, 132 bp, Homo sapiens
cctagaggatcctcttgctttgggacggcggcatctataacttcattggtgagttcatgaaggcagcgtggattcgcagacctgataggtctaaaccttgtcatgttcctggtatgccggcgatggagagta

SEQ ID NO: 495852 - DNA, 498 bp, Homo sapiens
ttttgcaagaacttgttgttgtgtatacaaggttgagcattgactcctgcaagtggcaatggaaacaccataccaaaaattcctatttcacagataaactggaaaatgcttctgtacaaaattctttgtgcattattagggacacactgaccaaggataaatccaatgctagtctgttgactaacttcaccatttagtgaagcagtctagcctgaacaaactggcatagtatctgcatataacctacgcacatcctcccataaactttaagtcatccctaggttacttatactaccgaatacaatgcacatcctatataaattgtcatcatactgtatttagggaatactgacaggaaaaaaggtttggacatgttcagtatagacacaaccatctttctttccccccaagtatttttgatccacagttcgttgaatttacaagtgcccatggactgtaatcagctcttaataaagttgtatatcatttatgaataaa

SEQ ID NO: 495853 - DNA, 151 bp, Homo sapiens
atgctttctacggcgaccctgatagaagctgccaacgagcgcgaagaggcaaccgcaattgcggtggcgctgcggctggcgcttgaagcgccgggcgcgggcgttcgtctcaggcagcgctgatcacgcccgaccgcggactggcgcggcg

SEQ ID NO: 495854 - DNA, 219 bp, Homo sapiens
gcagtggtgtggcttcctgagtagctgggactacaggaccattccaccacacttggctagttttttaattttttgtagagacggggtctctgttgcccagactggtctcaaactcctgggctcaagcggtcctcctgcttcagcctcctaaagcgttgggattagaggtgtgagccaccacacctggccttatattttcaaattggcattttattttta

SEQ ID NO: 495855 - DNA, 745 bp, Homo sapiens
  misc_feature (1)..(1): n is a, c, g, or t
  misc_feature (12)..(12): n is a, c, g, or t
  misc_feature (29)..(29): n is a, c, g, or t
  misc_feature (241)..(241): n is a, c, g, or t
  misc_feature (606)..(606): n is a, c, g, or t
ntcgtttttgtncatccgcgcccccctgngtggggaccactgaattcggccattatggccggggagggaaattttattttgagagaaagaggcgggtaaatatataatcccaaaacccccttggctcaaatacggactcccaagaaatttacgacaaccacaaaatccctggggactatcacccaaaaccgccaaaaagtgagccgcactaaagccacaatagaaaggcagttcttcttanaaaaaggagggggcggcattaaaaaaaaaggataggactgaaaacaggccccatcctaaccaaatgagtcctagcaaacatgatttccaaagccctggccaacaaaaacctaaattttaaaaaattagtacccaaacttaaggccttcaacccaaactaaaccggaaaagtggccctggccaccctaaacccccaatgccttgggaccggcccaaaaggatccctatttaaaaaacctgtgccgccagaaggaaaacctccaaccaaggtcccagtgtacaacccaatcaacacttttaaaaaaaaaaaagaaatagcagtggtacaatcccaagacgaccccaccctgcacaacaaagagattncaaaaaatcatagaatacacatctctgcagaattttcatgaggttgggccccggtgccgaaaactagtcaagctgtataccttctgcgggctgggcactctcgcatacccatatcatcacttcgggaccccccctcccc

SEQ ID NO: 495856 - DNA, 745 bp, Homo sapiens
  misc_feature (745)..(745): n is a, c, g, or t
ggaatgagatgagatgaaatgagatgaaactgatagatgagataaaatgactgatatgaacatgagatgaatgactgagatgatgacgatgaactgatgaaactgaaactgactgagactgagactgatgaacctgaaactggctgacgactgacaactgactgacgactgaaacctgaaactagctgacactgacaacttgaacataaaactcgacgatgacgatgaaactgactgacgatgactgaacactaaaactgactgaaactgactgagggtgactgacgactgacaatgactgacgatgaaactgactgagcatgacgatgacgatgagcatgacaataactgacaacgaacattgaaactgacgatacagactacgagactgacgatgaaactgactgacgatgaaactgacactgatgacgataacgatgaacaagagttgatgagcatgatgacgactgaaactgaggatgaaacagatgaaatcgatgagatgaacatgaaactgatcgagatgacaatgacggtgacaatgacacttcagatgaaactgtaactcgacgatgacaacgaaactgacaactgacaatgaacaacatgaacactgaacataactggaacatgaaggtgacactcaacactgagactgactgaacctttacatgatgaaatgacactgctgaaactggaacactgactgagactgcaactgcgcatgacctgatcaggatgaacn

SEQ ID NO: 495857 - DNA, 149 bp, Homo sapiens
ccattagactaacataacgcattcttaatttaactatttatattatcctaactagtagcgtattcctactactcaacttaaactccagcaccacgaccctactgctatctcgcacctgggttaggtctacctgggtaaggtctaccggg

SEQ ID NO: 495858 - DNA, 194 bp, Homo sapiens
agaaagggcgggggctccttgatattagggaacaggtccctgagcttttacagcccttcatatttattaggtagagtgaatagggaggaagggataactgtcggtcagctatttgatttaacacgggcccacatgattcctttctttgttcaacaggttctggatgttcctgtgggcccgtgttaaatcaaata

SEQ ID NO: 495859 - DNA, 434 bp, Homo sapiens
taaaggccggcaattatagatttgtgcaattagcgacccacatatacatttaagagataatactgactgtcgaccagaaccttctgatggtactgaagcatcgtgctctataaagttacttcagctttacatgtcaatgagataaaagatccctcaatgggatgtaatagcttattctgcactagatacaagtaatatgtatagatttagaacaaatgactacttttcaccttccaggagcctgtatttattaatacaaaattagataggtgtaccacccacatgtatgcataagtgctactcaaatttacaccgttcatatctgaaatcccacaataaatgcaaataaatggatactagtttatatatttcatattttcattcatctgatatgactgctgctggaaagaaagtcccggaggccaaggcggaag

SEQ ID NO: 495860 - DNA, 314 bp, Homo sapiens
aacgatccccttatgctccctcttcactgcactgctgctaccgacactgtgttgatctgatccagagtaagtgcctctcccaggagaacgctaccacggagctcctcactaagctgtctgtgcacacagtgtggggatgttgaacatgtgacctggagtgtgagctgcccagcctagctataactagctgccgtctacagtcggtgggcctacgggctgctgtcctatttaccccacgctgtagtgctgtggaggaccacataacacttgctgttccgccggggtttacgtagtgacacgccagaaaggtacct

SEQ ID NO: 495861 - DNA, 845 bp, Homo sapiens
gccctgagtgagtctctggcgtcgaaatggcggttcctctcgcaggctctattccgttcgctggttcgccacctcaggggaacgatggccatggagtccacagccactggcggcgtcgccgggtgctggtttctgccgataaaattgaagatgttcctgctccttctacatcgtgcagataaagtggagagtctggatgtggatagtgaagctaagaaactataggagtttaggacagaaacatcgtggtgatagggggatattgcccagcagctggtcaaggcgattcctaggaagcaggtagtcttttagagtaatgaagtatggagagacagcattatgagtgtggagaagccttcttcgactatgggaaatttacttctggagtatggctaagatatggatgaaatgggtgtgtatgggagaatggaccgtatggtaagagtcggtgacatgatgggaggacgcgagatgacggggagataatagatacgagagatgaaatcattctgtgttagacatccagaatgaattaagatttgattgaaggagggtgagggaatgaaggagtaccagacatcaacagtgaagtgcagggccgagagaggaaggacaataggaacccaaagacacaaaaggaaacgaaaggaaatgccgatggcggccatcggccgggacagggatctcacaaccagtgcagcggtgccaaagagcgacgcggtgctcgagacaggccgcctacaagcacagtcagccgagcgagcgcaatcacgccgtcccgtgacccaggacggaaccagggagcccatcgagcactccgcgcacacgccacgagcacccagaac

SEQ ID NO: 495862 - DNA, 117 bp, Homo sapiens
tggctagacgacccaggatcagtaccaatctgggtaacatagtgagatcccatctccgagccgggggttgcagcgcgacgaagttccacctccgctgtcctgggattgggctatcaa

SEQ ID NO: 495863 - DNA, 751 bp, Homo sapiens
  misc_feature (328)..(328): n is a, c, g, or t
ctgggctcttgcctgtgaaatctttctttgctttccccatcttttcctcgcattttttcaccatctttcccttcaatctccaaggagccatatgcgatgacattctggcatcccgacttacacgcgatcgagcgcctgatgactctggggttgcgcagaggtagggatcgactcgtagttggtgattggagagcaccccttcacaggggatctgacatccgtaggtactaccgtacaatgctggaatctgcaggaattcttagggggcctgagccctggggtattgtaccgacttgtgtgggcaccctgccacatgtctggtctgtcnttctagtggcatgctccacatcggttgcgctaaacgcacacttgggtggcattgcggtatgctctttctgggagcagcctttgccacaggctgctgtagctctgtgggtcataagaattgacttcagcaaggctcaggaggaaagtaccgggctgctgagcgtgcctccaggatcatggtcgacatcgacagtcgtgctcccagtgcgggctcctgggcctcatcctctaaccccattttccgccagaacctccgcattgaccttctgggttggggggaaggcctggtctgatgacacaagtcagctgtgaccagatcaagctgcccgggacgttccctcccttgagcagtacgccgaggagcgatgggaagtggtcttgacttcatggtgggctccccgtggagtgtcagccagactggtca

SEQ ID NO: 495864 - DNA, 677 bp, Homo sapiens
  misc_feature (45)..(45): n is a, c, g, or t
  misc_feature (64)..(65): n is a, c, g, or t
  misc_feature (74)..(74): n is a, c, g, or t
  misc_feature (85)..(85): n is a, c, g, or t
  misc_feature (88)..(88): n is a, c, g, or t
  misc_feature (90)..(90): n is a, c, g, or t
  misc_feature (101)..(101): n is a, c, g, or t
  misc_feature (106)..(106): n is a, c, g, or t
  misc_feature (111)..(111): n is a, c, g, or t
  misc_feature (124)..(124): n is a, c, g, or t
  misc_feature (172)..(172): n is a, c, g, or t
  misc_feature (213)..(213): n is a, c, g, or t
  misc_feature (224)..(226): n is a, c, g, or t
  misc_feature (261)..(261): n is a, c, g, or t
  misc_feature (279)..(279): n is a, c, g, or t
  misc_feature (282)..(282): n is a, c, g, or t
  misc_feature (289)..(289): n is a, c, g, or t
  misc_feature (296)..(296): n is a, c, g, or t
  misc_feature (306)..(306): n is a, c, g, or t
  misc_feature (308)..(308): n is a, c, g, or t
  misc_feature (326)..(327): n is a, c, g, or t
  misc_feature (382)..(382): n is a, c, g, or t
  misc_feature (390)..(390): n is a, c, g, or t
  misc_feature (393)..(393): n is a, c, g, or t
  misc_feature (421)..(421): n is a, c, g, or t
  misc_feature (495)..(495): n is a, c, g, or t
  misc_feature (559)..(559): n is a, c, g, or t
  misc_feature (663)..(663): n is a, c, g, or t
ttttttttagagagaagtggggtggtttttaggatggcaaggganttcctgtaacaacgcatcnnatatttggnatgactattanaanancggcaatgtgnaatcnaagtntttgggcatattntgaattttgggggatgctcgctcggaaccgactgctgttaccttcacngttccagtttttaaatcctgagtcaagccaaaaaaaaaaanaaaaccaaaannnatcaaaaaaaaacaaataaagcgatgccaatctcnggttgttttttgcgcaanttnggttttnttaaganagggtgtgangnaacttggttatagtcggnntggaggcttttgtggtggatgttggaggggcgggattcgtcatagtcctggttgntgatccanatntggtggaaggtggacagcgaggccaggntggagccgccgatccacacggagtacttgcgctcaggaggagcaatgatcttgatcttcattgtgctgggtgcnagggcagtgatctccttctgcatcctgtcggcaatgccaggggtacatggtggtgccgccaganagcactgtgttggcgtacaggtctttgcggatgtccacgtcacacttcatgatggagttgagggtagtttcgtggatgccacaggactccatgcccaggaaggnaggctggaagagtg

SEQ ID NO: 495865 - DNA, 967 bp, Homo sapiens
  misc_feature (310)..(310): n is a, c, g, or t
  misc_feature (354)..(354): n is a, c, g, or t
  misc_feature (391)..(391): n is a, c, g, or t
  misc_feature (468)..(469): n is a, c, g, or t
  misc_feature (488)..(488): n is a, c, g, or t
attcgcagtggtcgcttcttctcctggattgttaaggatccaagtaagctcttattggagagaagacgatctgcacttcgcattgtggcatgacatttaattatagggtcctgttatatagaagggagactacatgaatgtgtaagatcttggaggaagacagcagagagagagagagagatcagagatcccagggttaaaagtgggagaaatgtcacagatacagtcatccaaagagaggagtccagtgatggaggcagaggtaaactttggagaggacaggaagatgtcacccaagcgcatagctaanagaaggtcccccccagcagatgccatccccaaaagcaagaaggngaaggtctcacacaggtcccacagcacagaacccggntggtgctgacactaggccaggcgacgtgggccagctggggctgggtgagaatgtgatggagaggaagaagccggccnnggtatccattccggaggangtggcgcagggctgaggctgggggcatgcacaccggtgtctaagcaaaagtggccaggtctattccttcggctgcgatgatgagggtgccccgggaagggagcacatccagggagggctcggagatggtccctgggagagtggagctgcaagagaaggtggcaccaggtgtcagcgggagacgtcacccagcaggccgcacgcgatgatggccgtgtctgtctcggggggctcctccggggacatcacggggcgattggactggtggcgcacgcaaaaagcatggccgcggcggcactgacgtgccggggaaaggggccacgaaccacctcgcgcgccgcaccgaggaccctaacccggcgcggggacggcccacccggggcgagaatcccggggcgcagccacaacgccccacgggcacacggacgccgcaaaacaccgcggcccccccagccggggcccccaacgcaccccccaaaa

SEQ ID NO: 495866 - DNA, 371 bp, Homo sapiens
ctggcccctattttgggccctgctcgtataacaggctggtcatgctcggctggcttcctgcaggtagccgccgccgttgttgcgcaggtcgatgaccacgccgtcgactttttccttctgcagttctgtcaggattttcttaacgtcgcgggtggtgctcttgtagtccggatcaccggcgcggaacgctttgaagtccaggtagaacgccgggatcaccaccacgcccagcttgtagtccttgccatcctgcttgaggttgaggacttgcttctggacggcctgatcttcgagcttcaccgcttcacgggtgatggacacgatcttgctggtctggtcgttcggtgcgttggtgtgcggaatcacttcca

SEQ ID NO: 495867 - DNA, 222 bp, Homo sapiens
acaagcagatcttattcaaaaaaacaaaaaaaggtgcaggcgatagagctcactccgggtactcccagcaacttgggaagcgccaaggcaaggcggaactaaggaggtcaggagatcgagaccatcctgggctaatttggtattttaagtagagatggggttactccggtgtaagatgaggctgatctcaaactcctttgcctctggggggtactccatccg

SEQ ID NO: 495868 - DNA, 623 bp, Homo sapiens
caataaattccaaccgagactgttcctttcgtgtccattctatttgactgcattccatttgagtccattaaatttctgcacattccattcctttccattccattccattccattcctttcggtgccattccattccactctactccattcaagtccattccatttgagtccattccattgattcgatgccattacattcaattctattccattcgactccattgcattccattcccttccaaacgattccattccattctattactttctattccaatccattccattccgttccattcgtttccattccattcgagtccactccattccagtccattccattcgagtccattccattccagtccattccattcaagtcaattccactccattccattccattcgatatctttcgataacaccccattccattctgctccttagtattcaattcaattccattccatttgattccattccatttgattacattccattcgactccattccattcgactttattccattcgagtccatttcattccattccattgcattccggtcgaaatcctatttcattccattttgttactgtccattccatttgagttcattccacgccc

SEQ ID NO: 495869 - DNA, 125 bp, Homo sapiens
acgagagaatgagccggtaccgcttctgcttctgccctcaccaaaaccctgcttcacctccctgtacttatgaattcgaacagcatacccccggattccgctacgaccaactcatacacctccac

SEQ ID NO: 495870 - DNA, 387 bp, Homo sapiens
aagcatttcgggggtagtagaggggaggcaagagggaaactgggtaggctggggagctatctaactgcccaagacacttgaatcctaaacaaacgggaactaaatgagaggtgggagggacatagtcttttctgacgggaactgtctgtgactcattctctttcaggagtcagaaactccaaaacctgtgggagtggggaggggcgagcagtgcggtttttagagaggtgtggagttattatagggactcttaaaattcttctcccttgctcagtgtggtgactcataccggtaatcccagcactttggaaggcagaggcaggaggtttgcttgagcctagaagttcaagaccagcctgggcaatgtagcaagaccccaactgtata

SEQ ID NO: 495871 - DNA, 296 bp, Homo sapiens
gaaaaaccaaaaacccccccccccaccctggatttaaaaagaaacaaaaatgcccccgtgaaatttgcctctgtcccaccatttcacccgggggtatgggaatgggggggaggggggaaacccccccgttcttctttttaaatgggggggttgtcccattttggtttgttttggcccccccccccggggggttggggtggggaccaacccttttgggcctgttatgattttgaccatttgccttgacccccaagtgaatttttttcctggggacccaaaaaaaagaataattttta

SEQ ID NO: 495872 - DNA, 470 bp, Homo sapiens
tggatgatagaagactgcactcactgcatttgtgagagtggccaggtcacctgtgtggtggagatttgtcccccggctccctgtcccagtcctgaattggtgaaaggaacctgctgtccagtttgcagagaccgaggaatgccaagtgattccccagagaagcgctaataaaagttttgtgctgttgagccccaaatgggaaatttctcaggaagagacatttaggacttcagaacttttaacttgtagtcacattgttgatatggaaaccactgacttaagcaacttagttcagtggtttccatatcaacaatgtgactacaagttgatatggaaaccactgacttaagcaacttagttcatctaatcttacatatacttacgatcttttattttttcattttctaacataccttgaaataattcaaaactaaaagcaataaagtgcatatgaagtgtttgatcataaa

SEQ ID NO: 495873 - DNA, 1277 bp, Homo sapiens
tggaaaaagtcttggaggccatggggttggtttgaaaccagtttgggggggttcaattccttcctttttggtctaaatttaatgtatatacgggtttctccgaaatgtgtgtgtgtggataggggtggggggcactccattatagctcacctccgaggttaagtggagggttctctctcatactattataggaattttctcgctttcaaagccaaaggctctctcaaattcagtaaaaatttatttaaatataacgtggcgtgttagagaaaaaattagaatgtgacccttacgagaagtgatataggagtgtttcacatgtgtgtgggtgatagtgcattcggggtatatctccgaagttaaccgttcggggggcaatttcgcggaatataggccgaaacacaagtgtttgtggtgggagaacaaaaaagttttagacactttatagcgccgcggaatgtaaaaattagtaatatagtgtacaagagtgggcattttgtggggggcgtataagagtgtttggggcctacataagggagtgtgttataagcccctgtgagagaaaatttgaggggggaaacaatctcaagtagtgaaatatgttgaagaggtctctctccatatgttatatgtgggaccaacaacatattaaacgaagggtctccctataatgtgtcgcgaagatgacgggggcaccattattatgtggtggagcacaagcatggtgtgggcgcctataaccaacagagcggtgtttataatatcagcagtgatgtctatcggcgcaggtattacttcacacccagaaagttgtcatcatactaaggtgatgacatactagaaaagatctttgggaggcctactaacatacattacacacaaatgtggcgaccaccacgattctacggaggaacggcccaccacaccacataatcaagaggggtgttgtcaaaacaacaacgagagccaactaacatgactcgttagacaatatctccacactaagaaagggggggcgtctcctaccaaaggacaatggaccccacagccgttagccgcccgcgccgacgaagagaacaaacatcacattcctgtttctcccacaatatatgttgtgcggctctactaccccgggatggagcacaaactatctagtttttgtgccacaaacgagttctcagcaggctcttaacagcgaattcacctttttgatacaagccgcctccggtgatttggggggaacaatatagcgcgccacgtacgcattatcagggcgg

SEQ ID NO: 495874 - DNA, 165 bp, Homo sapiens
ttgagaggcaggcacagaaagacaactaccacatgtctcactcatatgtgggagctaaaaaagctgatcccatagaagttgaacccacagaagtagagaggagaataatgtttaccagaggctgggaagggtagaggagttaagcaggaggaggctgtggggaag

SEQ ID NO: 495875 - DNA, 196 bp, Homo sapiens
tcaagcttctaacgatgtacggggacatggcgaaaaccctacagagtctactaaaaatacaaaaattggctgggcgtgctggtgtgcacctgtagtctcagctactcgggaggctagggcgagagaattgcttgagctcaggaggcaaaggctgcagtgagccgagatggtgccatgcactccagcctgggtgaca

SEQ ID NO: 495876 - DNA, 528 bp, Homo sapiens
gcagcgtagtaggtctgtagcatcctgatgcatatgcatattcaaacccaacaaaaaaaaagggcatcagcagtctggtgtatatcagtggagcaccaatattggatatatcggctttgaaaaaagcaagtcccactaggactggggcattccaaaataaagtgagcagaatcacccacatgtgcaagggcttcacacattaacccaccccctgtagcatgtttaaaaactgggtccggggcttgggaaagagctagggccttagggtctaggagttcccatctcagctaacgtatatggtatccctactattaggacatcaggaacgcaggtgatctagtccgggtctgaagagccagtgtacttgaacagacataaagaatctgtccctataagaaatatcatttctaacaaagcctactgagaccagccgtgaagaggcgctagctgggttgactcctctgggtgagttgcttggggtcttggcccggagtgcttggagatcccattttgagctgtggtcgctcg

SEQ ID NO: 495877 - DNA, 277 bp, Homo sapiens
tcacgtcccactcaagctgaaatcaaagtgaataaagtaggctgggggcggtgattcataatcccagccctttgggaggccaaggcgggtggatcacctgaggcaaggagttccagactaccctgatcaacatgctgaaaccccgtcactactaaaaatacaaaagatgcacggcatggcgacgcacacctataatcccaggtacctgacatgctgatgtgggagaattccttgaatgtcggagacagagaatgcagtgagccgacatcgcgccatt

SEQ ID NO: 495878 - DNA, 205 bp, Homo sapiens
cgtgtactgaataccgagctatagcatgatctgtattgggcaatcccgaggagagctgtattaggcctcacgagtgaaaggtgccttttctatcaatttaagaactttacagaaaggagccgcatgcattttggaagagacttcacttgtctcttgaggccattctttcagactcgtagaagtccactctcaggagatccttgga

SEQ ID NO: 495879 - DNA, 553 bp, Homo sapiens
  misc_feature (553)..(553): n is a, c, g, or t
aaaatgctgcctatttctttgctgctcccaagctggctggactttgcataggagcaaactacagatgcatagttgaagagaaaggcctgactgattctaggatagaggtggcaccacgagcacgaaccaccatgctgaagtaactttttgtatttttagtacaaacagggtttcatcatgttggccaggatggcctcgatctcctgaccttgagattcgcccgcctcagcctgccaaagtgctggcattacaggcatgagccaccatgcccggacaataaaggtattttttttaattagcagatcaaattattgttgatgagtcagttagcacacctaaatacttgggtaaaccttcttgaaagggtcctaaaacaactgtcaagtaaaagactactgcaccgaaacgctcataataaacagagaaaaatcctgggaaatattgatcctaaaagcctccttaagaatccccctttggatttgtggaaaatttgccgaaaaaaaaatgtacaaatttttacaatgaaagactggcatacttggccaaaataatn

SEQ ID NO: 495880 - DNA, 170 bp, Homo sapiens
taataaacagagacacaatcggatttggtggcccaggtgggttgggaattctggggcccaagaaatcctctcaccttagcctcccaaaagggcggggataacgggcttgaatcattgacccgggcccacccaatttcctacccagaaaaccgggggggtgtctaacctct

SEQ ID NO: 495881 - DNA, 148 bp, Homo sapiens
gatatgttcagcgtacacttactcagatgtccaccttctgctgcctggtagagtcattgctttggatcctgatgctagtatacacatccagcacttggcaggctccagtgaacactgcaagcccgtggaggcttataactcgctgtgc

SEQ ID NO: 495882 - DNA, 118 bp, Homo sapiens
tacggtcggacgactgatttgcactgtcaggacctgtactggacctcctctgtgcttccagctcctctgtgctcctcctctgtgtgtccagcctctgtgctgtcctcctctgtgctgt

SEQ ID NO: 495883 - DNA, 488 bp, Homo sapiens
agatcctccagacaggactgatccttaattgaggacaccgagatactgtacagtgccatgtatcgtagccgggccaacttggagcgcaagcgctgtcaccgtgcccaggtgcattcggactgagggtaccttgtgcctgtcagaagcacaagactcggatgcacacctgttacaggactctacagagccacggacatatcgggtgccatattcagatgaataggttgtggaggtaccttatagccgtcggacacggatgtcgataggcaccaaggggcttaaagtcaagctctttgatggactgagccgctcagacctgactgccaagctgtgcactcggaatcgctcagctgaggagggagagctggctgatagccagtcgagccatacagtgtgcggggtacagcgattgaaatgctgtatggtcccaggactgtgaaagcccctcacgttaccttccaagccagagtactcaaggtcactgatcg

SEQ ID NO: 495884 - DNA, 175 bp, Homo sapiens
  misc_feature (5)..(5): n is a, c, g, or t
  misc_feature (59)..(59): n is a, c, g, or t
  misc_feature (142)..(142): n is a, c, g, or t
  misc_feature (161)..(161): n is a, c, g, or t
gaagnaaccagtaccagtcatccccagagatagatgaagaccggatccccaacccacanttaagtccactttgcaatgtctccacggcaacgaagaagatgacaaggatcacacccacaatgaaagagctccagatgatggngaacatcacttggcaacancacaggaagggacc

SEQ ID NO: 495885 - DNA, 296 bp, Homo sapiens
agatatgcagagaacccaggaggcgaggctgcagtgaggagagatggtgccaccgcactccagcctggtgacagagtgagactgtctcaaaaaaaaaaaaaaaaaaaaaaaaaattagggggggaaccaaaaaaccaatttttttccaaatgggggggcgggaaaggggttccaccccgggatccccgggggaaattagagggcacttgagattccaaagactagctagatggtaaatgcttggggaaataaaggctagcggcctaaacctttcttctagaagagggggggtcctc

SEQ ID NO: 495886 - DNA, 851 bp, Homo sapiens
  misc_feature (70)..(70): n is a, c, g, or t
  misc_feature (153)..(153): n is a, c, g, or t
  misc_feature (168)..(168): n is a, c, g, or t
  misc_feature (256)..(256): n is a, c, g, or t
gggcttggtcaacactaaatcaacaatatcaccccaataattacttcactgcctccaggtgagactgggnaaagcacaacatcgaagtcctagaggggaatgaacagttcatctatgcggtcaagatcatccgccaccccaaatacaacagcntggactcatggacanagtgacactcctgctgatcaagactctccacaccatgccattcatcaatagcccatagtgtccactcatctctctgcccaccaccccntccagcgtgctggcacatgagtgcctccatctctggactggggcaacactactgagttactggctgccgactaccccagacgagctgcatgtgccttggatgctcctcgtgctgagccaggcgtgagtatgaagcctccctaccctggaaagactaccaacaacgtgcttcgcgtgggtaaccttgagggaggcacggatgccctgccagggtgattctggtggccctaaggtgtggaacacacagaccagagaagtagtccactagggcgacggctggcccacaataacaggtgcgaaatccaaacccccgtctaaacgaatccgtaccgtcccacagacaccataactgacaaacacataaagacgccagatttaggacagtctttataccaatcaaacttaccctagagctcactgcgtaaataggaaatatctgtcctcatacgatcctccacatagagatcgtacccgtggtggttaactcacgccagaagctctacaaattaaaaccgacaccacaccacacaagagacaacccacctaccatcctcaactggtttctatttgccattacaaggacttctcatccgtag

SEQ ID NO: 495887 - DNA, 265 bp, Homo sapiens
tgctccattgatgaaactgatgggtactgacaggcctggcgctctatctatttccaatagctgttgtgaggcagcatctcttgtatacgttcccacgtgcaagactgaaagatggaagatcccaggcatcctaggactttgagaggtaccaggtgggaatgtctgcccctgtttcagagtgcttgttggtgtcctatactttagggatcacgcagaggacacaatttgttctgagctctagggaacgctccaactagcctagcag

SEQ ID NO: 495888 - DNA, 203 bp, Homo sapiens
gagtgagttgccttagtttagggacgaagtcgacaccaatatggatcacaaaccagagggcaggacatactagtggtagcagccatatggaccggaacagattaaaaatacataagcagctttcctaactcattacatgcattaacaatagagtccagtttccattatgcaagataagagttagccaacaattagttaaaatg

SEQ ID NO: 495889 - DNA, 443 bp, Homo sapiens
gggggaaccccttctggtttaagtactgccgattcataagttgttctttgctcaaataaaaaaggttatcctaaaaaaaaaaaaaaaaaaaaaaaaaaaaaaaaaaaaaaaaaaaaaaaaaaaaaaaaaaaaaaaaaaaaaaaaaaaaaaaaaaaaaaaaaaaaaaaaaaaaaaaaaaaaaaaaaaaaaaaaaaaaaaaaaaaaaaaaaaaaaaaaccctgggcccctttggcccaaacatttttaaaattgaaaaaattttatattggggcccaaattaaaccccaattggaaaaatccccctaaaagggggtgaaaaaaaattaaaggggccgtttttaaaaaacgtttgaattggaaaaaccctgggtttcccaaaataaaaccccttaaaaaaaaacccctttttcaaaagtgggattccaggcccccaacttcccctt

SEQ ID NO: 495890 - DNA, 288 bp, Homo sapiens
gctaagcactatgctaggtgcttttcccccaccctgcctcattcaaacctcacaacaattcagtgagatattatcttctctcccttctcctgtgcacccctttctcatttctatatagatgaggaaggtgaggtccagagggttacagtgatttgctctaaaacgagctcaagttggtctgcttacaaagcctgtggtctcttcactgcatggaagatggagatcttgtgtttggagaacagaggtttgtttagctctcctttcagagtaaaaaaagttcttaaattc

SEQ ID NO: 495891 - DNA, 246 bp, Homo sapiens
tgtggcggcgggtagctgagtctcagcgggtggtctggtggcctgctcgcgggaggagatgacttgccatcctgtacctcttccacaatggtacgcacctgacgggtggtcccggttctttcttgtactgagtcacgcatctcgttgaggatgcggctcaggtccacgcctgtggcagcgtccatctccacattgatctcaccacccatctgggctcgcagggggttcaatctcctcctcggctcg

SEQ ID NO: 495892 - DNA, 315 bp, Homo sapiens
aggaacaaagtaccttttctacatgaaaaatacatactcttttcagagggagggtgtacgacttaaactagaaaacaccttgatattaatcattcttctcatatacttcaaattagtactcaatgcctttctactcctggacatcagagagaacacctggttgttctggcagacgtttatatttctccacatcaatttctggaaaaaacgcgacactttcaaagtcttgcgtgatccttgccacaaatagcttaagatgacctgcgtcattcatgacttccatatgaacagaactgccaccaactatccagacca

SEQ ID NO: 495893 - DNA, 104 bp, Homo sapiens
atcgggaatacaacttaagctgcaatattatatatatatatgaaatatatatataaatatataaatatatacagtatatatataagtatgcatctcactatcct

SEQ ID NO: 495894 - DNA, 165 bp, Homo sapiens
tcgtccagcatcaacaaacaactatagaatggcgtctaaaaggagtccgtagccgagagctatggagtgtgtggaatttgagtcagactcttaccctactctaagggcctcacagactaggagaaactcttaacaatctgtgtaaatagctagaagagatacaaa

SEQ ID NO: 495895 - DNA, 437 bp, Homo sapiens
  misc_feature (379)..(379): n is a, c, g, or t
ccactctagagtatccccacgttgacacttcagacaatggaatattatttagcaataaaaaggaatgagctatcaacccttgaaaagtcatagaggcaccttcaatgcacattgctcggtgaaagaagcccatttgcaaaggctacatagcgtatgattccaacaatatgacactctgggaaaggcaaaaccatggagatggtaaaaggatcagtggttgctggggttgaagagagggatgaataggaagagcacagggtattttagggcagtggaagcactctgtatgatactgtgatggggacacatgtcttctttttttgtgttgagacagaatctcactctgttgcccaggctggagtgcagtggcgcgatcttngctcactgcaacctccgccttccaggttcaagtaactctccttgcaactggtacaacc

SEQ ID NO: 495896 - DNA, 248 bp, Homo sapiens
tgggcggggataaatttttcaaaacagggttcccccagggggatggttcccccatcggttttggccagtgggtggaaaaaaggccccccgttttccccccctcaaaaaattttttttgtttttttggaaaaaaaggggtcaagcccccctttcacccctgggatgggggtccccccccgggggggggggtgggtccccccttcagtgaaaaaaaaaccccttttgttttggggcccgcccccccccca

SEQ ID NO: 495897 - DNA, 381 bp, Homo sapiens
atccaaatccccttcccgggcccgccacccgtgacgcacaaaggggcgcgacggggtttgaatgacgttacttgacgctgcggcccacgcccggggtagttttcacagactgacaggcgacgtgtagcccccatgttgagtttgggcaaaacccaaaaaaatacgcctttcccatgggccccattggatatggacatgcccggcggaaatgctgctttcctgctaccatgttttgtgtgggcaaaccgagtttgggaccctcggggccctggggtagcccctaaagcccgctgggtcaggggccgccctttcccctgggggtttccgccggaggaaaggcggttaatttatttttgaaaaaacaaaacctaaccggcggga

SEQ ID NO: 495898 - DNA, 743 bp, Homo sapiens
ctattgtatttttcccttatgaatttgactagatacctcatataagtggaatcatacagtatttgcctttttgtggctggcttattccacttggcctgtcatcaaaattcatccatattgtagcatgtgaaaggattttcttccattttaaagctgaataatattccattgcatgtgtgatatggtttggctgtgtccccacccaaatctcaatttgaattgtatctcccagaattcccacgttttgggagggacccaggggaggtaattgaataatgggggccggtctgtcccatgctattcttgtgatagtgaataagtctcatgagagctaatgggcttattaggggtttctgcttttgcttcttcctcatttttctcttgccaccaccatgtaagaagtaccttttgccccctgccatgattctgaggcctccctagccatgtggaactgtaagtccaattaaacctctttttgttcccagtttcgggtatgtccttatcagcagcgtgaaaatggactaatacagtaaattggtaccagtagagtgaggcgatgctgaaaggatacccaaaaatgtgcaggcaactttggaactgggtaacaggtagagggtggaacagtttggagggtaagaagaagacaggaaagtgtgagaaagtttggaattcctagagactcgttgaatgactttgacaaaaatactgataatgatatggatggggaaaatcaggtgacgttg

SEQ ID NO: 495899 - DNA, 363 bp, Homo sapiens
  misc_feature (85)..(85): n is a, c, g, or t
  misc_feature (135)..(135): n is a, c, g, or t
catgaagcagttttgttctgtaaatcctacctttggatctgagaaccaaatataggttgagatacctggcctaccagtaaccttnagtctagactatggaatttcccttctagaaacttaccctgcagttaaatntgcgcaagaacatgtatgagaaacagaatgcagggtataatgtacgtcatctgctggggactggttaaatatgggaaggctttaagaatgaggttgggtacaggggctcacgcctgtaatcccagcactttggaggctaggctgagttgggagaattgcttgagcccaggagacggaggttgcagtgagcagggatcacagtgagccaagatcgtgccactgcactcc

SEQ ID NO: 495900 - DNA, 153 bp, Homo sapiens
  misc_feature (60)..(60): n is a, c, g, or t
actcaaaaatacatcggaatgtcatcagtgctgccaaggaaaattgctgaaggcaggatnccaggatggacaagcttggccgcaccatttgcagaccattgtccccgactcggcttgcaagcaggacacccgtctggcctaacccctgcaacg

SEQ ID NO: 495901 - DNA, 248 bp, Homo sapiens
gactttcagtgagtcccttctccagatatgtcatatgagtgctgggtttgaataacttgatgtaggcagaaaattttggcaaatcatgtccagccacagctgtgtatggactcacgggttcagcagctgccagcattggggtacctagggaggggcacagcacttgcctccatgaaattcctacaatctatgtatggagtactagtgtgcactatcagttgcccatacaatgcatgtgaatgggaagc

SEQ ID NO: 495902 - DNA, 100 bp, Homo sapiens
tcttgtgcgagcaggtagggctggaccccggaggacccggaaagatcgttctcaatcaccatcttctgcagcccagctgagatgctgctgctgccagagc

SEQ ID NO: 495903 - DNA, 241 bp, Homo sapiens
aaaaaattttgggcccccccccccccccccccgcaagggttggggaaaaaggtgtttcccttcccacccggggcccaaagacaggcctttcctggttaaaaccctttcggccccccctttcttttttggggggggaaatgggttggcctggcccccccccgggcctgggaattttccgggccccaattttaaaacccctttgggtagggtttttggccccgggaaaaggttttttccggga

SEQ ID NO: 495904 - DNA, 512 bp, Homo sapiens
tagcaacaagaactctcgttcctaccctcgaaacgccttaatccccgaaccccgcccccgaccgtacccgagacctgcgaccaggccctgccgaccaatgccaaagtaaacttctggagaccgccgccattccgccaaagcccacagtcccgccgaacaccaggacatataagggagagaagtagtaccgcggcgaccgggtccactccctatatactcttctcagagacgtgcgagaggtccgtcaccttcgaagtcgaacggttatcactcactatctagccgcgtgtcccgaactatacccaagaagtcgtcgcctctagcattcgtaattgcactgagacccacgcacttgtctccctctgccattgtggcgctaaagaagctatcgaacggacgctcaaggcccctcctttccctttccccactctacctatcctagcgccataactggcggtaaacgaccatacgacaaaacgtcaccctcccgttagagaagcgggaccttagcc

SEQ ID NO: 495905 - DNA, 171 bp, Homo sapiens
  misc_feature (30)..(30): n is a, c, g, or t
aaaaaaaaattttggggttttacccaaaanttccattttggggggggttaccgggttttccaaaggtcccccaattgtggggccgctccccttaaacctttttggggttttttttttaaaaaaaaatttaaaacccgttggggtttataaaaatgtccatgtggaacttga

SEQ ID NO: 495906 - DNA, 282 bp, Homo sapiens
gactctaaggatcccgtctgttctgcaccattttttgactctgttctgctggggaagcacagtgatcatgacatggcctgagcaatgcttcccaggagccgctttcttgggtcacagaaatggggatgggccggtagcccgaacaaggccataagaccgaggagtaggagaaggcaacttccattggttgtcttccgttcttgtggcaaataagggcttgcccaggtcagggcttattctaacaatttctttcctgttgactccccattgccgtttgaggga

SEQ ID NO: 495907 - DNA, 786 bp, Homo sapiens
  misc_feature (185)..(185): n is a, c, g, or t
  misc_feature (188)..(188): n is a, c, g, or t
  misc_feature (192)..(192): n is a, c, g, or t
  misc_feature (388)..(388): n is a, c, g, or t
  misc_feature (457)..(457): n is a, c, g, or t
  misc_feature (464)..(464): n is a, c, g, or t
  misc_feature (475)..(475): n is a, c, g, or t
  misc_feature (477)..(477): n is a, c, g, or t
  misc_feature (485)..(485): n is a, c, g, or t
  misc_feature (500)..(500): n is a, c, g, or t
  misc_feature (503)..(504): n is a, c, g, or t
  misc_feature (506)..(507): n is a, c, g, or t
  misc_feature (518)..(518): n is a, c, g, or t
  misc_feature (520)..(520): n is a, c, g, or t
  misc_feature (547)..(547): n is a, c, g, or t
agttaagctcgtgtaacggcggcggtgtcggcagctgctgtagcgaagagagtttggcgcgatgtctcacaccattttgctggtacagcctaccaagaggccagaaggcagaacttatgctgactacgaatctgtgaatgaatgcatggaaggtgtttgtaaaatgtatgaagaacatctgaaangantgantcccacagtccctctatcacatatgcatcagtcagttgtttgatttcatcgatgatctggcagacctcagctgcctggtttaccgagctgatacccagacataccagccttataacaaagactggattaaagagaagatctacgtgctccttcgtcggcaggcccaacaggctgggaaataattgtgttggaagcnctgggggggttggggtgggcttggacacaggtgttacagcgtgctgtagtggaagttttgtatcatagnatcctgnttccactttgntntactctanccaagattgactgtnttnnannaaatgtgaggntnttggtcaatcggaaacccccgtacacncctttttgtttctctttctttcgtttttactaaacatttttatgaagaatatatgggagttgtccttccacactaatagtgggtccaagcttaactggtcatatttctttttacattcacaataaccctcttcaaatgggggggggggggaaaaaagtttagcctttctcagataaattttggggaaaaaataaaagcccttaattatgaaaacttaaagggttaaaaaattacacgaa

SEQ ID NO: 495908 - DNA, 405 bp, Homo sapiens
agttgattgcactttgtcacaggcgccctaatgcaccaaccatgtatcctttacctcctgctccagatactcacgttgacatctacggagcctttcttttaaaactttgcttcacacacaggagcctttgtgattacgtaaaatcaacttctttctactagttactggatcaacttccaagatctttatactgtgtgacaacatacgtacggccgcgtattgttactttgtccttgggactcacctttggagtttcgggttccaacacgtctagcactcacgactataatgtcgacggtgttaaccccctttacggtacgcacttacctagccctttaaagatttgtagcacacatgaactaaattactgctctccgtaggccattcacttctccacgggtatac

SEQ ID NO: 495909 - DNA, 656 bp, Homo sapiens
  misc_feature (336)..(336): n is a, c, g, or t
  misc_feature (405)..(405): n is a, c, g, or t
  misc_feature (412)..(412): n is a, c, g, or t
  misc_feature (423)..(423): n is a, c, g, or t
  misc_feature (425)..(425): n is a, c, g, or t
  misc_feature (433)..(433): n is a, c, g, or t
  misc_feature (448)..(448): n is a, c, g, or t
  misc_feature (451)..(452): n is a, c, g, or t
  misc_feature (454)..(455): n is a, c, g, or t
  misc_feature (466)..(466): n is a, c, g, or t
  misc_feature (468)..(468): n is a, c, g, or t
  misc_feature (490)..(490): n is a, c, g, or t
agttaagctcgtgtaacggcggcggtgtcggcagctgctgtagcgaagagagtttggcgcgatgtctcacaccattttgctggtacagcctaccaagaggccagaaggcagaacttatgctgactacgaatctgtgaatgaatgcatggaaggtgtttgtaaaatgtatgaagaacatctggatttcatcgatgatctggcagacctcagctgcctggtttaccgagctgatacccagacataccagccttataacaaagactggattaaagagaagatctacgtgctccttcgtcggcaggcccaacaggctgggaaataattgtgttggaagcnctgggggggttggggtgggcttggacacaggtgttacagcgtgctgtagtggaagttttgtatcatagnatcctgnttccactttgntntactctanccaagattgactgtnttnnannaaatgtgaggntnttggtcaatcggaaacccccgntccctgcattgttcatttccctctttttttttgtacttaaacgagtgtatgatgatttaaatgcaagttggtgctcacgaatataaagttgcttttattaaagggcggaggcttaatacgcctgtatcttatttccttcttgttcacttttctcaataaatttata

SEQ ID NO: 495910 - DNA, 223 bp, Homo sapiens
tgcgataatcatgtggtttatagtcatttgttatgtttacacagatagattacggttattggtttgcatatgttgaaccagccttgacatcccaggtatgaagctggcttgatcatggtggataagctttttgatctgctgcaggacttcacgtttcccagtattttattgaggactttctgcgtcaagatatagataggggctcctctacgagtcgaccctg

SEQ ID NO: 495911 - DNA, 100 bp, Homo sapiens
  misc_feature (1)..(1): n is a, c, g, or t
nggaaggaaggaaggaaggaaggaacgaaggaaggaaggaaggaagggaaagggaagggaaggaaggaaagagaggaagacgacgaggaggaggaagatg

SEQ ID NO: 495912 - DNA, 134 bp, Homo sapiens
gactaaatgctgggggcagccaggccctgctctgcctcgtgcttctaaagacaacacagaacttccagcccgctcgtgccccaagccaatcgtcttacgtttcaggctcaacttaggtaaaattctagcctgcc

SEQ ID NO: 495913 - DNA, 160 bp, Homo sapiens
  misc_feature (32)..(32): n is a, c, g, or t
ttacacacccatcggtgaggcaggagtcaggncgatgatgacacaggggggacctgatactgccagattcaggataagtttcagagtgtgaatggccaagacgtggggatcagttggatttgctgcggctcggcagcgacccctgtcgggctagtcgggg

SEQ ID NO: 495914 - DNA, 879 bp, Homo sapiens
tactcggcgcattatctatgctccatgtgcatctggtgtcccttttaatatatgttctggcggccattcctggtgccttccgggactctgtcacgccctgttaatggctgcctgtttcagccggggcctcctgtggtgagccaagccctttgccactataccgggccctaccacgcccctggcggttctcgccatggtttttttccgccctctcgaacccggggtaccataatccggtccgggatcgccccgcgcccccgtgtgtgtttcccgcgccccagcagggaccccgatgttttttagagtggtccctgacgctgccgaggtgccttgcccttttgttaccccccgcgtccctggattggtccgcccggggaaaattggcccctactcccaaaaaacactggggccgcaaaacatttctcgtcgacattcgtgaactcttctcggggcaccccaagaccctacaaagggtcgttttttacacggtgcacgaatgagggaaaactcttggggctgttctcttttttaatcggtcacaacccaagcacgggcccaagggcccactgggaggaagtttttcgaaagctctcgacgtcttgcgcaatttcccacatgcacgaagtcgggtaccaccccaggtgggagaaaaggagtaaagtgtgagcgacccggaggagaaccacccccgcagggagaggaaaggaacacaacgaagagagagggggaatcctaacacggagacaccacccccctggatacaaaggaagcaacagaaaacattgggggccacatccctgccccccccaccccacaagggcccccgttttccccccccgcccccaaaaaattttttgtttgggagccaccccaaaaaaa

SEQ ID NO: 495915 - DNA, 910 bp, Homo sapiens
  misc_feature (27)..(27): n is a, c, g, or t
  misc_feature (62)..(62): n is a, c, g, or t
  misc_feature (104)..(104): n is a, c, g, or t
  misc_feature (122)..(122): n is a, c, g, or t
  misc_feature (128)..(128): n is a, c, g, or t
  misc_feature (151)..(151): n is a, c, g, or t
  misc_feature (153)..(153): n is a, c, g, or t
  misc_feature (159)..(160): n is a, c, g, or t
  misc_feature (182)..(182): n is a, c, g, or t
  misc_feature (186)..(186): n is a, c, g, or t
  misc_feature (192)..(192): n is a, c, g, or t
  misc_feature (200)..(200): n is a, c, g, or t
  misc_feature (212)..(212): n is a, c, g, or t
  misc_feature (221)..(221): n is a, c, g, or t
  misc_feature (230)..(230): n is a, c, g, or t
  misc_feature (245)..(245): n is a, c, g, or t
  misc_feature (251)..(251): n is a, c, g, or t
  misc_feature (255)..(255): n is a, c, g, or t
  misc_feature (264)..(264): n is a, c, g, or t
  misc_feature (270)..(270): n is a, c, g, or t
  misc_feature (280)..(281): n is a, c, g, or t
  misc_feature (283)..(284): n is a, c, g, or t
  misc_feature (293)..(293): n is a, c, g, or t
  misc_feature (295)..(295): n is a, c, g, or t
  misc_feature (307)..(308): n is a, c, g, or t
  misc_feature (311)..(311): n is a, c, g, or t
  misc_feature (313)..(314): n is a, c, g, or t
  misc_feature (317)..(317): n is a, c, g, or t
  misc_feature (320)..(320): n is a, c, g, or t
  misc_feature (329)..(329): n is a, c, g, or t
  misc_feature (331)..(331): n is a, c, g, or t
  misc_feature (335)..(335): n is a, c, g, or t
  misc_feature (341)..(341): n is a, c, g, or t
  misc_feature (344)..(344): n is a, c, g, or t
  misc_feature (346)..(346): n is a, c, g, or t
  misc_feature (355)..(355): n is a, c, g, or t
  misc_feature (357)..(357): n is a, c, g, or t
  misc_feature (365)..(365): n is a, c, g, or t
  misc_feature (385)..(385): n is a, c, g, or t
  misc_feature (390)..(390): n is a, c, g, or t
  misc_feature (394)..(394): n is a, c, g, or t
  misc_feature (396)..(396): n is a, c, g, or t
  misc_feature (398)..(398): n is a, c, g, or t
  misc_feature (407)..(407): n is a, c, g, or t
  misc_feature (416)..(416): n is a, c, g, or t
  misc_feature (419)..(419): n is a, c, g, or t
  misc_feature (421)..(422): n is a, c, g, or t
  misc_feature (428)..(428): n is a, c, g, or t
  misc_feature (438)..(438): n is a, c, g, or t
  misc_feature (449)..(449): n is a, c, g, or t
  misc_feature (452)..(452): n is a, c, g, or t
  misc_feature (455)..(455): n is a, c, g, or t
  misc_feature (466)..(467): n is a, c, g, or t
  misc_feature (511)..(511): n is a, c, g, or t
  misc_feature (516)..(516): n is a, c, g, or t
  misc_feature (518)..(518): n is a, c, g, or t
  misc_feature (538)..(539): n is a, c, g, or t
  misc_feature (541)..(541): n is a, c, g, or t
  misc_feature (547)..(547): n is a, c, g, or t
  misc_feature (550)..(550): n is a, c, g, or t
  misc_feature (558)..(558): n is a, c, g, or t
  misc_feature (565)..(565): n is a, c, g, or t
  misc_feature (592)..(592): n is a, c, g, or t
  misc_feature (611)..(611): n is a, c, g, or t
  misc_feature (614)..(614): n is a, c, g, or t
  misc_feature (643)..(643): n is a, c, g, or t
  misc_feature (679)..(679): n is a, c, g, or t
  misc_feature (723)..(723): n is a, c, g, or t
  misc_feature (830)..(830): n is a, c, g, or t
  misc_feature (896)..(896): n is a, c, g, or t
atgaacaaaaaagaaggaaggatcggnccggaattccgggatgtgaaaacaacaccaaaaanacaaaaattggaaaggaaaagaatcaaattaaaattgtcgtnattggaaacgtagattcnggcaantacaaaaatactggcaatctgancnataaanncggtggtatcgacaaaagaacnattnaaaaanttgagaangaggatgctganatgggaaanggctccttnaagtatgcatgggtnttgganaaantgaaagctnagcgtnaacgtggtannannattgaaatntncttgtggaaatnnganannagnaantactatgtnantatnattgangcncnaggaaaaananactttatnaaaaaaatgattataggganatctnaggntnantgtgctgtnctgattgtngcngnnggtgtnggtgaatttnaagctggtatntcnaanaatgggcaganncgagagcatgcacttctggcttacacactgggtgtgaaacaacnaattntnggtgttaacaaaatggattnnantgagcnacnctacagcnagaaganatatgaggaaattgttaaggaagtaancacttacattaagaaaatnggntacaaccccgatacagtagcatttgtgcnaatatctggttggaatggtgacaacatgctggagcnaagtgctaacatgccttggttcaagggatggaaagtcacccgtnaggatggcaatgccagtggaaccacgctgcttgaggctctggactgcatcctaccaccaactcgtccaactgacaagcccttgcgcctgcctctccaggatgtctanaaaattggtggtattggtactgttcctgttggccgagtggagactggtgttctcaaacccggtatngtggtcacctttgc

SEQ ID NO: 495916 - DNA, 172 bp, Homo sapiens
cggggaacccgaggattaaaaaatatctaagagatgtctcaaaccagttacatactgaccttattcggatcctgattaaaacaactacggtaggtattatttaataaaacagacatttatgacaccgggggaaatgcttcctatccaaattaagaagggtttttaaggggaa

SEQ ID NO: 495917 - DNA, 343 bp, Homo sapiens
  misc_feature (93)..(93): n is a, c, g, or t
  misc_feature (173)..(173): n is a, c, g, or t
  misc_feature (194)..(194): n is a, c, g, or t
  misc_feature (252)..(252): n is a, c, g, or t
  misc_feature (328)..(328): n is a, c, g, or t
gcactgcgcgaatcccacgatcaggttgcggatgtcgtcgaccgagccgcgctgattttcctgggcgcgaacgagcacgtcgatcttgcggtngcggaagctgtagcgcgtcgccaccgaacccttgaccttgttgacgacctggtcggccacctgcttcgtggtcaggccgnagccggcggcgcgatcctgancgaaacggatctggatttccggataaccgccctcgacggtcgacttcacgtcggcaanaaccgacgaagcgttcatcaggctcgtcagcttcttgccggccttttcgagcgacgcgagatcgtagccgcgcaantcgatctcgagcggc

SEQ ID NO: 495918 - DNA, 309 bp, Homo sapiens
gggggcattttgaagaaaaccccccctggaataaacccaggttaaaagaaaaaaaaggggaattaaggtttccccctttttgggccgaatttgaaatcaaggtttttgaaaccggtgaccccaaggtttttttttttttttttttttttttttttttttttttttttttttttttttttttttttttttttttttttttttttttaataaagaaccaattttttttttacttaatatagattcatataaaaagaacacacacacacaaacacaaacgtgtcttaatatactctctatagagtctagttc

SEQ ID NO: 495919 - DNA, 176 bp, Homo sapiens
agcgtgcctcaggtgtaaaaaaaagcaacataagcgaagagtggagtcggaggttaaaagtctctggataacttttccaagcgggtggaatgggagctagggtgaggaaagggtgctttgtctcagaaccagtcctttagcttcctgacctctgtgctggactgagcaggcctcct

SEQ ID NO: 495920 - DNA, 259 bp, Homo sapiens
ttgcatttctggacgactgttcaacaccaatgccaggattctggccaccctgaccgctgcctgttgcccacgcactgcccggaagccatgatctgcgtcatgactggtccggatctctttctaccatccccatcacagcataagtttgcaggaatcatggagtgtacaagcccgacaataatcttcggcgtgactatcctgaaccttgtgcgagccaacacctttgttgcagagctgaagggtttggatccagctcgag

SEQ ID NO: 495921 - DNA, 208 bp, Homo sapiens
gacccacgctcggggcctactcctgctggctgtcaggcggcgtgggaggccagcactgggcctgcctgggctataaccatttatagcactcctgagagcctggactgcctcctacttgggcccggaagctagtccctccccctaagaccccgcgcctctgacggggcttggacccacgtcctgcgctggacactccttcttggcttcc

SEQ ID NO: 495922 - DNA, 150 bp, Homo sapiens
  misc_feature (142)..(143): n is a, c, g, or t
taaattcccggcccgtcgacggggggagaaggctcccctctctccctccctcccactccttttctacggcgatttgtctgtgtctctccccccctccctccccaccccccattgttgtctggatgtctctctattttttatnngtctcct

SEQ ID NO: 495923 - DNA, 211 bp, Homo sapiens
gaggagaaagagggagagagggaggagggacggaggaaaaaagaaaagaaaagaggaaggaagggaggaaggggtttctccctcgaccacagggaccccagaagaccccgcttctgccttgtccgcacacccgggcctgtcacccttgcttttccttgcctcttactttgacttgtggattgtgctgtaagactacacaggaattgcatcg

SEQ ID NO: 495924 - DNA, 90 bp, Homo sapiens
tgctctcttctccccactgtgcccgtccgcggaccggggacccttccccgtgccctaccccctcccatttagctgctgtctgtgacatta

SEQ ID NO: 495925 - DNA, 245 bp, Homo sapiens
  misc_feature (37)..(37): n is a, c, g, or t
  misc_feature (77)..(77): n is a, c, g, or t
  misc_feature (103)..(103): n is a, c, g, or t
  misc_feature (106)..(106): n is a, c, g, or t
  misc_feature (112)..(112): n is a, c, g, or t
  misc_feature (121)..(121): n is a, c, g, or t
  misc_feature (133)..(133): n is a, c, g, or t
  misc_feature (165)..(165): n is a, c, g, or t
  misc_feature (203)..(203): n is a, c, g, or t
atggggcttgaagtaaaacagcccatcctctgcaagnccatttatgttgtttttaggcattctatctttgcccaaantgttgaaggatggggatttgtttcanggnttttgnatttgagtntaaagcccgttntaacatgataaaggcaatgcattattgggganccccggttttttggaaaagttgatattttaggaattgnatttcagattttaaataaaatttgtttttaaatttcaaagca

SEQ ID NO: 495926 - DNA, 311 bp, Homo sapiens
ctacatgaacaaaagtcattaaaatgcacagtgaggtaacataattattcatatatagctttcttaaggctgagtactgtagtttcgtttattgtataaaggctcagttggtacttagcataatacatctcaagacatccccccttaagtgacccccttccaacagcttaggaaatcggcaaatttcccaggtacatacaatatcatgcatttgaatcccccaaagactgaggagggagcaccctgagcttgcatgcagtcccctcatattgcacaaagtaaaatacaatgtctggagcccccatggtaga

SEQ ID NO: 495927 - DNA, 342 bp, Homo sapiens
tcaacgctttatacttctactagtgtgttcactcccatcatgcatagtcggtgtcgggtccgacccagcagacatccgagtcatcctcctccggcatcaggagaatccacagtgtgcactttctgtcagccagtgggcaacagacaaagtctatccctcagaactggtcaattccgcagggcagcaacatgccgtagtcttgcaagttggtactcttctcacggcatgtctcttaggcgacggcgtgccagtgaagatgcagttcgcatacattcatcctctccgggtgtaagaatcggcacttgtcaggaacgagaagggcatcatttacaaattcaccaa

SEQ ID NO: 495928 - DNA, 353 bp, Homo sapiens
  misc_feature (31)..(31): n is a, c, g, or t
  misc_feature (163)..(163): n is a, c, g, or t
cattagaggaggattcttttagtcagtcttncccctagtgttactgccagtacatgaagtactggttgtctaagaaccaagttgtgctcaggaataaagtgttactagtgaagttccctctggaaaaaattagtgggtttcagatcatgcctaataggagagnaaaactattactgcatttggatgtttggtaattctactctgatcttttttctttaaggtaaatgcataggaccaatgatgtatggtacaaaattactcacagatgttggaaagaatttccttagcatttattcctgccatttgggacacacatgcctctgtatagtcatttgtttgaaaatttgctcttt

SEQ ID NO: 495929 - DNA, 456 bp, Homo sapiens
  misc_feature (218)..(218): n is a, c, g, or t
  misc_feature (220)..(220): n is a, c, g, or t
  misc_feature (227)..(227): n is a, c, g, or t
  misc_feature (235)..(236): n is a, c, g, or t
  misc_feature (339)..(339): n is a, c, g, or t
atgtcacacgacagtcagtgtaacacgcactgccaatgtaactcgagcgtccaatgttaaaggcacggcaatgtaacacgcacttcagtgtctaccacgactggctgtgtacaatgtcacgctctgttgagaagggtggctcctgttaaacgattccgtgttctactgaagcgagcaatatggccagcatttgcggaagtcgagtagacagctcatantnacatcgnacagtttnnggatactactgaaacaccgtatttaatgaagagcatagactgcatccgagccttccgggaagaagccattaagttttcagaagagcagcgctttaacaacttnctgaagcccttcaaggagaaagtggaaattaaacaattaaatcatttctgggaaattgttgttccaggatggaattacctttgatcaccaaaggaggaggcctttggagttctttca

SEQ ID NO: 495930 - DNA, 865 bp, Homo sapiens
  misc_feature (865)..(865): n is a, c, g, or t
tgatgtggtacaggggcagtcagtggagggcgagtggtttcggaaaaaaaaaaagaaaaaaagaaaaaaaaaaaaaaaaagagtttttttttcttccttttgtaaatctgggaaactgggtgaaggggtgctgggcattattttttcccacaggtgggggggggggggtaaaatatattaggcgatgtgtgtttactcctgtggtctatattctgttttaagaagaaattttcggtggtatataaacgaactgtgtgtgtgagcccaagtttttttttagaaaatataagcgtgggtagaggcgaatacacttctttaaaaaagagcgacgagaaaaaagagagggggcgggcataagtgtgtgtggggaatctctcttaacacaaagcgaaaaaatatttatcaccaccgagagaccttttgtttctacaaatctctttttaaactcttcttttaaagaggggagtatttcaacagaagagggcaaacatcctcaaaacaatactggtgtgaggtgcgtgggggggaaacattttttgatacaaagaaaaacaaacaaatatttcttcaaggggggggaccacaaataaattttggttttgttctctcctacagagggtggggtgatgtaggaggcgtagtatatagtattgctcccctttttaataataggaagagggtgtggtgtacaacaactagttgaggcaagcaaaagaagaacaacctgttgtggttgtttatattatattctctccctccttttttttccaaccaacccgagggaagaagatggttgctctcccacaatatcttcccctcttgcggagtttattattgtgcgtccattttttttttttcaccgctn

SEQ ID NO: 495931 - DNA, 305 bp, Homo sapiens
  misc_feature (67)..(67): n is a, c, g, or t
  misc_feature (69)..(69): n is a, c, g, or t
  misc_feature (76)..(76): n is a, c, g, or t
  misc_feature (84)..(85): n is a, c, g, or t
  misc_feature (188)..(188): n is a, c, g, or t
catgtcccacaagatccgccagagtagacccagtagccccgcagccttgagtacgtaccgctcatantnacatcgnacagtttnnggatactactgaaacaccgtatttaatgaagagcatagactgcatccgagccttccgggaagaagccattaagttttcagaagagcagcgctttaacaacttnctgaagcccttcaaggagaaagtggaaattaaacaattaaatcatttctgggaaattgttgttccaggatggaattacctttgatcaccaaaggaggaggcctttggagttctttca

SEQ ID NO: 495932 - DNA, 1570 bp, Homo sapiens
gatagctcatgatctgcctgccatatgggagataccaatacgatgtcgtggcaattaccagcgagatagaacctgataagacgactctatggacatcttggagatacttctaaattgcaagtctgtccaggagcccttttctaccatgtgtgcatttagcggtactaacaaatgggtactggcgaattgggggcctggtcgactcatggatggcgtaaccgtacaaccctcatatggtcttgggcatcgcggtacagtggccgtagtccacatctggtgtgatactgaagcagagggactacttgtctacttgccggagtggtagcaagatgcttccaatgaatgtccaggggggttcggcgattacgctgttcgggtggggttcttctcctatacaatctcaagtaagaactaaactctgttcgatgcctattataggcaagaaatatttcctagtcaagctaactgacgacaagtaggtttgccaatagatatgtcacatatcaataagttgggctgttccgtaaacctctctatttacgggtgtggatacgtagtcccgaacttaattgtcaagtgcatcagcatgtcacgaagctaaagtgcgagggtttgcgaacgatacctacgcgataccattccctcattggtgtggccaggaatgttcttgtggccgtcaggctttggacactatgtgagtaatttggcttagcttagattaacggtatggaatggcaaaaaggatgacaggagtgtaacataatggctgaatggccaagcctatcacaccgtgattgatctcgagaggagaaatacttttagttaacgccccaattcattggaccggcactaagttttcctataaagttcatccacatagtcattcctctaattaagcccgatcatgcacttccttttacacaacatttatcaggaaggctacaattttaagccttgactttttattgaacccaactgcctattggacggtggagtcaccaaggcttatttcttccaacatatcttggtacccaggtactaggcaattcactcgaagtcgcaatcttgtttatatacatgcgtaacacgtcaagagaggtgcaaaggacacaggtttaaagggaaaaaacgcgtataggatgtcgctcaaagattaagaatatgctaatggagtcttacaggagctgggcggaccatcgtagggtcttgtcaacaggcaggtatgtattaccttatacatcggcaacgtgtcagagaacaataatcgcgcgcgaagagaggaaagaaacatagaaggaaaacaagtcggctgtccaggaagtccccccaatggcccagacaaagggacagcgtcaccggaacacgtggacgcacaaggtcgccggcgctgaggaccatacggatcccccgcacggacggaggcacagaagagcctcagtaggcgtgaaggagaccacaggataacacaacgacgggagcacgacacatcaaaggggcgacagagacacaatagtggtgcagcacctagcggcacgcagccacagatgacgagggacagctagagaacaag

SEQ ID NO: 495933 - DNA, 404 bp, Homo sapiens
ccctatttctatgatgcttccccgggcatctacgaggcatggatgtgggtgggaaaaagacaactggaatttactcgaacggtggctgggtccgcacggttgaggattctacgtggttctcttgtgttcccctgtgtgagtgtgtgtgtcaagaaggccgcggctcattagatcaccttcttgagctcgtcgtacaggagcagcactgaaggcgccccccatgcgccgaaggatgttggaccacgcacccttgaaagaaggccttgcccccctcatctctgaagatcttcctccaaacagtcgatggtgcccgtgtacatggatgtcaaggcctcctttgcgcccgggactggatcatcatgcgccgccgcaccgtgttgacacggggtaggacaccacgccgg

SEQ ID NO: 495934 - DNA, 476 bp, Homo sapiens
  misc_feature (81)..(81): n is a, c, g, or t
atttactcccctgacactattattgggggggtccccttttttcccttttccaaaagggggggcctccccctttgtggggangagaattttaaccgaaaggtttgggaggccctaaaacccccccgggcaggttttttggtgggggaaaacacccgggtcaattgcctgggggggatttacaatggcatggttttgggcacagggttttgggaaagtttccccaaattttggaacaaacccccggggcgtgtggggcccatggggatgggaagccccttcccttttgggggggtttccccgggaggaaattcctatcccccgggtttaaggggggccccccccccccccccccaaaattttaaaaggggaagattttttttccttccctttttgttgaaaccaagggcccaattccccttgaaaaaaaaattttttgggggtaaaataaaaaaaattgggctttccttccgggggca

SEQ ID NO: 495935 - DNA, 155 bp, Homo sapiens
  misc_feature (67)..(67): n is a, c, g, or t
  misc_feature (107)..(107): n is a, c, g, or t
  misc_feature (137)..(137): n is a, c, g, or t
  misc_feature (141)..(141): n is a, c, g, or t
gtaaattatcccatagtgaaataatggaacattgtgtcaccgttaaaacggtgggtgacattttggnaggccaaggcgggtggttcacctgaggtcaggagctcganaccagcctgggcaacatggtgaaccccgtntctnctgaaaatacaaaa

SEQ ID NO: 495936 - DNA, 151 bp, Homo sapiens
aagctctctctgttgggggactaggcaacagctcaacccaggagtctggcaggatgggagtgaggaatgccatggatgatcagacggataatgtgctagtgatccagcctcatgaggaagacggatttttctgtgaagatgtacatgtgtg

SEQ ID NO: 495937 - DNA, 896 bp, Homo sapiens
ttgcaaaacagggctaggtactatgcctcgtataagtacggacgaggaatagcgtaatatatacaaagaaagttctaccgctacccagacatagggtaccctacgtgctaacctagcctacggaagcgcagcagcaggcatacgctggtgaaggtagaagagctataccctaaaggatagacccataccaagccggtaccacctacacagcctatacctagggataacaaggctaggccatagactacacatacgtagcgggaagtacgacagtgccgtgataccaaggtagaacaaaaagggaggtaggtagagaggctagtagaccatatgtaaagagacaccacccataggtaggtttgtagggcatatgtgggtgctaactgtaggaaacccctacgaggcctaccgagacctatacaagactagtactatttgctagagcacatacagttgatagacatagcacagagagcgtaatactaataaaggaatattgtgcataaaatactaacagaatgatagggcctttacccaaagttaactagcaaagcacaatagcggcagggatagaaggcgatagtgccaacggaacagcagcttaggcacgcaagggcacttatcgagccacagccatagcaaggaagcgtaactaggccctaatgttaacatacccgttagtacaactatagccacaactacgccagaatagcggcctaagctattaccctacttaagcgcccaggcaagggaaacagggctccgagcctaagattaagagagcatacccgcgggtaggagcacggtgcagagcactttagtggctcggagaaaggctaggaaacttggggcccccgaccaaaaaggctatagagccaacacagggtacctagtag

SEQ ID NO: 495938 - DNA, 1129 bp, Homo sapiens
gggttacacctcttgagacttccgggcatggtaaaggctaacctgattaaccagctgtggaacggtttgcccctttcgcgcctggtaatttcttcatgcgtgggttttccccacttttatctggccgatgccacatctatgcatgtaccgtggccccttatctgtggcccttggtgcttcatctcaggatatactggttatgaaccgctcatggatacaatggatgttccgtctttcgatccagcttcccattgcctgctacttgatcccgtggaccatccgtgttcccgcggggctccatggttcattgaagggagtcgatcgagtagatgcatggtccatccaggagtaagaacatcagctacttcgtggagtggattcccaactatgtgaaggtgtccttgtgcgacatcccgcccactgcggcgctgaagatggcctctcaccttcatcggcatacagctcggccactctcaggagctgttcaagcgctatctctgagctagttctcagccatgttccggcgcaaggccttcctgcactggttcacgggtgagggcatggactgaaatggacgttcaaccgagtcggagagcaacatgaacgaccatggtatccgagtaccagcagtaccaggatgccacacgccaatgacggggacggaagcttttgaggatgaggaacgaggagagtcgatggatagtcggaatagatgccgccctcaactcagatcctacaacacgcaagttccttcttgaaccctggtgcctcgatccctatgggccctgaatggtgcatctggttctaattcgatgttggtgtcaggccgcgctgcacaatatgcagcgcaagctcatgtaacgtagtcatctggaacatagacataaatacaggcagagaattgcgggttactactccagtcagaagataacaccatggagacttgtctagctagaggacttgaaagaggaactgaggggctcacaaaagtatacattcaccatccacttatagtgtttcatagcatgtcccgcaaattaggagggaagttagataacagtctctttcatcatattgtgatgaagcctgtaagtgtgccgtgatactctagagaatatgacaggtactt

SEQ ID NO: 495939 - DNA, 105 bp, Homo sapiens
ctccggtccataccataatcgccgatcttcacgagatcggcgattttgggctgcacaacaagtgacatgaagggagggtccctgtctggaggttcggcgtgtgca

SEQ ID NO: 495940 - DNA, 181 bp, Homo sapiens
gtctttgtcatttgattgatttgtatatggtgagataggctttagcttattcttctgtatatggatatccaccttccaagcaacacttattgaggagactgttctttcccagtatgttttcttggcatctctttaaaaatgagttcactttagatgtattggcctatcttggggtctctat

SEQ ID NO: 495941 - DNA, 167 bp, Homo sapiens
ttttattcttgtgaatgaaggagcagacacggttatttagaggaattcacatacatcacacaagctaactcttggcttttaccaccactgctactctcaatggcgcagaccgtgctgaccaagttatctgaatctgctgcataattggaacatccaacaggtctaaa

SEQ ID NO: 495942 - DNA, 356 bp, Homo sapiens
tttctcacctgtataggttctctgttatataatgagagttgacttacaggacaaaaccttcccacatccactgtatccgtaagatttcattcttgcatggcaagtttttcgatgcttactgagacctgtcttttgggtgaaagcttgttgaccttcattgcatcatagggtctctctcctgtgtgaattggctgatgagtcatgagatataccttactggagaaggccctatcacagtctgagcattcatatgatttatttcctatatgagttctctgatatacaatgagatttccctttgatgtgaaggctttatcacatacattgcatatgaagggtttctcacctgtatgggt

SEQ ID NO: 495943 - DNA, 167 bp, Homo sapiens
acagactagtagagtagatgtgggcttatgactgccaagtacgcccagtacagtagtttattatcactaaaagtaggacacatagatggagtcctgtagatagttatcagtgttagtctacagattttatccacctatacatctgatgcattttctactttagagtg

SEQ ID NO: 495944 - DNA, 247 bp, Homo sapiens
tcccaagtactgggattacaggcataagccgccgtgcccggcctgtcctttttttttgtttgtttctgttgagatggagtctcgctctgtcacccagaggtggagtgcaatggcgcggtctcagttcactgtaacctctgcctcctgggttcaagcaattttcttgcctaaccctcctgaatagttgagattactggcatgcgccaccacgcctgggggtttcaccatgtaagcttggctggcctca

SEQ ID NO: 495945 - DNA, 250 bp, Homo sapiens
tcacaggcactgagtcacatcttctgcaaactcagggtgaattcttgccgaaatggattgccaaaacggtcaccagcacatctcccaggagcttgaagttctcagtgatccacatgcagcttgtcacagtgcagttcactcagcgtgggcaaaggtgcccttggagatcatccagggtgctttatgagcatctccacagaggaagtcagcacgcttcttgcgcatgtcgccttgctcttatggggttgcc

SEQ ID NO: 495946 - DNA, 1282 bp, Homo sapiens
cgggatttggccgccgcggggctccggagcctgctcgctccctgacacggctcactgatgctgctggctgagcatgtggctgcggtggggtgccctgcgtgctccatgttcactaactgcctgtgatcctgcgcggagggaaactgctcaggaggatctgtgtggtgcgctggagtgccgcatcttgtgacccagagaagctgttctttgaggagcggctgctgatggcctgactgatgcgtgcgtggactgctggtgggccgcatacttggcatcccggcattcatctgactgtgcagatcaaccgggtggattttggttgttgacttctctcacagccacggaggacgtgcggttcggcgggttgccctcgtggcccggacggatcctgtctgcactggctgtcacctccttctgccccaccctggtcacttccccacctggacgtgtttatcacagctggtgacggttgttcctcacgatccctgtgcacgacgctggctgggtcccgccaatgggtggacaagggtgtttccatcaggagtgcaggattggcttggacgcattacctacgtaggcaacgtccatctcagtgtgtgcgcgacagcgactgtagatcagcactatgcctcttaatcgatcagaccgtgtagccaggccaagaatcataggcgccaaccatcgacaaccgccggacgtgtgacggtgttggtgctatgacgtgcgaggacagtacggactaccaggcgcgacatgtgctgagttgaaggaggcgagggggctcggcactctgtgtcccgcgattggatggtgcggcatgtctagatgtcgttccgctttacagcgattgaggagcggatgcgcatgtccgttggctgtgcgtccgtcggagggtagggattaacatgctcgtcgtgcggtcctccgcctcggggcccggcgggaaagcgcgggagagggcgaccgcggcaacagggccggcggcaggggggcgggagagcgcgccgcgggacgcgcccctccgggcgaggcggtcccacgcggagggcggggcccggcggcacggcggagccccggccgcggcggaccggccagccaccaagctgcccgcagtaggctcccgccgcccccctgcaccgcagagtcccgagcacctccacccgcggcccggactgttccacgcgcgctcaggccatctctcgccatcgtgcccgctagagcgccgcccgccacacacggctccccgctccctgcagggcccgctgcggcgcgccggcggcgg

SEQ ID NO: 495947 - DNA, 168 bp, Homo sapiens
tgctggtaccccccgttcctgattgcccatggtcagagattgggtggtgggcatatgtgtcttgtggggggtctgtgcgctgcagcgtctccttcctgttctccaggtatctgctgtgagccactccacgcactgtgccatccaggtaggctctcaactgctccgcct

SEQ ID NO: 495948 - DNA, 246 bp, Homo sapiens
  misc_feature (124)..(124): n is a, c, g, or t
  misc_feature (200)..(200): n is a, c, g, or t
cccgatagcccgacagcatcccccaagtatgggaacgtggtctgtcggatgcctggtccaggtcttcttcccccaggagccactcagatgtgacctggagcgaaagtcggactagaactgtgancgcctagaaacttcccgatctagctcgggatgcctcctggggacctgttccccacgatgctgccagccgatccctntctggctagttctggggggtaccgacgctcgacagttctgtaattc

SEQ ID NO: 495949 - DNA, 460 bp, Homo sapiens
gggagtgtaaacaggaggcgatagtataactcgtgtatgggagtaaaagtatggggtcaaaataagggatatggaataagagatatatgtgcttgtaataggtatgtcgtgtcataaagtaattccgctctgtacatatctttcgcttttttactgttactgacatagtatttctgtctgtactctggaccatatcttttgttgattacatgttaggatcaccatcttcccttggtctatgcttcctttatttattttcatgttttctttacaatctcaaacttttaaactacaaaactactgaactcaactttaggtgcctcattcttccctagctaaaggtcataaaagttgtttcagaattttttctacaaacaaaacaaatttgccttttaaatttaggtatttaatccatctggagatgtgtttagtgtggtttttataaggatctagtattttt

SEQ ID NO: 495950 - DNA, 978 bp, Homo sapiens
catttctcccgagtcagcttaccaccctggtgctttccgaggatgctttcgcctgctgtccccaccactgcatgacatgatctctcttaactggagacagcagacaaatctggaactgggacttcacacggcatatggacgtgtttattccatgttcatttgggactgcattctctatttaatgactacagccactacctggcatcataggacaactgttttcataactgtagacctggcattgcgactcttatgtcaatttgagtttcagcaaagcaacacttccagcattcattcattcccaacacagcatccatgcaacagctacagcgttactattactagcggctgtgtgtcatttagctaggtcacttcatttggctcgtgcccttctgcatcaggcgatgtatctttctgcacaattttacttggcatcttatatactcatctgcgttcagaggtgcgttccctatcactgttccgcttgctcgggcatttcatttaccaagcagttgcctcgctcctctgtgcattcccgtcacttacactattcaccctgtcacatttagcatctattcatgtcatgactacaagtatgtgcagcaacagccaacacctcataggtcattcacacaccacggtgacactttgcaggacgtcactcttctcctagtaggtgttagtcctatcaagtcgcttctgcgtgagctatcctgcccccatccacttctattctccatgtacattgtcatgctccatgagccttatcctaggcgttgctcaggcgtctactcacgtaataacaagacgtagcaagccacgcgaacaggtactccgttatatgctacaccctacggactgggtgtttccaggtgacacaccctctgacgtggcgctctattaatgaggcggacagctgtaactacagtactcagatctaccctgtcttatcatatgtatatcttagtgctcgggcgc

SEQ ID NO: 495951 - DNA, 128 bp, Homo sapiens
tctagaggatcccgtctagcctgcgcacgtggacatgctagctcaacatccagaactgcacagaagaaacccaaaaatagctatgccttgacatgcactggctgaggctagtgactgggtacctgagc

SEQ ID NO: 495952 - DNA, 555 bp, Homo sapiens
gagccccacagatctgtgtggtgggcagtggcccagctggcttctacatcggtcccaactacctgtctaacgcacccccaggcccacgtggacatctacgagaaacagcctgtgccctttgacctggtgcgcttatggatgtgcgacgcctgatcaccccgaggtgaatgaatgtcatcaacacaatttacccagacggcccagttctgggccgctgtgccttctggggcaacgtggaggtggagcagggacgtgacggtgccaggagctgcggagaggccataccacagctgtggtgactagagctacggggcagaggaccatcgggaccactgtaaacgacctggtgacggagactgccaggtgtgtgctccgcccgttgtcttcgctgggctggatacaatggcgcttcctgacgaaccaggagcgtggagccagacctgaggctgtgacacagccggtgattctggggcaggggaacgtagggtctggacgatggcccgcatcctactgaccccagctgagcacctgcgagagaacggacaacacgaaggc

SEQ ID NO: 495953 - DNA, 269 bp, Homo sapiens
aatgttttatagacacccctccatttatgtgatgggtttgcatcctgataaacccatcataagttgaaaatatgatcataagttgaaaatatgatcataagtcaaaaatgtatttaatatacctaacctaccaaacatcataggttagcctagcctgccttaaacatgctcagaacacttacattagcctacagtgggcaaaactatccaacacaaaatctatattgtaataaagttataaagaattttgaataaaaattcaatatttg

SEQ ID NO: 495954 - DNA, 449 bp, Homo sapiens
accctgtggtgggaggcatgcaatgaggggtttggcagcagcacgagctggacatggaccagacctactggtaaaactctgtcaaggagaacaactagttgcagtactcccaccacaaacgtgggatccgtgcacgttaacgattactaggactatagcatgaaaccttaggcatatgagggctcttatcatccgtgctaaacagattcagcaaattaggcaacatcaggggtggtgtttctatcttttcctttcccaaagcagcgtcctgccaccacaaacgtgggatccgtgcacgttaacgattactaggactatgcagaaaccttgtttgattttttttttttttttttttgttttttttttttgttttttttttagtttttttttattttttttttttttgttcttccttcttttttgtttctcagcttgttcttagtcttctc

SEQ ID NO: 495955 - DNA, 219 bp, Homo sapiens
atactgatacactcagctctgtacctgatcattcgtgtccccacacgttgtatgcctacggtctactacaaccctttcgctgacgccattaaactcttcaccaatggagcccctaagaacccgccacatctatcatcagccctctacatcaccgccccgatcttagctctcaccgtcgcccttctacttcattccaccccacgatgacacgaatgctca

SEQ ID NO: 495956 - DNA, 354 bp, Homo sapiens
ctcatggctgactctagaggatacactctccctactgtatcctaccaatgacatctagttttctcccaagagaagatctagggccaggcacggtggctcacacctgtaatcccaacactttgggaggcggaggtgggcagatcacctgaagtcagaagttcaagaccagcctgggtaacatggtgaaataccatcgctattaaaatacaaaaattagccaggtgtggtggtgggtgcctgtaatcccagctacttgggaggctgaggcaggagaatcacttgaacctgggagacagaggttgcagtgacccgagattgcgccactgcgctctagcctaggatacagtagggaga

SEQ ID NO: 495957 - DNA, 192 bp, Homo sapiens
ttattaaaaaaaaagggaaaggaaaccaaccttaaaccgggccaaggtaaggccttttttggatttccagggggggtttttcaaggggcccaagttccaatccagtattgccttgccaaagcctctatttcggtctcaaaatggctccaaatgatttctgtcctgcaaattaagcccaattttgggaacttc

SEQ ID NO: 495958 - DNA, 906 bp, Homo sapiens
gatgatatgagattctttatgaaagaacatgaatgtaagttttgtcttgccctggttattagcacaaaacattactatgttagatattgaaataagaaagggaaggaatgagagagagtgaaaaggagagggtaacagaaaaagaggaaagaaaagtaagtcagggaaatattaaaaactgcaagagaaagcaattgaacaacacgacaactaacacgtacgggacgggacacggcgacgacggaacgccaagggacacggacggacacgaacacacgaccacgacgcgacgactcgacacacggggcgacgacacaagactagacacgaaacaactaccttgaacgggagacctccagaacaacctaaagacgaacgaaacggaacagaaactacagagagaacagagacaagaagaaacgagcaaaagaacacaagaacagaccagagagggagacaagagagggagcaaacgggcagagaacacacaacattgtccacacataaacaactcgtaaaagaaactgatcacagacaagtcatggaagacaggaagaaaggaagagagggaagtaacagaggaaaacctataaatattcccacagatagacaaagtcaagcataaaactggagcttgagaaggaaatgaaaggaaaacgaagtggtactttcttttaccctaggagaagacctccatacaggaagacttgtgtgttggggctgggacattagaatcatccgcaagtcactccgaaaactttgaaacttgacaagggtcagagggggaactacgcatttatttaagcattttgccatgtgcccaggcactgacccagacacattataaataccacattgttcaacctgtgtgtggcatctacagaccttagatcctagtgtgagaac

SEQ ID NO: 495959 - DNA, 251 bp, Homo sapiens
gaaaccagaagagccatacagtcagtggaaggcggtggggccctcacctcttcacctggatcccactgggaacctttgtgccttatttttttgtaattggtgacggggttttttttccacccattcctgacctgctgtttactcctcctgctttgcttgcggtattgtcatgggcgcttttggcgactgaatacttgtgttcttgctactggggatcttttgtcctttgctgttggccaaattcatggctt

SEQ ID NO: 495960 - DNA, 195 bp, Homo sapiens
  misc_feature (20)..(20): n is a, c, g, or t
  misc_feature (44)..(44): n is a, c, g, or t
  misc_feature (105)..(105): n is a, c, g, or t
  misc_feature (108)..(108): n is a, c, g, or t
  misc_feature (114)..(114): n is a, c, g, or t
caaaaaaattactttgaatnccttaatatttgctgcattttttnccgtatatataacatgtcttctttcagaatgggaatatatgtgtgcctcctcccccatatnaancccttntgttgtctttatatgtcaaactggttgaacactgtaatgagaataaactgcacagagtttattctgacttaaaaaaaaaaa

SEQ ID NO: 495961 - DNA, 115 bp, Homo sapiens
tctttgaggcagctgtactcggctgagtcgacgtgaagcgccttgagcttctccatccgcatcttccaggagcagggggagaagctcaaggcctacacttgacaaaccgtggaaa

SEQ ID NO: 495962 - DNA, 405 bp, Homo sapiens
  misc_feature (83)..(83): n is a, c, g, or t
  misc_feature (196)..(196): n is a, c, g, or t
gatctagttcccgtatctgagctgggaggccctgacggcgccacggccccaataaggtcacctacaatggctggaggcttgtntgccatgaacagacagtatttcaatgatcttggacagtatgacagtggcatggatatctggggaggagaaaatctggaaatctcatttccggatctggatgtgtggcggcaantcttcatcctcccttgctcaagagtaggacacattttccgaaaaaggcgaccgtacggatctccggaaggccaggacaccatgacacacaactcccttgaagactggcacatgtctgggcttggatgagtacaaaggaagcaatatttttccttaagacctgatttgaaagaacaaaagcttcggggaatatcagtgagcgtgttgaaa

SEQ ID NO: 495963 - DNA, 247 bp, Homo sapiens
agtctgaagagtgtgggaaggacttcaggcagagctccagtctctacatgcatcagagagtccacacaggtgagaaaccctatatatgttgtgagtgtgggaaggggttcaggcagagttcaagcctctgcatccatcagagagtccacactggagagaagccctatagatgttgtgggtgtgggaaggccttcaggcagagttcgagcctctgcatccaccagagagtccacacaggagagaaacc

SEQ ID NO: 495964 - DNA, 204 bp, Homo sapiens
tactagcgagatagcgctgcagtccgtgatgtggtgatgatgactgaagcccgtatgacggcgagcgtcagaaatggtgcatcaccatgcttccagctaacaggtctagaataccagcttgcgaataacagtccccgtggccatccctgtgagggtgacgatagcattacccccaacctcattttagttgccgaagctgggtca

SEQ ID NO: 495965 - DNA, 125 bp, Homo sapiens
atgcacaggtgggagtctttgtatatagtgtaaatatgtctggttatgtcaaaaggaaattttttagacacagtaattgaactgtattccgtttgtatatttaataaatttctgttttcattctt

SEQ ID NO: 495966 - DNA, 318 bp, Homo sapiens
  misc_feature (56)..(56): n is a, c, g, or t
gaggcagtgaatcgaactcggtaccatctcgtgacggcgatatggagagatgtctncgtaatggcagcttttgcatctggaagtcccgccacttatgatcgattgccctgcttatttggcctattttctcagactacttcttgatggtctctttcccctgacaccttactctccccttcctgtcacctttgttctcaggttttctcctctcttgtcacctccatttctttttttcccctcctgctgccacttaaacttttttatcttcctaccaagtttaatcagattttcccttttgtcataatcgccggtcacgag

SEQ ID NO: 495967 - DNA, 353 bp, Homo sapiens
ctcgagctcaggagtgcgaggctgtagtgagctatgatcacgccactgtgctccagcgcgggcagcagagtaagagtctgtctctacagtcccctaaagaagcagacagtgaccgtggagtggcaaatggagacattgcatttgaacttgacagaatgtttttttgcagccaagttatctgtataggcctctaatttcactgtggtgttttattgatgatatgagatgttctttgtctttaggggccttggacaaagggttactgactatgctcatggcgatgccttgcctgctgccaaggcagggctattggcactttcaggtttgacctttgctgggctctgctatattct

SEQ ID NO: 495968 - DNA, 129 bp, Homo sapiens
ggttcagtttgttcagggaatttttgttgaaaaatatgacccaacgatagaagattcctcacagaaagcaagttgaagtgcgatttccatacagtgttatttctcggaattctgggtactgtctagggg

SEQ ID NO: 495969 - DNA, 214 bp, Homo sapiens
tagaggaccgcttacacaggctggctatattactaagaatgatatttaaaaaacagtcactaatgaactctacatattatagaacactcacagggcaatatagattagggtgctactacgacttttacctaacattagtctttctcaatcagtgtatgtacaacggatacgtatatcgatccagtaacatattacagtgtcattagtcttcaca

SEQ ID NO: 495970 - DNA, 136 bp, Homo sapiens
ctgctggttcttaggatttgactcctcataactgaacatgctcagcctgcctcctatacctggtccccgccctgcatctggttttcctgtcctggtggctgctggccaagggagaagtgacagagatgttcagtta

SEQ ID NO: 495971 - DNA, 486 bp, Homo sapiens
cattaacaaaatgaaatctgccacaaatgaccacaccccagtgattttacaggagattgctaccaaaaaagttaagaaacagattatcccaaacttatacaaatgcttccagataaagaacaatgggaacaaacagctcattctataagggtagcataaccttgaaatcaaatcaaacaaaataataaatgagaattcatcctcactcatggctactgaaacagatatcttaaattaaatcagaatttagaaatccacatattcacacatacatgtacatattttttttattgggtttacttcaggaatgcaagcataattttacagtaaaaagctcttacaaatggcacagttgctcgcccctgtaatcccagctacctaggaggctgaggtaggaggaccactggagcccaattgtctaggagtttgaagctgaatgagctataattgcaccctgcacactccagcctggacaccagaaactcc

SEQ ID NO: 495972 - DNA, 169 bp, Homo sapiens
gtgcagcaaaccttggctgctaggtccctgcagctggagcgcaaaaggagagatttcacctcttctgggagttggaaactctacatagacactcatgccttagtgtgcttactggaagacaatgggtttgctactcaacaagcagaaatcattgtgtctgcattggtca

SEQ ID NO: 495973 - DNA, 213 bp, Homo sapiens
tctgctgatgcccccatgttcgtcatgggtgtgaacatgagaaggtatgacaacagcctcaaggatcatcaggcaatggctctgcaccaccacttgcttaggacccctgggccaagggtatccttgacaacttttgggattcgggagggttattgcccacaggccttgcattattgccaaccaggaggtttggatggcccctccgggaaactt

SEQ ID NO: 495974 - DNA, 331 bp, Homo sapiens
atctcaaataaacaaacaaataaataacaaaaaacaaaaatgttgcattaaacttagttcttgtctctcctttccactcttattcttaaatctgaagctcatcgactaagtgaaatatttaaagaagtgcccacacagattagttcatgataggccagcaagaagaagtattatgtagtaccatagttagtaaattcgtaaaccttggaagccattatttggtccacttgcaatttagtgttttgaagtgtgtagcttcattcagatagctctttaaataattaggtatacggcaccacccacctcctactatacaggaaggttaccctca

SEQ ID NO: 495975 - DNA, 242 bp, Homo sapiens
cgttaccctggtgaattttgaagggagacctcttctccaaacacaccccgctgagaagctaagggctgttgcgggaaagttcttactttacttgtgctgaggtccaggtagttagccagcgaaatacaggtgtagatggagcagcagaaagggcctttgaagcttcttgtgttcccaagcaggccattcctgcctgtcatcacaggtatacatcaggaggttgggagttccacaaggggggg

SEQ ID NO: 495976 - DNA, 230 bp, Homo sapiens
  misc_feature (186)..(186): n is a, c, g, or t
tctttgcacgcccatctttttcaccagaatgaggaactccttggaagttactgctaccatcagtgttgatttccaactctttgaaccagacgtctgctaccctttttcctgatatattgaggacactcggtctctagcaatttcttctagtgctcatcctctttagacaggcatggaagattcccnctttatcacgggtagtatcttgtggttagaccgtcgattgggga

SEQ ID NO: 495977 - DNA, 613 bp, Homo sapiens
actcagaggctgtgcatttcagggctatgtggtcctttgtttacctcctaaaccacagctgttgtgtttcacatatgtgtgaattttccttggttctttttaaagagaatgaataaataaagttactgcttttaggtaaaaaaaaaaaaacaaaaaaaaaacaaaaaaaaaaatgttgttgcggcgcgcgccttggcgccccttggaagaagagtttttgtagacacccaattgcgttgtgggcgagcgcggcggccccccgagggggctataggtgggaacacccggggcccaagagcggtggtcccagaggggagagcactccggggcggcacactgagcaggacgaaccgggcgggcggagggaagatctctcttccacccccaaatatataaacaacaaacagcgcgccgcggggagggaacaacaccaggggagggcgtggtcctcgtgagaaaccacaaatctctcccagagagatgtgggggactgctccacgggggggggggcaccatcacaggggggactcatattaccaaacagggggggtgtcacacaacgggacagagccttcgggattatcccaatttttaccgcccggcccggtgggga

SEQ ID NO: 495978 - DNA, 141 bp, Homo sapiens
ggaccggacggagctgtactggaaatatataagtcatttaacacgagaatgctctaaattaaggtctaaaagcattgattacaacaaacactttacctcgttttggtccttgcttttaaattataaatctaacttgtatta

SEQ ID NO: 495979 - DNA, 808 bp, Homo sapiens
ggttgaatgtgggctgctcgcggtcggcgtgccccgatgtacaatgggccgggaaatcgtgggtactgaggctctggaacgttctgcccagctctccttgctagaaaacattcccttcaatataaaaaatgttcccgagtcttaacaccgccagttgagaacgtacgtgatcgttagatgtattgagagtgaataatgagtgacagtaacacctggtgacatcagagaaccttggctttgtgttttgcttgtcgaaatagtatgatgactgtgcctaattataataccggagaaaaggaataacgtggaagggatgaacatggaatcgtcacctgtgacatttatgtaacgtgtttgtgttgaatgtcaacgtgggaactttgtgggcagatgacgggaataggaagaacgaaaggacgttctactggcttgtgctaactaggaacgatattcggcgaaggaacgtgaatagagcttttctaaatgtgaaattgctgttgttttggcagaatgaaatggtgcttcaaatttggactgtgttggcacccccgattgtaaaacgaaagttatcattgtcccatgtggtggactttccatgaggagcaatgttattgttcccagtttttaacgggccgagatttggaggtccaattttgcttggggcccccttcggaacctggtgtcaacattactttccccctcctcaagttacttgataagaagaagtacgtttagcagtgggcaacccatttgggctggggaccttttattgcaacgctaatttccaagcttataacctttttgacga

SEQ ID NO: 495980 - DNA, 178 bp, Homo sapiens
  misc_feature (21)..(22): n is a, c, g, or t
  misc_feature (43)..(43): n is a, c, g, or t
tggaccctatctagggctatnntttctccaaaacccgaacagntcgcctggtcttgtcacaaacttggcctgtgacctgcagcacatgactgtcactcttgggcctcagtttccccatcaaaaaaacagaggtcatgtgaaatgatggtctctaaggtgccttctaactgatacatta

SEQ ID NO: 495981 - DNA, 329 bp, Homo sapiens
tctagaggatcctcatgctgctccctcttcagcctcccaagtatgctgggactacaggcacatgccaccacgcccggctaatttttgcattttttttgtagagacagggtttcgccatgttgcccagaatggtctggaagctcctgaactcaaggggaatcacctgccttgggcctcctaaaagtgctgggattacaggggtgagccactgcaccctgcctacagtaacagattttagccaaaactttattccaatcctgggttttccagcatgtgttgtacaataaacagatggatcttcccaggagagggttatatgtagggatcct

SEQ ID NO: 495982 - DNA, 588 bp, Homo sapiens
catgctagtcgctggtggcaatttgccgagggacacaaggaggaggcgggacaggcgcggtgcagccgcagtctccagcggcggcccggcggcacggacgagaaagccgagcggcaaggagcggcgggatgccggggacaaggacaaagaacaggagctgtctgaagaggataaacaagcttcaagatgaactggagatgctccgctggaacgactaggggagaaggatacatcctgtatcgcaccagtgctggaggaattggcaaggcgattgtttttaacatttcatgattagctgcccaagcctctccaaattttgcgtcaccactatggccaactgaaggaaatctatgagaacctggcccctggggagaataagcgttttgctgctgacatcatctccgtttggccatgaccatgagtggggagcgtagagtgcctcaagtatccggctagtgggctcccaggaggaataggactactggggtcatgagtatgtaggccatatggaggagaagtggtaaggagtggaggagttggatgagcagagaaggtcagccgggagctctgctactcggtgaaggaaat

SEQ ID NO: 495983 - DNA, 367 bp, Homo sapiens
tgtcactattgtggggatcggtacagatgaggaagtggatgagcggtacagagaagcacctatggacaagaaggggaattcaattacatcgagtcacacgcatcctgaaacttggagccaaagacaaagatgactgaaagaactttagcaaaaatcttccagttacatggtcttactctcttttacttctcagacacttcccccaccctcatagaacctgtggcgtgcaattaagtttcacagcttggcctctccttttggatgtatttattccagacctttctgccatttagcactggtataatcagacgggaaagggggatgagggtgtaaatggtatggaaaaagatcgcgaaggggtaccgag

SEQ ID NO: 495984 - DNA, 615 bp, Homo sapiens
  misc_feature (388)..(388): n is a, c, g, or t
gcgctacttctcctcgcagcggcgcccgcgagcgtggtggtggacgcggcgtctagtacatacaccggggttaggtcgactgcacacacacgcccgcggtcgccggcggcggcagcgcggggggcgcattggtcggacggcacgccacacacggcgctcggcgctgcgcacacagctttgttttctcctcgcgccgcggcggcgtgtccgcccactctgtactctctctttgcacaacgctcgcgcacccgcggcgagtgtgactcgcataggctgaccacgctgtgtcttgtctgcttgtgtcagaggagagagtgtttcacattcactgagacactgtgagaggtgggcggggccgacagactacgccgttgtcacacgcacatanaaagggagagctagagaatagaatcgccccctctctgtcttcttgtgtggtattatttgtgggaatattctgtgccaccatacgccgcgggtgcaattatagttgcgcagaaccgcctccttgtcttactctctcgcccacgggcgattggtatgtgcattaacgtccacgcgacacgccgcccacatcattgagtacgaacaatacacacggaaacatacgagaag

SEQ ID NO: 495985 - DNA, 93 bp, Homo sapiens
tctgaagacacggctgtctatttttgtgcgagagatggtaattatgccaactgccacgagtccctaccgcactatgactactggggccaggga

SEQ ID NO: 495986 - DNA, 273 bp, Homo sapiens
gtatacgggatagtgttccggacacttgctgaagtatatcagctgaaggagctttgggctgagactatgggtttattagatatagaattaagtcatctgcaaagagacgtagttgacttccctcttcctatttgaataccctttatttctctctcttacctgactgccctggccaggacttccagtactatgttgaataggagtggtgggagacagcattctggtctggtgtcagttttcaaagggaatgtttccagctttgggttatttcag

SEQ ID NO: 495987 - DNA, 956 bp, Homo sapiens
  misc_feature (590)..(590): n is a, c, g, or t
  misc_feature (652)..(652): n is a, c, g, or t
ggagtattttaagagtaggaagtcggggaaagcagacacgtagcagtcagctatgcagtcctaccttgctgtctagtagcaccagaatcctagatcatagaaggtactagctaacattcaggatctctagcagaactgaccagtattgtcatcgcggggtgtatggttgtctttgctgagggtacatagataacccgacccaggagttgtagaaacgctataattaaaggtcactccatgaatgttgcatgtggaataaagatcattctaaccaaaatgtgtgttcaggccaggcacagagggtcacccctgtaatcctatgtgcttggggagataatggcgcggaggaatcactctatagggctcgagaagttccagtaccgagcgctgtgcatatagtagcagagatcccttgtctcgtactgaaaaagttctaagaaagttagcctgggcgattgtgttgacctacacaggtatcgtagttcccaaggatacgtacgattgatgggtgaacattggagagatgcatctttgaggtctccacggagttatcgaggggctcgcaagtgggagcttgctgatcaacagcncaagctgcaatgtacctaggctttggaatttgaggggctaggcaatgatcccctagttgctnccacataaatccgcatagtggcaagaacccagaatctatatatgaaacgccaagttgacccttaaatgtggtctcatggaaaggttcgagaactttcttaaaaaccttgcgtttctacgtggataccttggttttctgggaaacgcgacggatgtaaaatgggctttggattgcttcccccacggatttccaattattcgagaatataatttctctcgggtgcccattactttactcaatctggtgtaaaaaagaacaaatgctataacattaattttgcaattgggcacaaggttctttcata

SEQ ID NO: 495988 - DNA, 351 bp, Homo sapiens
gctggaggctgtcccccattttaaaggtgcaggtattgaacccccttcctgaaacctagtttaacgggaatagcaaaaaaatgccttttaacaccattagctttgcaaatgggttcatttcagtcaaaggggaattttgctttggccaattgaaaaatgaaaattaaaggagagaaggaaaaaaacccaaaggccctttaaacatgaaaagaattatttatatggtaaaaaaaaatttagcttttcaaagcccaagactgaataaaagggccccttttaagctttttggaaatggtactgttaaaagtctttttacatcagggttaaaaaatttggaatgacatttgatgg

SEQ ID NO: 495989 - DNA, 793 bp, Homo sapiens
  misc_feature (27)..(27): n is a, c, g, or t
  misc_feature (73)..(75): n is a, c, g, or t
  misc_feature (77)..(77): n is a, c, g, or t
  misc_feature (96)..(96): n is a, c, g, or t
  misc_feature (106)..(106): n is a, c, g, or t
  misc_feature (156)..(156): n is a, c, g, or t
  misc_feature (160)..(160): n is a, c, g, or t
  misc_feature (186)..(186): n is a, c, g, or t
  misc_feature (202)..(202): n is a, c, g, or t
  misc_feature (208)..(209): n is a, c, g, or t
  misc_feature (214)..(215): n is a, c, g, or t
  misc_feature (221)..(221): n is a, c, g, or t
  misc_feature (234)..(235): n is a, c, g, or t
  misc_feature (251)..(251): n is a, c, g, or t
  misc_feature (336)..(336): n is a, c, g, or t
  misc_feature (340)..(340): n is a, c, g, or t
  misc_feature (348)..(348): n is a, c, g, or t
  misc_feature (365)..(365): n is a, c, g, or t
  misc_feature (374)..(374): n is a, c, g, or t
  misc_feature (383)..(383): n is a, c, g, or t
  misc_feature (404)..(404): n is a, c, g, or t
  misc_feature (426)..(426): n is a, c, g, or t
  misc_feature (448)..(448): n is a, c, g, or t
  misc_feature (464)..(464): n is a, c, g, or t
  misc_feature (468)..(468): n is a, c, g, or t
  misc_feature (506)..(506): n is a, c, g, or t
  misc_feature (536)..(536): n is a, c, g, or t
  misc_feature (543)..(543): n is a, c, g, or t
  misc_feature (569)..(569): n is a, c, g, or t
  misc_feature (580)..(580): n is a, c, g, or t
  misc_feature (672)..(672): n is a, c, g, or t
  misc_feature (705)..(705): n is a, c, g, or t
  misc_feature (731)..(731): n is a, c, g, or t
  misc_feature (733)..(733): n is a, c, g, or t
  misc_feature (757)..(757): n is a, c, g, or t
acacctccacctgttcctgaggttacntcagttgcagaaagaaaaaaccttgggcgcgagggcgaccttcccnnngngggaggagagacgctggangagcagccangcctccaagccagggccggccgggatcagcagaggtgcaaagtcccactnaganggacccagcccttcccctcccaacantcatcccttccctgcngggggnnggggnngggggngggctcagtggcnnaggaggcgaagatctnctgaggatccaccagcttctccctgggcttccccgtgccctggccccgggccacctcctcggcatccagcttctcccagtatganaaanagactggncggacccctcggctgcngaggagggnctggatggntgcgtagcgaggggtggggcnagaggggagcaaaccagcattnaggtcctgcagcagcatctggncggtgaggaagctgtnagtnatggttgtggctatgacacctgttggtcctctcttcanccagccgctgcagtagagggctggaacatncataagncgggcctccacattggggatgacccnagcttggagtnaaagggcacgcttgggtcgacagggcggctcttatacccaatgctgctgagcaccagcccacaagggaggtcttccatgtctcccgtgggcnctgcacgggtggcctcatcgacaccctccagtntagtgactgctaggcggacacctgcngnccgccgcccatctggtgagggcancccctgctggggggcttcggaaaaagcggaggcccc

SEQ ID NO: 495990 - DNA, 378 bp, Homo sapiens
gagatggagtttcgctcttgttgcccaggctggagtgcaatggtgtgatgttggctcactgcaacctccacctcccaggttcaaacggttttcctgcctcagcctcctgagtggctgggattacaggcacgtgccatcacgccaggctaattttgtatttttagtagagcaggggtttttctatgttggtcaggctggtcttgcactcccgacctcaggttatttgtttgccttggcctcccaaagtgttgggattaaaggcatgaacccccacgcccagccaaagttaaactattattttgtgtcagaatttgtattaaatgtgacttgtcaagttattcagtttttatccttaaataaatgagttatttgaattca

SEQ ID NO: 495991 - DNA, 1047 bp, Homo sapiens
  misc_feature (526)..(526): n is a, c, g, or t
attctctacaaagcgagtagaagacattggaacactatacctattattcggcgcatgagctggagtccgtaggcacagtctctaaagcctccttgattcgagccgagctggggccagcacaggcgaaccttctaggtaacgagcacatcttacaaacgtctatcgtcacaagcaccatgcatttgtacataatcgttcgttcatgaggtcaatgaccacatcatgaatcgcgaggcgtttggtcaactggacatagttacgccctaaataatcggtggcaccctgatatggcaatttcccgcgaccataaacgaacagtgaagtcgttctagacgtcgttaacactcctcgtacatcgttcgctttagcgtcctagccatcgctatcatgcggtaatcaagtggcacggcacggcagcgaaaggaatcccaggttgcaaacaagtgcctactctccttccctcagacgagaggtaacgtgacttcgccgcacccactgagatgccgtcctgtagcacctaacacanttccttcggcctttcaacatctgcctacgcatgggttgtaactccttcctaaattcgtatgagcgtgcgtcgcactccaaaattatctactagtgcatccatagccaactttattcgaaatcattacaagagcctcctctagtcgattaactctcagaataactcaatagcgtctcgcctttctctcgatcttgactacgcggtccctagatcgacaagacagttccttagcgatcatcgctaattgtctctcctagttcctagtcgttgctggtcatctacctataacttatctaagcagacctgctaaagcgtcatacatcaatcgttcttcgacccccgtgcggaggaacgagacctccatttcgtaataaccagagaccgatttctgcttttggggaaccatcctgaaggttatacttcttaattctaaccaggcttcggaatagatgccccatattgtaccttatttactccggaagaacagagccttggggacctggtttggcctgggaaggaca

SEQ ID NO: 495992 - DNA, 268 bp, Homo sapiens
  misc_feature (82)..(82): n is a, c, g, or t
  misc_feature (84)..(84): n is a, c, g, or t
  misc_feature (97)..(97): n is a, c, g, or t
  misc_feature (99)..(99): n is a, c, g, or t
  misc_feature (107)..(107): n is a, c, g, or t
  misc_feature (109)..(109): n is a, c, g, or t
  misc_feature (114)..(114): n is a, c, g, or t
  misc_feature (159)..(159): n is a, c, g, or t
  misc_feature (169)..(169): n is a, c, g, or t
  misc_feature (193)..(193): n is a, c, g, or t
  misc_feature (195)..(195): n is a, c, g, or t
  misc_feature (216)..(216): n is a, c, g, or t
  misc_feature (223)..(223): n is a, c, g, or t
  misc_feature (255)..(255): n is a, c, g, or t
  misc_feature (264)..(264): n is a, c, g, or t
gaaaagtataactcgatttcttgatctttgagcatgttttgtgtttcttgtgttttctaaaagaatattagatatggttaantncattacatctaananatttattntnttttntgtatgctcaggttccccacacccatacccaccctaacccctgtnatttacattnggtggaactttaactggtaaccangnaaaagtacattttgataatgngtattgntaatcctcggggaaactagtgggtatatgggngcccctttnacct

SEQ ID NO: 495993 - DNA, 407 bp, Homo sapiens
ccatagcctttatagattgagaccttcacagtctgaatggctagatctaagacaatgtatatgggcttaagtagatgtaagagagcagacaaacaaaacatatagtaaaagtagtatttgccagaagcaatttccattctcttcctttcttcctgcaaactggtgtattatctttacgagttctctgtcattccataagaaagctgaacagtggttaacacatccagtttgcttgaattcctgagtgattcagattccagtgagcttgagggtcattcataacagttacaatgctggtgtggtaaagggagaacaaaaataaactgggtttctgcaggtaagtgagaagacaaaatgaagaggaataaggttgtaaggcagtatgattaggcttgtgagagtgctat

SEQ ID NO: 495994 - DNA, 252 bp, Homo sapiens
ttagccgacgtatatcatggtgtaatactgtatgactccatttatatgaaatggcagaataggtaaattcagaggcagaaaatagataatttgttgccaggggtttggaaaaagagtgaacagaaagtgactgctaggagttcctgttctggctcagcagaaacgaatctgactggcatccatgaggacgcaggttcaatcccaagcattgattagtgggttaaggatccggcattgccgtcgcataatttt

SEQ ID NO: 495995 - DNA, 134 bp, Homo sapiens
ccattgactgcgccaatacacccttctcatgtcaagatcaattgtgtgcccactttacgcagaaccacaaatatcaatacaggaagaaccatcatcataaccattgaattcattagaaagtctgtccagcccca

SEQ ID NO: 495996 - DNA, 495 bp, Homo sapiens
cataacaaagaatgggagcccctgctaagggccaggggtgtcttaccccacaatttactcaaataccttgacaatgggtataaatgaaaggccaaggaatctgccacagatgctacctacagagctttggaaaagtctcattaagaaaatccttggggctacagccttgctgcaagccttccctgcattggctctgcagatttctcatctgtcctgacatgcagttttcctgtcattggaagtgggagatggggtaggttgtaagaaaatgatattaaaatgtaagcatggatactgtgcataaggacaaactatttataaaatgtatatgctatttattttatatatttatttatttcaaaataataattttatttttaatgagagatgcgatggctggattttcatcagaaagaataaggtcctactgaaacaggataaaatgagttattaaaggcttttactgacaataaaatttgtctttatattgtaaaa

SEQ ID NO: 495997 - DNA, 796 bp, Homo sapiens
tcaccgccagcacgcgcctgcttcccgtctagcgcgagtccacgcagctccccaggcccttcaccagcacagcagcagcaggcatggcagcaagcgtggagcagcgcgaggtgcaccatccatggtgcagggccatggccctcttcttccgatgatggccctgtccctggcagttgggcatggctcgcgttctactgtatctgtctgctgcagtggtattctgcttctcctccgcatgacctggctagaacctgggtacactgcacagtgctgtgcccatgtgctggctacctgggctgtggccacttgacctgccaggtctggggcactccaatggatcgccgcacgcccctgcccctataggggagctggcccctgtgcagcttcctggcggctgtggtggatgccttggacgctgggccccccggttgtgatcagtccatcactgatgtggccatgtactccctgcccttcctcacggtccctggtctcccagctcccgtggctttgtgccagtgtgcccctcatctgcactgtctgagtcaactgctgccaactattgccagtgtgaagagtctcagctctgattgtctactggcacgcaccatggaccccatggggtcactgacctggcgttgagctcctgaaggtcaggttgcgccaattgcgaccgggttagcctggactcagttgaacggcgggcctggtgctgcccccctggtaagcctgggatctattcgcagatggaggtgcgccgtttcacgggcttgcttggactttccttgccggggtttcc

SEQ ID NO: 495998 - DNA, 179 bp, Homo sapiens
gtacgagcctctccaaaaacataaaacaaaaaacaaaaaaaaagaggagggacaacttctaactcattcttgaagacagcatttccctggcgctcgttacggaggcgctcgttacggaggcgctcgttacggatcgttacggagggctcgttaggcgctcgttaggcgctcgttacgga

SEQ ID NO: 495999 - DNA, 176 bp, Homo sapiens
  misc_feature (6)..(6): n is a, c, g, or t
gccgtncgactgcagccccaagcatctttccacataggccccatacactttggtcctcagggaaaacagggtacggggcaggccggcgcttttctccccacaccaagcccctgcgcgtgttcactctgaatcagcagccacttcctgggagccaataaaatgcatttttacaggcc

SEQ ID NO: 496000 - DNA, 1455 bp, Homo sapiens
  misc_feature (250)..(250): n is a, c, g, or t
  misc_feature (641)..(641): n is a, c, g, or t
ctcgcttctgcttatattggaggccggatcatgaacatgttgatcactctatctcctcccttacctgggcaactacgtcaccagcccttgtgagctcgtccaatagaccataatccatcgttcatctcattactagccatagtcgatggctgtcatccatcgtatcgttagagggccatcaattgttcatctagcaatcaacttatctaattgattatagatagccccacgtggctcaatttatattccncaaaattcagctcgagagagcggacgcactcgtcctctgcggtcctggagtactcggcttcgctttatagttcagcacggcgaagattccatatcgttttcttccttcaattctccgtacacacaagatacacataaagactagcgctggcgcatcagctactaactaacttaacccagtcaccgaccgaacccctacagactatccaagccatttcctcttcgaaactctctctgtctctgtgcaccgagaacgggtagtaacccccctatattccgtaagtacccctaaactactctataatttccctcacgttttaacatcgcagtcagccacaggcgcttgtatacatcaccatcttacttcctatcacagttcgggctacactcanaaaggtatatccagtcaacgtagaactactattctagtcctaatctaagtaaactaatctcatctctcattgtcgcgagttgaagcgctgcaaaatatacctacttaagtctgacgcagcacatttccttcttcagttagctttgtagtcctctggttcccgtcaaatgtcgaaccatagtccaagattctcgtgatcttataccttccctgagttctttcattctcactagattgccacttatgcatagacaatgagtcatttgcacccatagttacttagctaaagcagggaaccagaatatacccttctaacacgatctacctctttcctttcagaaccacccaactgggaagtgcacggatgatcccattttccataaatatcccaaaacaccacttaatattcctgaaattctctgccgagtccatcaccccggaaaggatttcatacattcgtctatttcccttactccagtgtctttccgcgcaacataaatcctcttcaataattggcttacctttcactacctcccggaacatcaactaagcaatccactttcgcattacaataaagcatcaaaagctcctagaccccttattaaatatccaaactatgagtttcccccaatacaatataatcccttataactcacacccccacattaattttccacgacaatgaaattatcaatcctttcacaccgcgcaaccattttagacccttctctaccaccataccctcgtattcttccacacgagcatcacacccatctactacaccactccaatccccaaaacacataaacccacac

SEQ ID NO: 496001 - DNA, 535 bp, Homo sapiens
gattgtgtagtaaaggctgttaaagtagaggagaggaatcaggatgaactgcagagagtacttaaggccagatgggtactggagcgtatgcgcaggaaactgaagctgaactgtgtggttgttgctaacattggtgtatccagcactaagcctcagaaataaaactttactgatatctttgaatcccatgtgtgtccttccctgaatgcattgctttgtcacccagaggtaacagctatccagcattcagtgcttatcatccccatgtctttctttattggttttctaaatttggaatatccctggagacaactttggcaactgaagctaaactgtgatggttgttgacctctgatgtgctactttttaatcaagaacttattttccctctttctctctcagctcccacaggcccattctggtgactcatgacttgtatacacagaacaacagagaaaagaacaatagaattagatcaacaagcaggggccacagtgagggctatgtcttaccaagaaccatttttaattgaatt

SEQ ID NO: 496002 - DNA, 1231 bp, Homo sapiens
gggcgtggtggcaggcgcctgtggtcccagctactcgtggaggctgaggcaggagaatagtgtgaacccaggaggcggagcttgcagtgagccaagatagtgccactgcacttcagcctgggtgacagagtgagactctgtctcaaaaaaaaaaaaaaaatcctggaaaagccagaacaatatacaaacaagtatgtggaggcagattggctttattccaagaaggctgtatggagtgtgtgtctgccataagcctccttatagcctattatttctacttgcctgagaagacagtaatatataaccggaacagtgacgggagatggaacggagacgcctatcgtttacgacgcgttcccaatttcatggccttgtggggcgttggcactgtgccgggagactgactctctcattcactctgacaaggccccatccgtgtgtggcagaaacatggggacatctgagtgaccatgataacaccttgaagcacacaggggcaagaacttgttcacctgacagacagaactatgcgggttactgggctggcgcatactggggggccacaggggacaccccctcaagagacaacacgggcaccaggacacaaggaaccacaactacacgcctagggccaagagagcccacacaaggcatagtgacataaaggacgataggaaatcatccaaaaggacaaaagacccaaccactttcaaacacactcttcgtacatcctacggcaaacccccccaaaaaaacttgctgttagaacactttacatgctaaaaacaaacccacaattccacagaactttattcttaccaaaaatgcaccctacaatccacaccacaaattacataacaccttgctctactttcaccacaataattacataactaaatgtgagagaaagcacattcgcgattatcgacacggagcaatgaaacaataaagtggcagagacataaatgtgacacgcgacaagcgcatcacgcaacaaagtgcgatacatataaacgagaaggtgcgccactaataacacaggacagagaaaatggaccctgtgcccccacaaactccagcatccggcgaagaaaagtacgactgagaggagatcgaccacagggatagacaagacaactgacaacatgtccgcgtagcgtggccacatcaaacagacgggaagaaagacgtgagcagcaacaacacacacaacgttgaggacgcaagatag

SEQ ID NO: 496003 - DNA, 661 bp, Homo sapiens
  misc_feature (54)..(54): n is a, c, g, or t
  misc_feature (64)..(64): n is a, c, g, or t
  misc_feature (94)..(94): n is a, c, g, or t
  misc_feature (119)..(119): n is a, c, g, or t
  misc_feature (143)..(143): n is a, c, g, or t
  misc_feature (280)..(280): n is a, c, g, or t
  misc_feature (347)..(347): n is a, c, g, or t
  misc_feature (387)..(387): n is a, c, g, or t
  misc_feature (398)..(398): n is a, c, g, or t
  misc_feature (443)..(443): n is a, c, g, or t
  misc_feature (461)..(461): n is a, c, g, or t
  misc_feature (495)..(495): n is a, c, g, or t
  misc_feature (498)..(498): n is a, c, g, or t
  misc_feature (503)..(503): n is a, c, g, or t
  misc_feature (658)..(658): n is a, c, g, or t
ttattccattttgaattatttgataactatttacttcacctccccacctcaaantgaatctacnactctaaaatgaatctaaaacagccaaggntggccagtactgatcctcattttcntgaagaagaatctcagcctgaaanaatatagagctaggtgacatatgggtggccaaccgcttctcctcaagttccaagagagtgggcaattagtgaaattccatcagtcatgttaaaatatactttcaccaggtagacatccttctttcaatgctagaggncagtgaaaaatgtagattaatgggatctgtaactgtcttctcttaactgtacacccctcaggctgancgcgggggtgctgaacacatgccctcggaagggaccctgnagacccaagtnacctgcaccataaaacccccccgggggtccgccatgctgccagcnctcacggggcagcagggncacctgctgggaagacctgggcgcgggtctgggngcntgggnctggctgcgtcctccacgtccttggggccaggtctacggcagggccatgatcttcttctccagcttctgtggagggaacaggaagtttttcatgatgtcatccagctcttctagggccaactgggcatggggcttgggcaagtaatcgggctccnggg

SEQ ID NO: 496004 - DNA, 382 bp, Homo sapiens
ttaacattcgtgtccgaggatgtgttgaaaggatgtggtgcttctcagatgattgatgtctcgacataagacataacccaggccttgggttagatctctcggtgtctacagaatgaacctgtctgatgtgtgtggtctctggcagttaagtccctggacctcttgagatcactttcttcactggaaggtctagtcactgggttggcttctaagctctgagatttagatagcaattcatagctaagtcttcgatataaaacacaggaaccaaaagtgtgaataaaatcttgactgtgctcaagtgtcctgtgaagtgtcctgtctccactctcaattccattctctgtagggtcttccttcagctgcaacaagggcctgcagt

SEQ ID NO: 496005 - DNA, 1113 bp, Homo sapiens
ggtcccactcttgattatcgtctccttgtgcattgtgtcgatcttctccgtcttgttctcctctcttttgtgttatgttcagttttttgtctctattttccgccgtgtccctgcgatattttatttcttcaattgcccctctctgtcccgtcacgcttcttggtctcttttgctgtcttcttttcgtcgtcctgtttctgtggcccgtgtcctttttgtctgggctaacaccctctgttgctactgtggttctttctggattcctgtcttgggttgttccttcccctccgtgtgtgctccgcgttttcttgcattctcgttgatggagctcgctttctcgctgcttctttgttgttattttctgtcttgtcctgtcccccctctctgcccccccgtgtgcttttcgtgtgctgattgctgtgttgtgtttgtcacttcagctgccctcccagaggcctactttcatagcagcctgtgggttggtcttcttgttcattgttcctggctgctccggtctctgtagggagtcctcgacctccgcctgaccttcggaccctattccccctctgggtggggtacgccctgctcgcacctgctcctccagcgattctgtcttcagccacgacccccttgccattgggatccagctccttccccttccgggtctggggtgtcagacatgagcataggctcaaggctgtgcaggcacatagttctggtggccttgggccttggggctcagccacagcctgacacagtgctcgaccttgatagcatggggccctggcccagtagattgctgtgaccgtgtccatagggccgtgcccttgcccttggagacctgccgtgcctgtgtcctgatggcccctaatgtcagggttctgcttcaggcttcattggaccttggcagcattagtccccatcccgggtttggctgagccatggctggagagctgctatgctaaacctcctgcctcccaataccagcaggaggttctgggcctctgacccccatttccccacaccttccccaatgcatgcatgcagccccagcgtcatgacagggagcattggcacactgattaccacagaggctggaagccacctagacac

SEQ ID NO: 496006 - DNA, 306 bp, Homo sapiens
tttgcccctttttttttaaaaaaacctgttggaaaacccggtgtttaatggggtttatatgaagttaacccggtttggatgcccctttccccccaaaaactggaaaaatagggggcttgtaggagttaacccccccccctttggaaggtaaagaaattggggggcccccctttatattttaatttttaatcagggccggttttgaaaggggatccccctagcccgctgatttttttttttttttaaaaaaaggggggggggaaattaatttaaacggttgtttgccataaaaaaaattccttttta

SEQ ID NO: 496007 - DNA, 944 bp, Homo sapiens
gcaacagtgtgggataaacagagtcacgatcagaggaaccccaggatctggtgatggcaggatggggggagagagagaaaatccacaaattccaatgtcacaaaagcaataaaacgaaactagaaagaacaaaaaggttttacaagaatgcaacaggaaggaaacaacaaaaggggcaaccaaccagctttagaagtctgggcgacttggtaccggagacgggtactacactttatcttaattcttaatttaaaaaccatgtttacaagttacaaccaaccttctatgaacaggttgaaaaggacaaaaaaataaaataaaaaagaggcgggcgcgaggagaagagggagggcgagaagaagaagagctcgagaagcagagagaaaattcccctaagaggttcgagatttaatttgtgggtccaaaagtattaacagaaaaaagccccaccttaaagggttagaagtccccctttgtggttcccccaagaagcgcgagaaggggggggttcccagggaggaaggaccatcgacgggggcacctggggaagaacgcccccggtggttgtgtgggtgctttaacccccgacgatgttagccttcaagggcgggacctgttggggtgttccgtggcgtgtgtcccccccggttcccactttttgtgtccccttctttggggcttctggcggtggacaaagggtctttagacccgccgtttttcgggcccggggcggtcactctccttaccaccatcccataggctagaggaggtgggcctcgccgggggaacaccccgattcgctacgaggagacgccccgtatatccggaagcgcccttgcccccgcaggtgaccgcgcgtgtctgtcctgtgttatgcccctcgtgcgagggaggtgcaggaggtcactcgtagacatctaaggtccttgacgtacgattgtaga

SEQ ID NO: 496008 - DNA, 184 bp, Homo sapiens
  misc_feature (139)..(139): n is a, c, g, or t
  misc_feature (146)..(147): n is a, c, g, or t
  misc_feature (174)..(175): n is a, c, g, or t
cgggctgcaggaattcggcacgaggctgaataaagatgatttaagcttcagagtgggtgctggaagcataagcttcaggtccaggaagatgggtttggatccagcctctgccacttgctctctggacctgaagcttatnttccagnnaccccactcctgagctgaataaagatnntttaagctt

SEQ ID NO: 496009 - DNA, 511 bp, Homo sapiens
ctatagactctcatttttcttagggtattaatgtaaactgcatttgagcatgatgacattccgctggaccctcagtttctttacggaggactaaactgtgctggtgtcatcacttacaaaagtgtcttgaatttaatggtcgttaatgttttatttgttgctcttttaattccatttttccacaaactttttgaagtcctcttgtatttgatgaaggaaagagttgatcaataatgtcagattttatagctcttataatgtgttatagtgatgattgcctatctgggttgtgagctccatgaagacaagaatatttctatatctctatccctaagcatagctagccctgccattagctgatatagtgactttgggtgaatttaggagactgcttttcttccaggtatttttctgctgcttcatagaaaattatgcaagtctttatgatgacaggataaatggcattcccttggagctgtgtaatgcataatttgtatgactctaatcactg

SEQ ID NO: 496010 - DNA, 170 bp, Homo sapiens
aggtaacataggtcgtaatcgctccctttaaatacgccatagccatatgtgacctgcatcctgcgtttgtggccatttttcccttataaaaacctcatatttctttaaaccctcataatacccccaagagaccttttcatgggtactgtgcccatagagatttctaaaag

SEQ ID NO: 496011 - DNA, 208 bp, Homo sapiens
aaaaactgttacttcactatccccctggggcactgtggcagtactcgagtgacgggggtctcggtggtatgcgattagaagaagtcctgctaggagtactgtgtgaggtgatcttggtggtcgtggttaccaagtttgttgtaggaactgtggctgtaactgtggtgaggaaagaggaagaggtgggtcgaagagaggtcacagtgga

SEQ ID NO: 496012 - DNA, 108 bp, Homo sapiens
cgtgtgcctagtacggatgtgtgggccatgtggatgctgaaaggagaactgcgtgcccggatgaagattccaagcaatatgtgggtagaacgcctggcgaaatcagac

SEQ ID NO: 496013 - DNA, 441 bp, Homo sapiens
  misc_feature (390)..(390): n is a, c, g, or t
  misc_feature (393)..(393): n is a, c, g, or t
  misc_feature (439)..(439): n is a, c, g, or t
gcaaacatcagcattgaacaggggaccttatttaaaaaacaccacattccatgaacccctttgaaaaaccctgcaagaatccaaaaataccatagggaaggtccccaaagttaccccaagtgatttaataagccttattaaaatattacaaggcagctgggcgtggtggcttatgcctgtaatccccagcactttgggagaccgaggtgggtggatcacctgatgtcaggagttccagagcagcctgtccaacatggtaaaatcccgtctctactaaaagtacaaaaattagctgggcatggtgcagatgcctgtaatctcagctacttgggaggctgaggctggagaatctctttaacccaggaggtggaggttgtggtgagcagaganttngccattgcactccagcctggatgacaagagcaaaacaccgtctatntc

SEQ ID NO: 496014 - DNA, 332 bp, Homo sapiens
caggaggtggaaccttgcatacatctagagttagcctcacaccggtatgcgctcatggtaccacctttggactcctgaagtggtctgcaggtcggcccaggtcgactggtcgttgcaattcaggatcgaaaaatccgtgcgcttccgggcgacgagccagataaggaaatttccggtggtgggcgccaagctgttgaccgtggactccaactgcttctactgcgacgaggccgtcgactcgcagctcatccgccagtttagctctctgacccacatgttcactcgctttcccgcttcgcagattttgtggcgggcgacagccgccattatca

SEQ ID NO: 496015 - DNA, 276 bp, Homo sapiens
ctattaaggctagcctatgcaattctgtaggaccaatgggtcccaaaggcagtaaacagtgtcacagacaacccctgctccctgtataggagtctcaaaagaaggccaagacaataagtgaaaagagggtctaggtcagtcctatacaggcaccattgttggtggttcagtctatgcgagccactacaagcccaggttagttgattctttgagtgctctttagagtcttctccacataaccacactggggacatcgtagacgcgcccgcgaattta

SEQ ID NO: 496016 - DNA, 243 bp, Homo sapiens
ggcaataagtagctctcagcagccttactcaatggtcagcacatgctggagtagcgaggataattatgattgcaatatctcagaagtcatgatctctatgtggtatagaacacgtggcagatgatccgccagcactagcagtcacgtaggacaacgccaaagctcccatagtgaatgacacagtgaatcatggcagataacgcaagaagacagctgtgcagagtgcatggtagttcgtgtcag

SEQ ID NO: 496017 - DNA, 285 bp, Homo sapiens
tttactctagacggatccctgcgggtctcttcttgaccctgtcttcgccttgggcaattggccgcaccagctgcgctgtcccttgtgggatggggatggggctgctgctattggtcagctcagctgacaggcctggggtttcaggatgatggtgtcgccttccagctcggagctcttgtagcccaggagcagatagtgtggccatcacctcgttgtctctctggcccaccagcgagtcctggactctcttcccgtgttctacacccatggacaccatcacgctct

SEQ ID NO: 496018 - DNA, 320 bp, Homo sapiens
tctctgacgaggagagaaggctatgaaaaccattgttaatatatagttagtgcataatttgaatgacttcctgtaaatgagtttttactaattaatatttttaatagggattctcagcgttcttcagaaagatgactttttttctgccaccgtatgtgtaatgtggcttctctatatttatgacttagagtcatgttttggcctgtgaagcacaataacctttctggagccaagttttgtcagtgctaatacatgccctttacagcccacattccttaattgcatcaaaacactcacctgataggtgagcagtcctcagt

SEQ ID NO: 496019 - DNA, 197 bp, Homo sapiens
ccaagttttccctatggatgatgcaaattccactgctggctgacccctaggaaccccatcccacaacctggtcagttcctgggcgcaggccaagcgcctcccaggcccaccttcctcacttccgtcaagctcaatggcagcatttgccccagagggaaaaggccaaaaccattaccaataaaattgtgaagttttcc

SEQ ID NO: 496020 - DNA, 625 bp, Homo sapiens
cagtactttttgcgcgaacggggtgtctggaatacaggggacttttttcaggtgtacgtgagcacccagggggacgaggaacaggtggttaggtaccatcagtcaaacgcttgggtgagtcacaggattgactgatgcggcgtgacgtcgaaagcgatatatagtaaagctggtgtttaatggtgccagaccacatgagtaaagaatatgttctgcaaggtttagaacagacggtggtcatgcatgccgaatcaactctgaacatactggaggctgacaatagactcgtgcaagtttcggtttctatggcgcacatatgacagaagtctctaacgtggctaaagtcaaagagaagctagttgcagtacttactggataatccctaagagtagatcgtcttactccgaggatgggcagtgacattgtttgtcagagtttggcatcagagcattagggcgtgctgcctgatagatgtatttagtagattagcgcctgacattgattccagcatgaatctatgctatatacgtaatgccatagttatgttccgcggaataaggaagctattgttagtcatggggtcatgctggatacgccttaacaactctgggggtaattcgcattt

SEQ ID NO: 496021 - DNA, 331 bp, Homo sapiens
  misc_feature (36)..(36): n is a, c, g, or t
  misc_feature (50)..(50): n is a, c, g, or t
  misc_feature (92)..(92): n is a, c, g, or t
  misc_feature (111)..(111): n is a, c, g, or t
  misc_feature (139)..(139): n is a, c, g, or t
  misc_feature (161)..(161): n is a, c, g, or t
  misc_feature (193)..(193): n is a, c, g, or t
  misc_feature (220)..(220): n is a, c, g, or t
  misc_feature (258)..(258): n is a, c, g, or t
ttttttccttaagtggagaacctttcacccttttcnccttaaaggacacncttcatgacttcctctttggcacatcaaaattgctaacatgnctactcttgcattttgggnccattattaagttaaataaggattgttncttgaacataagcactgtggtncccaacagttgatctgataatcaagatggctnctaagtgactaactggtaggtagtgtntgtatacagttacagcatggataagctggacaaagggntgaatcacatcctaggtgggatggagtgggacagcatgagatttcatcacactactcagactagtgagcatta

SEQ ID NO: 496022 - DNA, 949 bp, Homo sapiens
gcatctgatctctgcgggatctacagataccgatgcaggaccacctcgattatcatgaccggatcctatggcaactatgtgaacgttcaaacgtgtcgcgactgctctacgtcatatgggattgaggggacttatcatgttacataaatgtgtgaactatttgcaacgcgtgcttcttgtcatacttatactcgtggcccatatacgaaaaaccaacaacctgcagccagcggtcatttcaaagatcttttcatgttcagatactgatgccttcataagtggtggactacctcagaatttgctgcgtcatcattgtgtgatcttcgctgtggatcaccaccttctggatatagaatattacaactagtataagtgtcgatgtgaaccttgcaagcagctctaagtggcattctatactcacgaacactcctgtcataagacaatgttaggcccagtctgggttctggatctgctgtaataagatgaacgatttaagtgagccttaagttaacctgtcctgtgccctagaccttaaggaatatctctctgtaagtaggctgtggttaatattagacttcctgtaacaaccgtgaaaagaactgatgtgttccgatcatctgtgtagggctgtgattgtaattggaaactactagtattctgaaggtaaccacacagatacattcagcgaacgtgggcgtctaccaagtgggggacgggcccgacgagaactctcctgccggttcccacgcgaggggacgcctcgaataggaacggcccgggaagggcgggccagcaacaaggccggtagccggaccgaaacagacttgacaggcccactgggggggccaagacccaaggcgctcggacggaaggtccagaagccccggggggccacacccgtaaagggctggcccaccgggggaagcccaccgaagggccgcgcaaacct

SEQ ID NO: 496023 - DNA, 215 bp, Homo sapiens
tcaagtgcgagacatgggttccatgagtcctcggagaagggaggtttggctcaaatgaatgactcagtggagcaaagtctaggcggggtgcgggggagccaaagtatccgagtgtgtcaggggaaggcacaaaggtacggggcggaagttcgaattggggggttgagggcgatgccttctaagctgatgccaaagatgtcgggggatgggcctca

SEQ ID NO: 496024 - DNA, 188 bp, Homo sapiens
aacaggtggtgcacgggtggtatgtagtgggagtggagagtcgcctgctagcagagtgcacagactcatggacaagctgtgttagggcagtgcacctgtggctttgcaggtttagcccccgagcttgtctcagggactgggctgctgttgagtgcctgtagcttatccacagtggaggtgcaaacttg

SEQ ID NO: 496025 - DNA, 404 bp, Homo sapiens
  misc_feature (331)..(331): n is a, c, g, or t
  misc_feature (344)..(344): n is a, c, g, or t
  misc_feature (359)..(359): n is a, c, g, or t
  misc_feature (387)..(387): n is a, c, g, or t
  misc_feature (400)..(400): n is a, c, g, or t
atggcataacattacaagacgaggcaaaaatatttaacccccaaatatatttctttgccctaccttgaacttgccctgcagagtctcttgtgaggagaatccacatcctataaagaagcccctttcccctttgttttccttcctttctttccagtccagggagatcatcaactaagagccagggcaccccttttaagtcgataaggaaacagtttacaacctgctctctctctctctgaagtctgctgaggagcttcccctggcacaataaaacttgggcctccacaatcctttatctttaacctggaacattccttttccattgatcccnggggctttcaggntaaggttcaacccanttgtttcaaccagggaaatgttttaaantttacccacagangggg

SEQ ID NO: 496026 - DNA, 369 bp, Homo sapiens
  misc_feature (325)..(325): n is a, c, g, or t
acagcggcagtgctgctgcggttactctagaggactccccgctccaacatgtcggttggttaaccctagatcacaccctaaggtcagaggcgggggtatagaacggctatgaattgcccccaaggactctggcttccttaagcccttcgggcttcgtttatggtcttcattaaaagtatcagcctaacttggtcgctagacctagggagaaacctttaaccacaagagtttttactcatggaagaccactactggacgcacccccctacttggggggggactcgacgactggggtgaccctacgacggcttgagacctttcctgnggtgtggtacggacctcggacggacgacactccccgtggacctt

SEQ ID NO: 496027 - DNA, 192 bp, Homo sapiens
ttcaatctctcattgcggtagcctgtgtgttggtctttccatagctggctgtggtatcttgggacccagtggcaggtcaccacctgtatggggctgcagttgctcccccaccccattcctctaagagctagtagtggagagagaaccctggaagagcagcacgtgcttgcttgaaacttctctgaaggtcta

SEQ ID NO: 496028 - DNA, 317 bp, Homo sapiens
taattccttccttcctttggtggtggggcaggacatgtatgtggtggttgctgttcgatcaatcaacacttgcatgtggttcactcgtgtccttcccagttttccttcttaaaaactccatcacagtaactcagtgcgcttctcgtggtggtcacgttatattggggcattcggatagataccaacgtgtctttttcaacatgtgttgtaaacggattgccatttggccattcttttcctcattatttggcgggaaagggtccccaaattaacattaaattaggtaggtattcggcttcctttgaaaaaacaacaag

SEQ ID NO: 496029 - DNA, 135 bp, Homo sapiens
gttctagaggatcccatagcacatgaatgaaaactagaagcaaaacaaacaggaaaccatctctacattttttttatctcaatcgaccctgaatgctacagcattatccagtggcctgcagaaaacacacacggt

SEQ ID NO: 496030 - DNA, 167 bp, Homo sapiens
caacgacgcagttgcgccatctggcgctggtggtgtattaagggctgatcaaattgtaaatcaaaatttaccacctcctcctcctgctcctggatctcctgctcataatactctacaacaacaagctcctgcagctaagccaggcaaaaatttatatatggcaataa

SEQ ID NO: 496031 - DNA, 1504 bp, Homo sapiens
  misc_feature (1)..(1): n is a, c, g, or t
nttcgtggtgtggcgtgtgttgtgggttctgtcgtttgtgtgtggcgtgggctcgtgagtgttgtgctgtggttctgcgtgcggtgggcgtgcgccccgctggtggggtttgtttgtctctcgcggtgacacgcgtgggccgtgtgcgcaggccccgtggccgagacgggggtttgcgccgccttgttttcggtctttggcgggcctgggggcagtttcgaccagggtgcttccactgttggggttccctgcccgtgttggggccctatggcctttggggggcctttcctggtttttgggcgtccatggaccggtggcgtgtgtgatgggccgccggccccccggtcctggggctatcttcctaatgttgcgagcctagaagggtatggtatggggccccctttaaatgtgttttgggggaatgctcctttatatgggtctttgttctctgttagtggcctctgtcattggggattgtcgacatggggttcgcatggagattttgggaggatataatagccaagccaggggctgtttaactcgagtcctaaggggcccgtcgcactggtgtatatcgtcggtattccccggaagaaacatacccgtgggggctcctaagggtattgtttaatagatagagcgctatttttgtggaataaatttgggcccaataagatggaacatgcggtgggcccaaagaattgtggttttgggcccgaataggggtttttatgtggggaggaattctttgtgggattttccaaccttctccagggtagggcccccattggcgcatactcaatgggcgcccgccgaacacattgggtgggggtctcctagttggtgtgtatatagccctggtgatggagtactctggggggcgcacaaaggatgtggggtgttatattgtgatagagatataggtgtaccacacagatatctacgcggtaacacgcctttggggaaaaatttcgctgttgtggcttctgtttgggggggtatatttggggggatgtcgcgccctcactttatagacactcttccctctggggatagttgtaatgtttcgaggagcccccacgctgataactgtcatgtctcgggtgatgtcctcggtgtaggctcgtgaggaaatagggattcctgggaggagagacactgtggataccacctcgtgagatgtcttatgaaaaggggtgaaatgtgttggtggaactctttgttcacagaggtgttgctctttaagtgtcctcgtgaggtggagggaactgagtgttatgagtgcacctctcggagaagagtttgtgataagtgtgtgtataaaactgcacgttgtataatagtgtctgttttccatgaacctcgttatttttgccacgagactttaattcaccacagatgggtttttaacttgtcagaatttttttggcaatcacagacctggggattaaaaccccggatggcactttattatgaggctttttaaagaatcccataattccta

SEQ ID NO: 496032 - DNA, 164 bp, Homo sapiens
cctccaccagtagcgctcactatacatctttggacaacctgctcattgaaccgccagtaaactgccctgctgactgcactctgcagtgttcccaatgctttcactcttatctaccctttgcacttatcttgctttatcaacataataatttatacacttctccc

SEQ ID NO: 496033 - DNA, 187 bp, Homo sapiens
gggtgaccagaggatcccggctccattcatcgcgtcttcttcttcttttcttcttcttctacttcctatcttcttctccttctcctcctcctcttcttcttcttctttttgagtttcactcttgtcgccaggctggagcacagtggcatgattttggctcacggcaacaagagtgaaactcaaaaag

SEQ ID NO: 496034 - DNA, 100 bp, Homo sapiens
ttaacgttccttcacacattcgcctacattcctaagagagttgattacgcttccctcacgtacgttcacgtacgccgttgcctaagagactagtcgacaa

SEQ ID NO: 496035 - DNA, 81 bp, Homo sapiens
ggagctgaaaggccataaattgataacacatccttgattcctctccttcaggccacctctctgtatcaagtccatcagtga

SEQ ID NO: 496036 - DNA, 259 bp, Homo sapiens
agtgtcccatgtggcctctccggcgccgctcctgcctttcggccgcctctcgcggcccagctcctcctgcctccccgtggcctctttctggccccgccccgctcatgcctcccggcggccttcccaagccccgcttttgcctttcggtggcctctgcaggcctcgccacggcccagccttctgcctcccgaaggcctgcacaggcccagcctctgcctcacagtggcctctccacgcacagctagctgttgcttcactg

SEQ ID NO: 496037 - DNA, 939 bp, Homo sapiens
  misc_feature (660)..(660): n is a, c, g, or t
ggacagttttctgacaaacgcagattagaagccaggttgcaaggcatggtgacagaaacgacaatgaagtgggagaaagaatgtgagcgtagagtggcagccaaacagctggagatgcagaataaactctgggttaaagatgaaaagctgaaacaactgaaggctattggtttactggacacttaaacatgtggaagcccggagagagcctctcgggcgaggcgcggatcgtcgaagaagttagtcacatcgatcgtatctgtcctctcaacttcatcctgttgcctttactcttctcaaccctgatcgagaacgcaccaccaattcgtctccgacacagacgatcacgctctgcaggagacagatgggtagatcataagcccgcctctaacatgcaaactgaaacagtcatgcagccacatgtccctcatgccatcacagtatctgttgcaaatgaaaaggcactagctaagtgtgagaagtacatgctgacccaccaggaactagcctccgatggggagattgaaactaaactaattaagggtgatatttataaaaccaaggggtggtggacaatctgttcagtttactgatatgagactttaaagcaagaatcaccaaatggttagtcgggaacgaagatcttcccacaagtagcancttgccccaacccaggatggtgcagagtctgaatggccgatgtagaaacaggtggtctgtggtgggggagataagaggcggatcccagtgggacctggtatagattcagcaaaaccaagggaaaagctggatgggtccagttgaagaccttcttgtgtgggtattcgaagcagcgaagagtttcaggcacttggaaccagttggtgaccggcccgatcacagcacaaagtttctgttcaatttcactttgttggattaagagactccgatctgatatag

SEQ ID NO: 496038 - DNA, 772 bp, Homo sapiens
cgcggttcgcaggtcgttcgcttgagcgtctctgcttagcctgggcgtgtcatgagccggcacagccggctgcagagtgcaggttctgagcctgtaccgcgatcttgcttgctgcgccggtgtgctgttggtgaatgcctgtgtgctgccctgatgtgcgtggctggaattttggctgtgtgccatggatggtttccctgtgcatgccatttgcctggtgcctttggccccgtgggcttggtggtcccctggggaaacccctggggttttgggcccttttggccttggcccaaagtttccatgtggggacaacggggtgtttataagcccgcgcgatgtatagtgcgttttaaagccccctcgcgtgagaccgccatcgggaccctgcggctggtacgggcccttggggtggtcgctgtggccgccctattgcggtctttttgtgggacctaagtgtggggcgccccgttttgctgggcctctttaagcctcggccctttccccacagggtggggggatgggggacacaccggaccacacgaaaaaaaacgactgccgacgaggggtgcgacgcccctgacacacaaagataaaaagcgcctatcccctggagtggtggatgatcgaacgagccccaaaaaagaactatttttgtggcggacacgagacacaacgaccaccacagtgagtgagggtcgacacgcggcgcacgaactatatatgaattttccacgacgatgagactcatttataaaaaacccccagatgattc

SEQ ID NO: 496039 - DNA, 132 bp, Homo sapiens
gactctagtggagccccgctccacccgacggggtggggaaaaccaaaataaaacgtcaaataaattgagttgaagtacgactgtggagaagagatcctgagggggtgctgtctgccatgacagaggaggcag

SEQ ID NO: 496040 - DNA, 479 bp, Homo sapiens
  misc_feature (1)..(1): n is a, c, g, or t
  misc_feature (3)..(6): n is a, c, g, or t
  misc_feature (275)..(275): n is a, c, g, or t
  misc_feature (277)..(277): n is a, c, g, or t
  misc_feature (376)..(378): n is a, c, g, or t
  misc_feature (405)..(405): n is a, c, g, or t
  misc_feature (446)..(446): n is a, c, g, or t
ncnnnnggggtgtgggctacccttgaacaatgatcccctggtaatattgggacctattttcatggtctggatggaaaggcctctgatatggtttgactgtgtccccacccaaatctcaccttgaattgtaataacccccatgaatcaagggtggggccaggtggagatcattgaatcacgggggcagtttcccccatactgttctcgtggtaatgaataagtcgcatgagatttgatggttttataaatggaagtacccctgcacaaatcctttngnctgatgtcatgtaagacatgccttcgctcctccttggcttctgccatgattgtgaggtctgcccagccatgtggaactgtgagtccactaaacctcttnnnctttataaattacccaggcttgggttntgtgttttaccagcagggggtgaaaatggacttaatacagnctccaaagatgataaggcctcccaaaactcaac

SEQ ID NO: 496041 - DNA, 137 bp, Homo sapiens
ataaaatcatgtggacacagaattgatccaaacaatgtaacttcaagaaaatgtagaaaagtttatacaggagtaatgggctttattctcttggatgaaaactcagtattttggtgtaaactctatttgaacaattt

SEQ ID NO: 496042 - DNA, 243 bp, Homo sapiens
tacagagtcatccagcaagtgagagaatctggctctgtagaccaaacatacagtgtgattattgtagtctgagaacacaccaccagatagcaggttacgccatgtcaccgagccccattgattcccagaggatcttagtcctggaaagtcaggccaacaagcaaccgttatgcatcatgttatctacttaacgtattaacaagttttcattttctcaacagtttacaatccatgattatttcc

SEQ ID NO: 496043 - DNA, 381 bp, Homo sapiens
agcaggttcccctctacaatccccacgatcacggcagcccaggcagcgcctgtgtgggtgttgcactcctctgcatgccctattgcagacatcatggccggcagctagtggaatcccactggccacgctggcagccggtcacagcgaagcccaaaggcaccagttcgacagacacattgcccactggtcttttcacagagactgctgagtgccccctcgtggctgcactggcagtgcttgacagcctgtggggccaaagccatagtagccaggggcacagaggtcacagcggcgcccaaccactccaggcttgcacaggcactgaccaccatgagggttgcactcagaactcagtgaaccttggtgatcgtggggttgtaa

SEQ ID NO: 496044 - DNA, 402 bp, Homo sapiens
ctcggtaccgctctccgtgagatcccatggacgaggacggaagtatgcagacaacttgattttcaaaacaggcgagacggcagagtctggaaaccttaaatgcagagcatatgttgatgtttaacagattattaaatcacattttcaaaaagatggattggagtcacttagaaaaagtggagatcagtatctagtattactcatcttcagttgacctcgtttctttttccatagttactgaacaagtgtatctggacatgccatagataggacacatctgctctggcagaatatataacaaagtgctatgtgttctactcaagatggacagatgtgttggagttcctgttggctcagcggtaatgaacccgactagtatccatgagtactctggtttgatcc

SEQ ID NO: 496045 - DNA, 286 bp, Homo sapiens
gggacagtgtctctcacccagtctggaatgcaacagcgtggtctcggctcactgcaacttccacctcccaggttcaaaggattctcgtgcctcagcctcctgagtagctgggactacaggcatgtgacactatgcctggctaattttttttgttatttttaagtagagacggggttttgccatgttggcccaggcaggcggatcacttgaggccagaatttgagaccagcctggccaacatggcgaaaccctgtatcactcttttagacccttctgtcgtcttctc

SEQ ID NO: 496046 - DNA, 124 bp, Homo sapiens
ggggggggggggtttttccccctttttttgggggggcccccccctttttttttagtaaagaaatttacctccccgccccccccaatattaccatatctgtttgagggccccaccctttttttta

SEQ ID NO: 496047 - DNA, 936 bp, Homo sapiens
ggttgctgtgacagtgaacaatggaggggtgtgtgtctaatctaatgtggtctgcaatcctggcctaacagacgtggaatggcctgataagatgtggaaggagagtattctggccgataaatccctggctactagaagtgagcaggacagcagaactgctttgctctgggcatgctcagctggacatacatcaaatagttgaagtgtctttgtagcgacttgtgagtgccatgtagcatatgatcagatagacgagtgcaggtatgtgctctcctgttcatattgctggtttctgctggccgggatgagattgtagaagcgcttcggggaaaaggtgctcatgtgaactggtgtcaattccagtaggaatggctgtactcccttacattatgcagtttcgaaaaatcaggcttgagatcgctgtcatgtaacatggaaggcggggctaagtccagatgctagggaccattatggaggctacatgcgatgccccggtgcagcagcctagggtaacttgcaggatgattcgatttccttctgtactactgtgttgttccacaaatgtgcaagactctgtaaggtagcattcctctacatgttagtgctgtgatgagggagagagtgccaagaaagccaaaactgggggtggtgccaaggacgcaagaatgaccgttggggaataacggagagaaagacacccctgcgaggtgggcaaaggtggctggcgtaatcaccaagagagggcgccaaggtaaccgcgttggatattctaacgtgatgtgggtgtctggcccgggccgccaccaggttgggggcaagaacacactggacgagagaggtcccccaagctaaacaggggctgcccacgggaagcaaccacgggtccaacgaaacggaagcccgggacaacacaaaggggagaacacagagggggcg

SEQ ID NO: 496048 - DNA, 250 bp, Homo sapiens
  misc_feature (3)..(3): n is a, c, g, or t
aanagagacagactgtctcctcaatgtgggttccccgtgactcctgactgggagaaacctcctgagtgggataaacctcctaacagggtgttgacagacacctcatacaaaagggctccagttggcattgggcgggtatcctcctgggatgaagtgtccagaagaaggagaaggcagcaatctttgctgtcctgcagcctttactggtgacacccaggtgaacagggtctggattggaactccagcaaac

SEQ ID NO: 496049 - DNA, 978 bp, Homo sapiens
ggctggtcacgaactcctgacctcaagtgaggtcacccgcctcggctcccgaagtgctgggattgcagatgtgagccaccatgtccagccaagaattagtatttaaagttgtacgatactctttttgtttttttctttggagagacgagagtcttgttcaatcccccatgctaaagtcgcaggggcaatgtttctccgcgcctcactggcatagtgcccgccttctggggtccaagcctatactcctgcctcaagccttccaggtacgtgggatacacaggggtttgtacccaccataccaagtggattgcgggtgttcttccatgtaacacgcacgggggtttcaccggtgttacgccaggtgtgatcttgaacctcctaaagcctcaggtgatcttaacttcgcctcagcctcccaaagtgtcgggagattagcacgattgtgaggcaccgggcccccagatttgtgagtcgctctaaacccttctgatcctatagtttctctctccaaaaatacgtctttctaggttaaaaacaacaagggctctaatattggggcctgtttacagtgcaagggttccaaggtccctcttggctcaccaagtagagaacgggtccctggggtgcccaaggttggtcgtcaacatcctgggcaccaaaaatccctcggtttggcgctgccaaggtgctaggttgatatcggggcggtagccccaaacccgggtgtaaaaagttccttttctcgccccttgtttttacaagtaggcggcgcaaggtgctcgtggaagggcccattcgcgtaaaagtgtatggccgcggttgtagcagtaatctggcgctcgcagacaaacttgtgttgaggtggtctccccgtgaaaacataattccgtgtgcgccgcacctgttgcgcgaacacaacataacataataacgaagtcgatgtatggtagcacgcattagataagatacgcacatgcg

SEQ ID NO: 496050 - DNA, 104 bp, Homo sapiens
gagccggacccggtcccatgcacagttggtgcatggtggtcctctggagctctgttcttctctatggtgccctgggctcccgttggctctatgtagtatgtgta

SEQ ID NO: 496051 - DNA, 373 bp, Homo sapiens
atcaagcatgatatatgggctttcatggcgaattgtattttaactgtgtctatggttgctggaaatgttgcgtttagtttataaaaccatgttttaagtatctacaggaactatagattagaatctaatgttgcattagtcttttcaggtatcttctacctcctgtatttcctactgtaataatgtaatttacggccttccacaatgaacagttcactttattccctgcgttgtctatgaacagttttaaggatatgacttggttaaaaaataattcggtatcaaaattctgtttgccaattaaactggagtatccacagtctcggccatgatttgtgagataatatggcatgcccggagccctgctcatctg

SEQ ID NO: 496052 - DNA, 369 bp, Homo sapiens
  misc_feature (59)..(59): n is a, c, g, or t
  misc_feature (88)..(88): n is a, c, g, or t
  misc_feature (114)..(114): n is a, c, g, or t
  misc_feature (175)..(175): n is a, c, g, or t
  misc_feature (200)..(200): n is a, c, g, or t
  misc_feature (286)..(286): n is a, c, g, or t
  misc_feature (289)..(289): n is a, c, g, or t
  misc_feature (323)..(323): n is a, c, g, or t
  misc_feature (353)..(353): n is a, c, g, or t
  misc_feature (358)..(358): n is a, c, g, or t
tcgcccaggccggggtacagtggcgtgatctcggctcactgcaacctctgcctcccggnttcaagcgattctcctgcctcagcctccngagtaactgggattacaggcacctgncaccacacctggctaatttttgtattttttagtagagacggttttgccatgttggccagantggtctcaaactcctgacctcaggngatccacccgccttggcctcccaaagtgctgggattacaggcatgagccaccgaggcctgtgttagttttatgagaaaaaaatganttntaaaagaggctttaaagaggtgaattgtatggtnttggaattctaatagtgctgttaacaacancaaanagaccaaaaat

SEQ ID NO: 496053 - DNA, 275 bp, Homo sapiens
atttgggttctttttttatttccccaacctctaaccacattcaatccaggacccaagctcaaggaataatgggaaaaatggggtaaactgtccctggaactttatcaatattgccttaaaaaacaaaagctcatcaagggtggaaataagggatccttcagttaactttgctttcctaaaaaaaattttcaggttttgataagtcatccctatttttatcttggatcaagggcttttctacagttacataataaaatgaaatgctgtccaggaaa

SEQ ID NO: 496054 - DNA, 166 bp, Homo sapiens
gtacctgtggggagggggaggttgggcacctcttggagggacctcctgctgaagggtggtcagcctgcctgacaattggaaggacattacttgaatggggagcagggtatgtgcttacatttgaaaaagagctgatgttaaaactcatttggtgaggtcaacgttg

SEQ ID NO: 496055 - DNA, 190 bp, Homo sapiens
ggatcccaggcaggagcgtcatgtcagtccaggttggtcagtcactctatagacatcaaagcatggacatggcatcgaggcccttggggatctagatccggaatcctcatctttattttttgtattttttatttttctctttaagagacagagtctggctcggtcgtacaggatgaggctaggggcgcgg

SEQ ID NO: 496056 - DNA, 128 bp, Homo sapiens
tgtatgcagaggtgctctctgcggatacgtggagggccgcgattgctgtggttgcacctccaagaaggatgctccacagaattcatgagcacatcccgtactcgtggacatgcagttcctctattgcc

SEQ ID NO: 496057 - DNA, 444 bp, Homo sapiens
  misc_feature (380)..(380): n is a, c, g, or t
cgcatagacacaaagggagtacatcctgctttaaagatgatttcagtagacttgcgggatgcaagattgtcacaaaacttcaatttttaaaaaatgcactatttgggaagcacaataaatcaaagtggtataaaatgaggtatgcccttatacatacagtggaatattattggccacaaaaaagtgatacttccatttgtgacaacatgggtgaaactggaggaaattatgccaagtgaaataagacaggcacagaaagactagtatcatatgatttcacttacatgcagagttgtaaagaattaaactcgtagaagctgataacaaaatagtggttgactagtgttcaggggtgggagaaatggggagaagttgttcantggttgcatattttatggtttatgatgaggtcagatcttgttcagcatgggtggtgattgggtc

SEQ ID NO: 496058 - DNA, 2634 bp, Homo sapiens
ggtttatcctaaattactcaaccccttgtagccttgacaaattttaccttaaaaccaaaatgaaacacaaaaattaatccttaataatgatagcaagtgatctttctttttagttttagccttcctttttcaatagtaatatttaaacccactcttgaccaattgtttgcccaaatattcttgtcatttggagtcagtggaaaatccagcacaccaagcaccagtcttcttctgaggcaaaagaaaagtgttgtcattttcactctgttggagctgcacactttttttctttttctttttttttttttgtcgtgtaagaaggatgctggtcagagctgcagaaaatatgaggcaattaaaagtctttagctgttagcaaacctgttagttttacttctgcattgaaccagcctcagaagctacttactgctttatgtactctttgggcattaatgccttctctgtaattatatctcgtttttgcttgacagtgacctagccagtaattgcatcgtgcattgccatgaaaggtaaacacattgtgaactgaacttaccaagcagattctgtaagaaagcgctggttgaggctgaacactgttgacacatcatttttattggaagagtattaactggtgcctcttctgaaacacaccaacccatattcctctgctcccccaaagctgtttctgatcctgctgggagcaactaactagttattatgcacatctgctccagacccagctctttaacttcacggttttacagcttgttttttctttttcttttcttttcttttttttttttaaaaaagcacctttttttgttgtttccccttaataaaagaggtttctaatttatgtttctctaagatttcctttggttgtatttagaaacacaaatagttttataatcaggattgcatttgtgctgggtaaaagaggagagctgtgctttctaccccaaagttgttggtaatggagccggtctgcccttcctacaaactcaagaggctcattgttcaaggtgtaacaacatttaattgcatgtcctctaacgctttgaaacctttagagggaagatcctcattttttacaattttgttccttttcatcatagaaaacatgtttaagataaaatacaaactttacctaccccaaattcataaagtacatttagtgctgtatagcactaaaacttagagatacagacactgtacttactttttaagaattagagacagtaactccaaaaataattgtccttttttctttctttttttttttttacaataaggctcttgaaaattgtcattacttgtgttttcctatacattcatctgtgtgaaagcctttttcttctttgatttaaaaaaaattatacagttaatggtttagaacttagaactacttagaattaatgctaaagtgtcaggaagaaattaatttagcttcaataattgtgactggcctcaggaattctcccttccacacctgcccacctcacctcacctcacctcaccgcaccgcaccgcaccgcaccgcaccgcaccagagccagagcagctgcttgtctgcagcaggacacggttcctacatacgtttcagttctttcatggtaagctcaatggacctttgaattgtttacagtgctgtatgtccaattgttaaatgtaccattctgaacgatgttaaagcaagtgtggtttatttatggcatgaaccatgtaacttgaaatatgaacttacaaggaggggcactcattaggtaacaagttcttacaccaaacttccttgatgaaataagccaaaataatcctaaaattcattagaagaacttgataaaagactcaaataaatgttagaaagagcccataattttaggactcctataaaattcttccttgtttgttaatgctattaaaactcagattcaagggaaataccagcttccacttgagtcactttgaaatagttaattcaacagcaccatgttagaaatatattggcagccaagactctgaactctgcagaaacatttgtttcacccagacttcaaactctagccctgactatgatgcccctgtgtgcatttacaataaagactccaacggagggagcctgttggtgttaaattgtttacatttctttatacaaataatgtgctttcagtgccttagttacagctccctttctgtttcttgttccaaggattctgtagtatgtagtgtgtttcttaggtaaagtctcttttgctactgaaagggaaatggtctctaaacactggtcactgtagcaggtaaacactactctaacgtggagaaatgagcttcatgctgaggtagtggttgccttagagctgttatttatgctgtagaaaacgaaaatggttttgctacctgataagcttcagattagatatagccctaaagttatcctgtacctgcattaaattttcattttagaagagaatcttggttttggtaattcatttttttttaagatcattatgtgcaaaacaccaagttttaaaaataactcacagaatggccttagttttcaatgtctgatggtatatttgtgagttgtgttatctgtaatatacatcccagaataaaggagtgaattaaatagtt

SEQ ID NO: 496059 - DNA, 212 bp, Homo sapiens
  misc_feature (121)..(121): n is a, c, g, or t
ccccccatttttttaggggaaaaaaaacctaaaacctggggaaaaaaaaaaaggttagggtttaattaaattttggccggttttttgggaggtttgacccggaatttgcccctttggtttncaagggtttccaaaaaaggggccccccccaacttcagggggggggaggttttttccggtggccaaaaaaaccttggtaaagccttttggga

SEQ ID NO: 496060 - DNA, 660 bp, Homo sapiens
tgggcagatcacctgaggtcggaatcatagtcagggctagagtttgaagtctgggtgaaacatttgtttcacccagacttcaaactctagccctgactatgatgcccctgtgtgcatttacaataaagactccaacggagggagcctgttggtgttaaattgtttacatttctttatacaaataatgtgctttcagtgccttagttacagctccctttctgtttcttgttccaaggattctgtagtatgtagtgtgtttcttaggtaaagtctcttttgctactgaaagggaaatggtctctaaacactggtcactgtagcaggtaaacactactctaacgtggagaaatgagcttcatgctgaggtagtggttgccttagagctgttatttatgctgtagaaaacgaaaatggttttgctacctgataagcttcagattagatatagccctaaagttatcctgtacctgcattaaattttcattttagaagagaatcttggttttggtaattcatttttttttaagatcattatgtgcaaaacaccaagttttaaaaataactcacagaatggccttagttttcaatgtctgatggtatatttgtgagttgtgttatctgtaatatacatcccagaataaaggagtgaattaaatagtt

SEQ ID NO: 496061 - DNA, 102 bp, Homo sapiens
  misc_feature (16)..(16): n is a, c, g, or t
tgtgggtagcagcaancagcataggggttaggagatctacagaccagtcacgacctggcctttcattatcaaaagtcccaagcaatataaaaacctttcttt

SEQ ID NO: 496062 - DNA, 1214 bp, Homo sapiens
  misc_feature (445)..(445): n is a, c, g, or t
atgtattgtaccaccgcctgtccgatcgtgccgtccggctcagttcaacgtacactgtcgacgtcgatgtagattggcactgtgtgacaatgcaattcgtcccgcacagagatcggaggtcggcaacttctgtcccacaagcactgcaggaccatcgacacttggcagttgtgttggctagtatcagaccccgtggaatagcacatgtagagactaggacacagagcattgggagttcccgtcccggggacatgagacatcaacgctccgcatgtgtaaacactatactggcatatggtgagagacacaagggcacgtgatagatttccgaggcgactgagcacatgacacgtgcgggcttgatcacacggacgtaacgctgttgcggtgatcataatgcacgtgcacagagagacctgatgctaatgtacttgcttccacgaangttattcgcacctttatcgggtaggcccgaacgtaggggggctacgcccacaggaggtcattcaatacgcacggagctctactattagctcaaacttacgtgccagtttcgtttctgaagctgttggggtaaggcggtttccttgagacacatctggtggtgcaaagtagtaactaagagcaaattggagtccttacacattcgcgagtctcaagacttatctcccattggataatccatttttggggtacagtacctatgacttcttacttcgccgacatgtggtggacattcactgggggttttgacccctgttcaccaagaaaaccacatttggtttgggcggaacccactttgaaagttacccctacttaattggcgaatagacctttaatatgccacctgagggacttagattatatcggcaaccatgcacaagtctatacttggataaatataggaacctaatttcatagattcgcatgatatcctttgaagaaatggctaggtttccgtggactttatccttaccaaagctatggaatgccgttttacaccggatacaaccaccgtccatggataaaatcgcgtccctaatcacactccccaaatataccttgggcgttctgagttactatgttgtatatataatttaccctgtttacaacaaactcatctattttgccccatataaacacttgcatcccacaaggattcacccttccaagtatattgaacaccacctaagaaacccaccaatttatcccgg

SEQ ID NO: 496063 - DNA, 108 bp, Homo sapiens
gacacagcttatccaagagagagatgatatagtgctgcaacctaacgatatgaatacaagtcagctggaatcgagcagattcagctagctgaaaaaatatattcaatg

SEQ ID NO: 496064 - DNA, 915 bp, Homo sapiens
  misc_feature (59)..(59): n is a, c, g, or t
  misc_feature (61)..(61): n is a, c, g, or t
  misc_feature (89)..(89): n is a, c, g, or t
  misc_feature (94)..(94): n is a, c, g, or t
  misc_feature (96)..(96): n is a, c, g, or t
  misc_feature (277)..(277): n is a, c, g, or t
  misc_feature (279)..(280): n is a, c, g, or t
  misc_feature (284)..(284): n is a, c, g, or t
  misc_feature (300)..(300): n is a, c, g, or t
  misc_feature (307)..(307): n is a, c, g, or t
  misc_feature (313)..(313): n is a, c, g, or t
  misc_feature (315)..(315): n is a, c, g, or t
  misc_feature (326)..(326): n is a, c, g, or t
  misc_feature (337)..(337): n is a, c, g, or t
  misc_feature (353)..(353): n is a, c, g, or t
  misc_feature (362)..(362): n is a, c, g, or t
  misc_feature (366)..(366): n is a, c, g, or t
  misc_feature (399)..(400): n is a, c, g, or t
  misc_feature (407)..(407): n is a, c, g, or t
  misc_feature (418)..(418): n is a, c, g, or t
  misc_feature (423)..(423): n is a, c, g, or t
  misc_feature (428)..(428): n is a, c, g, or t
  misc_feature (431)..(431): n is a, c, g, or t
  misc_feature (441)..(441): n is a, c, g, or t
  misc_feature (492)..(492): n is a, c, g, or t
  misc_feature (534)..(534): n is a, c, g, or t
  misc_feature (546)..(546): n is a, c, g, or t
  misc_feature (553)..(553): n is a, c, g, or t
  misc_feature (564)..(564): n is a, c, g, or t
  misc_feature (566)..(567): n is a, c, g, or t
  misc_feature (580)..(580): n is a, c, g, or t
  misc_feature (582)..(583): n is a, c, g, or t
  misc_feature (588)..(588): n is a, c, g, or t
  misc_feature (591)..(591): n is a, c, g, or t
  misc_feature (606)..(606): n is a, c, g, or t
  misc_feature (608)..(608): n is a, c, g, or t
  misc_feature (611)..(611): n is a, c, g, or t
  misc_feature (624)..(624): n is a, c, g, or t
  misc_feature (628)..(628): n is a, c, g, or t
  misc_feature (641)..(641): n is a, c, g, or t
  misc_feature (643)..(643): n is a, c, g, or t
  misc_feature (648)..(648): n is a, c, g, or t
  misc_feature (650)..(651): n is a, c, g, or t
  misc_feature (656)..(656): n is a, c, g, or t
  misc_feature (659)..(659): n is a, c, g, or t
  misc_feature (663)..(663): n is a, c, g, or t
  misc_feature (668)..(668): n is a, c, g, or t
  misc_feature (671)..(671): n is a, c, g, or t
  misc_feature (692)..(692): n is a, c, g, or t
  misc_feature (698)..(698): n is a, c, g, or t
  misc_feature (702)..(702): n is a, c, g, or t
  misc_feature (709)..(709): n is a, c, g, or t
  misc_feature (716)..(717): n is a, c, g, or t
  misc_feature (727)..(727): n is a, c, g, or t
  misc_feature (768)..(769): n is a, c, g, or t
  misc_feature (773)..(773): n is a, c, g, or t
  misc_feature (778)..(778): n is a, c, g, or t
  misc_feature (786)..(786): n is a, c, g, or t
  misc_feature (794)..(794): n is a, c, g, or t
  misc_feature (798)..(798): n is a, c, g, or t
  misc_feature (809)..(809): n is a, c, g, or t
  misc_feature (818)..(818): n is a, c, g, or t
  misc_feature (851)..(854): n is a, c, g, or t
  misc_feature (861)..(861): n is a, c, g, or t
  misc_feature (876)..(876): n is a, c, g, or t
  misc_feature (879)..(879): n is a, c, g, or t
  misc_feature (900)..(900): n is a, c, g, or t
ccccctcccatccacttcagtaccagaaaactaaatatccaagaattcctgggtaaaananacaaccactagatagatataactaacgnatttntntaagctgtatagttcttcatcaaatggaaatcggcaaccacatgaaaataacattaaaaattagtgtgggcatgaagtatggaattttaaacatcagtttactatgctgattaagtcaacatttatattttcatcagaacttaataatcccataaataaatagagctctcagttatttaanannatcnagggataacatatgtntttgggnatattngnggcgtaaaggngtatgcttcancacacttattgggggnacgtctganaatnttactacactgaattgcaagggtatccaaaggnncccgacnaagaagtaccncagangaacnacnttacagggantttcaaaaaagaaaagggggcaaataggaaataggcctcaaattaatttgncaaaagtcacagttgtttgccgccaaacaaggtttttctctnctctccacctgnaaaaaanaaaagtctcangnnatagggttgaatnanntaaanacngaaaagttcactccnangtngaaaaaaaatggngaanagcccgctttggngnacggntnncacanggnggangtcgngtnggtatgtagcctaacatttcngcctgngtgnagttaanaaaaaannaatcccgtgnacatgcatgcctgatttccactcaaaggggatgtccggatnnattnacacnacaaccangggagtcntganaagcgtgttgnaacgataanaaaaaaaaagaattgtttgtgtagattgccccnnnnaaaaaancatcattttggcatnganattcaagttttccacttttcncaatttttctttttt

SEQ ID NO: 496065 - DNA, 185 bp, Homo sapiens
  misc_feature (16)..(16): n is a, c, g, or t
gccctataatcacatngcagtgcctgggcaagagggcccgaggaaacgtcttcatgtaccatgctcctggaagaactacgggcatggcatgaaatccgaactacccttatgagttctcagggaaagtacccacagtttgcatacccccgggcctgactttgtaccccgtgctggtggagagaagt

SEQ ID NO: 496066 - DNA, 113 bp, Homo sapiens
aggggcacgctcctgtcggtcatgatgctgatccacttgggaacatcagttcctttcctcttcagtccgcagcgtcatcagcagcatccctgcagccatcttggtccaatcca

SEQ ID NO: 496067 - DNA, 897 bp, Homo sapiens
ggcgggcgctgctgttgtgtttgagtgtgcgagtgtgagtgagtgtgagtgccgggtctgcctctcctggtgcccccagcagaggggcccggtggcctggtggatgtggcgggcgggctgctcggaggcagaggcagcaagagtgctggcgtgtgtgtggagagcctgagaaggattggaggaggagagagtgaaatgagctggagcgagagcattgttgagtggaaaccttgcaaacaaatgaatgtgcatcctggagtcccacggggagcagaatgagatgagaagtggaagaaggatgagagaagttggaagtaggaagagggggtaggggtaaatggaagggagtggagaggaagaaatgaggtgcgaaggatgtaaaagatggtgagtgagaaaggcatataggaaaaagggaggacagagaaagaggagagaaacagggagggagcgaagaattgggttgagctaaggaatagcgaagagatagatgcggaatagaaagaagatataaagggaaagtaggagaaaggtagaggatgagaaggaaataacagaagtggaagcaagagaaggaaagcaggagagataaagagaagagcgagacgagaggagaaatgggaataaagtgagaggagggcaagagcaacaaggaagagagactgatgaagaaacgagaggcaacggggggacgagggagggaggaaagaagggtgaagaggagggagggtaggagagggaggaaggtgagggcgaagagacggaaagaggggggtgaagggaagaagaagggaagcgcgagagaggaggaggcgaggggtggagagaggaggaggagggagggaacgagaaaggaggggaggaagaagaggggagacaggaagggagtagagaagg

SEQ ID NO: 496068 - DNA, 214 bp, Homo sapiens
cttagagttagaggtgctagctgctgctatcccaagatcctcagcagagattaaaaggaacccggtgtgcacagcagatccccgaaattggtggacttgacctccatggcaaattgctgcgtctttccacttgctgtccaggacccactaaactgctgaaatgtggactgcttacccgcacatcaaagcaacttcattgtgtactacaaaaaaa

SEQ ID NO: 496069 - DNA, 120 bp, Homo sapiens
gtctcagggcaaagagaccatttattacccagaatggtttgttctaatgcttcttgtcggcatgccgccgcatcaggggcgattctgtccagatctctttgtcccttctgtcgtcttctc

SEQ ID NO: 496070 - DNA, 315 bp, Homo sapiens
gggctttatactaaatgggaacgttgtggaaaggccgtgagatttgcgccctccccagtttagttatttgccagctactttaaccagagtggcgacattttgaaatatttcctatgaccctcgctaacagtttcatcccctggtcaccccctgctggcccagggcctgagctttttcaaacaagcatgacatgggttttcttttcattttttctgttctccaaagtagatcgggcttgtgacccctgtgtgtggaccttcccccaatattatctttttggaacggagcagaaaaaaataaacttccattaggtga

SEQ ID NO: 496071 - DNA, 265 bp, Homo sapiens
ttaatacgtcgatgagcgctaatcctggacacacactgagtcccaacttgttcacatactgagccctgtatcctggacacacactgagcctcaaccctggtcacacattgagccctgatcccagtacacacaccgaaccctgaccctggtcacacagagccctgatcctggtcaaacagtgagccccaaccttggtcacacacttgagacctgaccattggttacagtacttaaccctgggggaactcctcttagaagtcgacct

SEQ ID NO: 496072 - DNA, 1200 bp, Homo sapiens
gcggccgcccttttttttttttgtttggacagatgtggggcctttatattattgggggtccctctatatgtggaacaggggacctccccaccccaagcctagtgtgcctcgtggcacccccataaccagatacacaagtcccgtgaagagatccccttataaaatcactaatagtaaaaaaggagcgaaggagggaaggccagaccggcccaaaggctggggaagctccggtgtcggaagacagggccatgggaatggacacgaggggcgcgtgggcattcggccgcaggaaggcacatggcgtccccagccccgggggcgctcacccgatagccgggagaggcggagatcacacaaaccgccgggagactggaaagacatggtggtcagacgcatagtggcgtataatacgtatcaataggtcagtgcaggcgcaatggccacagagccagagatgggatagctgagaagtgggggtggcgccctacctgggaacgtgagggagacacaggggacgaccaccaataccacggatcggcagagagggagagaaacccacgagagagggcatgtggccccggagagaagggacacagtgccacacaaaaagcggacaaagtatctcgtggcgctttctccccgtggtcgcctttgtgcggccacaaagtagcgaagataggcgcgcggcaccccagcagaggcgagagactcacaaaaatccccccaggaaaagccccccaaagtggcgcccatgggcggcacgcccaaggggggcccaacaggcggggacgcccccaaagcccaaaccaaaagggattcaccattgggggcaccaccgcgggaacaaccgcccaaagacaaattaggacaccaccgcaggaaccagtcgggagaatgagagcgacactatgcgggagcaaccagggaagaacagaaacccggctggcgagccaaacacccacaagacgaaaaaccaaccaacgacaacccacacaaaacgccggccctctgttacccccgccagctaaccccatgccagatgggtgaacaatcccacccaaacacgcggcccacacaaacaagcgcgcgcaacaccgagtagtgacagcaaggaccgccaaaggtgagcaagaagcacaaataggaggaccccacccgacggggaggacaatgaaacaacaataggaaatagacacaaag

SEQ ID NO: 496073 - DNA, 91 bp, Homo sapiens
aaaccctttttttccccttttagccagggcttttcaaaaaaccttgggcctttttacctaaaaaaaaaattttgtttggcccctttgggga

SEQ ID NO: 496074 - DNA, 196 bp, Homo sapiens
aatacccactatgtgtttgctctgctgtcatgggatggagaggcaggctgattacatgtgctcggcacttgtgctaactcctttactgacttctctcatttaattcacatgacaggaggttctgggaagtgcaggacacagcgagggccttgatgcctgcttctccgcgcgtcgttagacagcgacgctcatacca

SEQ ID NO: 496075 - DNA, 179 bp, Homo sapiens
ccgagattgcgccactgcactccagcctgggcaacagagcaagactccatctcaaaaaaaaaaaaaaaaaaaaaaaaaattcctctgggtggggcccgggggcccgggcttgtatccccagcttttgggggggccaggggggggggatcacgagggtcaaaaattcggagaccatcctt

SEQ ID NO: 496076 - DNA, 1129 bp, Homo sapiens
cgcaatggaattgagtcctcaggggacgtcaagacgactcgaatcaaccaggtgcccacggttcggcccggattttacgggactgctgtcgggagcgttcccgggaccaccgcgttgcctggccgccgagggtgtttctctgcatacctgtctttcttccaaacatccactggtttaacgacgccttcgcgatcctttcccccttgccaatcgcctttacgggggccgcgtttacgaagggccgtggccatatgttgcgcgtgccactgagccttttgggtttaacccccacccattctttttcctcttccgcatgtccgtgtgggaaaagacctgggaagggctagccgccccatcgactgcgctgagcctaggcggggattcgtagggaatgggcgatgcttaggtgatttgatacacttgcgagcggaatcaacgggttgcctgcggcgcttgcatgctggtgagtcctgcgacttgcgatcctgtccgtccatctttcccgatcctccagctgtggactcaactgagacggtcttagcctgacgaaacgctggaaaggccgcgctcgatcggacaaagggctctgtgcgatgagctatggtcttgtgcattgcgcattttgaccgcaaggtgtgactcttcctctcagctgaaggtgatatcacctgcttcaccgggctccatgtccctcaacgtgagtccctatcagaagtcctcacagcgtagcccatgctctgacggtccttggcttgagagagtcttggccacaatgctgcgaaaagtttctagccgacgcactccttgtccctatccactgcatctcgactgcatatggggctcccataggctgttggcctggaccatcatgaagggttaggagtgtgtacggctagtggaaggcccccctgatggagctacgtgcggcccacagtaccgaaggcatgcaacctttgcgcgcagtcggtcgagatctcatcagccccaggctgcaggtgaggcttcaggggactcgcaggggtccactcactgccacctccgtctgccttgccctccatccttcgctctgttaccttctgaccgggcaccacagcactggggctcacttacgctggagcctcttgtaagt

SEQ ID NO: 496077 - DNA, 126 bp, Homo sapiens
ttctcttacttcagctaatgtaattcattaactgtgtataactgaatctatattttcatttatatcacaaattcagaaaagattattttccactcacatctggaaaatataataaagcttcattct

SEQ ID NO: 496078 - DNA, 332 bp, Homo sapiens
  misc_feature (238)..(238): n is a, c, g, or t
  misc_feature (240)..(240): n is a, c, g, or t
  misc_feature (279)..(279): n is a, c, g, or t
  misc_feature (298)..(298): n is a, c, g, or t
  misc_feature (318)..(318): n is a, c, g, or t
acagtgagagtgcacacgtttgctatatggctctgagctgctgagtcagggccaaccctctgatcaccctcctgtagctccaagaaggagggcagttattcaccctccacgccgttccttcctggggttcgggggcagctccccggaggcttcaggtacccacctttcctgcaggtgtccagggctcctctgccttaccagtggggtgggcgaccattcaccaaggtgtgagggggcngnggggacttgctggggggttgatcaggcaggtcccaaagncttcttttaaattaatttnaaccaattaaaatttcttanttttccttgtttcc

SEQ ID NO: 496079 - DNA, 1022 bp, Homo sapiens
  misc_feature (521)..(521): n is a, c, g, or t
atggcacatgcagcgcaagtagggtctacaagacggctacttcccctatcatagaagagcttatcacctttcatgatcacgccctcataatcattttccttatcgtgcttccatagttcctgtattgcccattttcctaacagttcacaagaaaaaataactaatagtagcatctcagaccgctcaggaactagaaaccgtctgaactatcctgcccgccatcatcctagtcctcatcgccctcccaatccctaagcattcctttaccattaacagacgaggtcaacgatttccctccctttaccatcaaatcaatgtggccaccaatgggtaactgaacctaggagtacacggactacgggcgggacttactcttcaacttcctaccattacttcccccaattaatcctagaacccagtgcgacctggcgactcctttgacgttgccaatcgagtaagtatcccggatggaagccccacaattcgtaataatactttacatcacagaggacgtctggcanttcatgaagctggttccccaacaattacgtggccttaacacacatgattgcacttcccgggacggttataaacccaaaacacatatcagcggctaacacggcaccggggggtattactacggggtcaaatggctcttgacaactctggtgggagccaaacaccaggttttaattggccattgtcctagccattaagttccgctaaaacttttggacataggggccggtaattacacttattgacacgctttaacgccctttagagtcacaaacagcaacacacacaccgatcaaaatttggggcgcccacggccctgaagcgaggtgataaaaacatggatgagggacggcgaccacaagaacgaacaacagcaccacgtgacctaaagaaccggcacggacgatgatgtctcccaaaaacacgcgcgaacgacacggtataaacacagagaaggacagcgtcacaagaaccggcaaaaagccagccactggagcagcgac

SEQ ID NO: 496080 - DNA, 166 bp, Homo sapiens
gtaaaggcagatgggccagaaggagatggggagccaggacacccaaagccacagactacaaatgccccaggagagggagagggaggtactcctgccccctaccagtgacatcatctggagaaggtgtccctcctgtaccactccatgtgcccctcctagcaacagc

SEQ ID NO: 496081 - DNA, 163 bp, Homo sapiens
cacagggtactcagctgccctgcatagaattagaacatactcctttagctcggagaagttagatcgtctgaagccttctcctctcaactcatcaaagtcatcctccgtccagctttgttctattgctggcgaggagctgcgttcccgaggaggagaagcagca

SEQ ID NO: 496082 - DNA, 180 bp, Homo sapiens
tttactggtttctatgagtttggcttttaaaatttcacaagtaagtgagattatgcagtatttgtctttctatgccctgcccagccactccagctccagctgtgacaaaaaggggccaatggacagctaaggctgttgcttcagaagatgcaggtcccaagccttggcagcttccacatg

SEQ ID NO: 496083 - DNA, 139 bp, Homo sapiens
taacacagcatccggatattaagtagagagcatgcctgtcgcaaacatcatactgatctgatgttgatacttttatgccatacttggaaaactcccataataaattcttcctccggagagaacacaaaggcaactttcc

SEQ ID NO: 496084 - DNA, 206 bp, Homo sapiens
tgctgcgggcctgtacgagggagcagagactgctcctgtgcagaatgaaggcctggggtggagatgctgctgtcctcagatgatggtgatgcccatgtccttctccagcttcggcagaggttatcgggactggcccgctgcctagggctcatgctcagctctgagtttgcagctcccgtgtccgtccctgtgcaggaaatcctgga

SEQ ID NO: 496085 - DNA, 926 bp, Homo sapiens
  misc_feature (11)..(11): n is a, c, g, or t
  misc_feature (163)..(163): n is a, c, g, or t
  misc_feature (210)..(210): n is a, c, g, or t
  misc_feature (378)..(378): n is a, c, g, or t
  misc_feature (410)..(410): n is a, c, g, or t
  misc_feature (701)..(701): n is a, c, g, or t
  misc_feature (711)..(712): n is a, c, g, or t
  misc_feature (729)..(729): n is a, c, g, or t
  misc_feature (757)..(757): n is a, c, g, or t
  misc_feature (762)..(762): n is a, c, g, or t
  misc_feature (771)..(771): n is a, c, g, or t
  misc_feature (778)..(779): n is a, c, g, or t
  misc_feature (789)..(789): n is a, c, g, or t
  misc_feature (791)..(792): n is a, c, g, or t
  misc_feature (797)..(797): n is a, c, g, or t
  misc_feature (813)..(813): n is a, c, g, or t
  misc_feature (819)..(819): n is a, c, g, or t
ggtgagctgcncgcaagaggacggcagaggcccggcagctcggagctccgggaccttgtggcgcatcaggacgctggctgtccctctgcctgggacccatgagcctgccgcctgcctgctctgcctcctgcgtgttagcctcctctgctgcgctcctgggcanggcggcctgtgggatgcctgctggggcgatggactggcgctgaggcntgctgctgcttgccccctggccctgcgcggctgtgaaactggaggaggcctgagccaagcggctgtgcccctcttatgctgggaggatgctggagagtagcggctgcaaagcgctgaaggagggcgtgctggagaagcgcagaggacgggtatgttgcagctctgganagaaaaacgtgttgcatcctcacctgaggaangggctgctggttatccctgcccaatgcaagctgcaacaccagcaggcagcagcaagcagcagcagcagcatgcacggaacaacacgcccggggcatgggtgccggacgaatgccgtgcaacaccatgtggaccccgtgtgtcgccagacctccgagccgccggtcaagctcaaggaactgcagttctccaacatgaaggagcgtggactgttgtggagcgcaagggcaatgtacaatgtacttcactagtggtgatggcagagggtaaggagatcgactttcggtgcccgnaagaccaggnntggaacgccgagatcangctgcagatggtgcagtacaagaatcgncaggncatcctggnggtcaannccacgcggananngcagnagcacctggtcagagnagcccncatcgcagacgaagcggaaccgagagctccggcacgaaaccgaggtaagacttaggcggaaaccaagccaagaacaacccaagctcaagccacaaccaggataaccg

SEQ ID NO: 496086 - DNA, 1925 bp, Homo sapiens
tggctatgtagaggcctggtgttaattcggccgaggcactgctggcgggcccgggagatccagcagtaggtcagacctcgtcctgcccggcacggccggggacttcagcctgagcgccagcctgtcggcctgtacgctgctctacgagggggccgtggagcccatgcagatcgacgtggacccccaggaagacccgcagaatgcacctgacgtcaactacgtggtggagaaccccagcctggatctggaacagtacgcggccagctacagcggcctgatgcgcatcgaacggctgcagttcattgctgatcactgccccacgctgcgggtggaggccctgaagatggccctctccttcgtgcagagaacctttaacgtggacatgtacgaggagatccaccgcaagctctcagaggccaccaccagggagctgcagaacgcacccgacgccatccctgagagcggcgtggagcccccagccctggacacggcctgggtggaggccacgcggaagaaggcgctgctgaagctggagaagctggacacagacctgaagaactacaagggcaactccatcaaagagagcatccggcgcggccacgacgacctgggcgaccactacctggactgtggggacctcagcaacgccctcaagtgctattcccgggcccgggactactgcaccagcgccaaacacgtcatcaacatgtgcctcaatgtcatcaaggtcagcgtctacttgcagaattggtctcatgtgctcagctacgtcagcaaggctgagtccaccccagagattgccgagcagcgaggagagcgtgacagccagacccaggccatcctcaccaagctcaagtgtgccgcaggcttggcagagctggccgccaggaagtacaagcaggctgccaagtgcctcctgctggcttcctttgatcactgtgacttccctgagctgctgtcccccagcaacgtggccatctacggtggcctgtgcgccttggctacctttgaccggcaggagctgcagcgcaatgtcatctccagcagctccttcaagttgttcttggagctggagccacaggtccgagacatcatcttcaaattctacgagtccaagtacgcctcatgtctcaagatgctggacgagatgaaggacaacctgctcctggacatgtatctggccccccatgtcaggaccctgtacacccagattcgcaaccgtgccctcatccagtatttcagcccctacgtgtcagccgacatgcataggatggcggcagccttcaataccacggtggccgccctggaggacgagctgacgcagctaatcctggaggggctgatcagtgcccgtgtggactcacacagcaagatcctatacgcccgggacgtggatcagcgcagcaccacctttgagaagtctctgttgatgggcaaggagttccagcgccgcgccaaggccatgatgctgcgggcagctgtgctccgcaaccagatccatgtcaagtccccgcccagagaagggagccagggggagctgactccagccaacagccagtcccggatgagcaccaacatgtgaggggtgaaccttggcctccaggacatctgcaccccctccccacctccacggacctcggacctccaggcggctcagtgctgcctgcggcccagctaaggggcctggccactgggtgccacccagcctgtgtgccctccctggggctgaggaggcaggcggctgctagttgtggcccttcctggaaggagaggcctgcagggctcgaccctgtgggtttctgtccccagggagcagactgtgcggcacccaggcccagtggcaccatttcccagacccctcctgttcccgcctcagtcaggtgcagacaagtgggcggtgtccattaaagagcagactcagcgtt

SEQ ID NO: 496087 - DNA, 542 bp, Homo sapiens
  misc_feature (313)..(313): n is a, c, g, or t
  misc_feature (323)..(323): n is a, c, g, or t
  misc_feature (340)..(340): n is a, c, g, or t
  misc_feature (390)..(390): n is a, c, g, or t
  misc_feature (454)..(454): n is a, c, g, or t
  misc_feature (478)..(478): n is a, c, g, or t
  misc_feature (504)..(504): n is a, c, g, or t
  misc_feature (523)..(523): n is a, c, g, or t
cagggcagccttcagtctgattcaggagaacgaggtcctcttcaccatgtgcttcatccccctggtctgctggatcgtgtgcactggactgaaacagcagatggagagtggcaagagccttgcccagacatccaagacctccaccgcggtgtacgtcttcttcctttccagtttgctgcagccccggggagggagccaggagcacggcctctgcgcccacctctgggggctctgctctttggctgcagatggaatctggaaccagaaaatccgtttgaggagtccgacctcaggaatcaggactgcagaaggnggatgtgtcngcttcctgaggatgaanctgttccaaaaagaagtggatgcgagagttctacagcttcatccacaganttccaggagttcttgcgccagtataactgctggaagagggaaggaagagacgttccagggatcnttgagcttccagccgagagtgacntcctctggaaactatgcaatcggggnattgatttgtgtagtttcnctttgctgtccagagagct

SEQ ID NO: 496088 - DNA, 2076 bp, Homo sapiens
tctctgaagttccagaatcgatggaagtggacggcacgccgcggcggggtgggtgcaagatgccgctgccggttcaggtgtttaacttgcacagcagccagccagctctgtgtcagggtcggggggtgcagaaagtcaggacagaatgagggatagctcggcccccagctcggcctcctcgtcagtgacagatctgtactgcacccctcacaggcagtaggtcagacctcgtcctgcccggcacggccggggacttcagcctgagcgccagcctgtcggcctgtacgctgctctacgagggggccgtggagcccatgcagatcgacgtggacccccaggaagacccgcagaatgcacctgacgtcaactacgtggtggagaaccccagcctggatctggaacagtacgcggccagctacagcggcctgatgcgcatcgaacggctgcagttcattgctgatcactgccccacgctgcgggtggaggccctgaagatggccctctccttcgtgcagagaacctttaacgtggacatgtacgaggagatccaccgcaagctctcagaggccaccaccagggagctgcagaacgcacccgacgccatccctgagagcggcgtggagcccccagccctggacacggcctgggtggaggccacgcggaagaaggcgctgctgaagctggagaagctggacacagacctgaagaactacaagggcaactccatcaaagagagcatccggcgcggccacgacgacctgggcgaccactacctggactgtggggacctcagcaacgccctcaagtgctattcccgggcccgggactactgcaccagcgccaaacacgtcatcaacatgtgcctcaatgtcatcaaggtcagcgtctacttgcagaattggtctcatgtgctcagctacgtcagcaaggctgagtccaccccagagattgccgagcagcgaggagagcgtgacagccagacccaggccatcctcaccaagctcaagtgtgccgcaggcttggcagagctggccgccaggaagtacaagcaggctgccaagtgcctcctgctggcttcctttgatcactgtgacttccctgagctgctgtcccccagcaacgtggccatctacggtggcctgtgcgccttggctacctttgaccggcaggagctgcagcgcaatgtcatctccagcagctccttcaagttgttcttggagctggagccacaggtccgagacatcatcttcaaattctacgagtccaagtacgcctcatgtctcaagatgctggacgagatgaaggacaacctgctcctggacatgtatctggccccccatgtcaggaccctgtacacccagattcgcaaccgtgccctcatccagtatttcagcccctacgtgtcagccgacatgcataggatggcggcagccttcaataccacggtggccgccctggaggacgagctgacgcagctaatcctggaggggctgatcagtgcccgtgtggactcacacagcaagatcctatacgcccgggacgtggatcagcgcagcaccacctttgagaagtctctgttgatgggcaaggagttccagcgccgcgccaaggccatgatgctgcgggcagctgtgctccgcaaccagatccatgtcaagtccccgcccagagaagggagccagggggagctgactccagccaacagccagtcccggatgagcaccaacatgtgaggggtgaaccttggcctccaggacatctgcaccccctccccacctccacggacctcggacctccaggcggctcagtgctgcctgcggcccagctaaggggcctggccactgggtgccacccagcctgtgtgccctccctggggctgaggaggcaggcggctgctagttgtggcccttcctggaaggagaggcctgcagggctcgaccctgtgggtttctgtccccagggagcagactgtgcggcacccaggcccagtggcaccatttcccagacccctcctgttcccgcctcagtcaggtgcagacaagtgggcggtgtccattaaagagcagactcagcgtt

SEQ ID NO: 496089 - DNA, 536 bp, Homo sapiens
acattttttcaattacattacatcataaatgtcccagagtagttaccaacattacattatgtacaccatttataggagggtaacacaaaccttgtcaggtggaaacttttcaccccacataactgaacgctaaacactcctggctgttacatgtcacaggataccactggggtcagccactcgaagcacaataaatataaaatgtggcccttccatgaaatttttgataaccttctccaaaaacccaacaaaggcgaggtttaaaagaagtttttgaagaaatacaaggatctttctcgtcccctacaaaaagttcacaaaagcatcaaaatgagggctgatcctaccacaataagacgttttgggccaggcagtgtgcagggtggatataagcacacccctttaacatttttcttttttctttttttaagaaaaaaaaactttttttttgtacaaatatacaaggccatgttttttcagcccctttgcgctaaaaacggcatgacgctgccctccaaaaacacagtattataggg

SEQ ID NO: 496090 - DNA, 1740 bp, Homo sapiens
tctctgaagttccagaatcgatggaagtggacggcacgccgcggcggggtgggtgcaagatgccgctgccggttcaggtgtttaacttgcagggggccgtggagcccatgcagatcgacgtggacccccaggaagacccgcagaatgcacctgacgtcaactacgtggtggagaaccccagcctggatctggaacagtacgcggccagctacagcggcctgatgcgcatcgaacggctgcagttcattgctgatcactgccccacgctgcgggtggaggccctgaagatggccctctccttcgtgcagagaacctttaacgtggacatgtacgaggagatccaccgcaagctctcagaggccaccaccagggagctgcagaacgcacccgacgccatccctgagagcggcgtggagcccccagccctggacacggcctgggtggaggccacgcggaagaaggcgctgctgaagctggagaagctggacacagacctgaagaactacaagggcaactccatcaaagagagcatccggcgcggccacgacgacctgggcgaccactacctggactgtggggacctcagcaacgccctcaagtgctattcccgggcccgggactactgcaccagcgccaaacacgtcatcaacatgtgcctcaatgtcatcaaggtcagcgtctacttgcagaattggtctcatgtgctcagctacgtcagcaaggctgagtccaccccagagattgccgagcagcgaggagagcgtgacagccagacccaggccatcctcaccaagctcaagtgtgccgcaggcttggcagagctggccgccaggaagtacaagcaggctgccaagtgcctcctgctggcttcctttgatcactgtgacttccctgagctgctgtcccccagcaacgtggccatctacggtggcctgtgcgccttggctacctttgaccggcaggagctgcagcgcaatgtcatctccagcagctccttcaagttgttcttggagctggagccacaggtccgagacatcatcttcaaattctacgagtccaatgtacgccatcatgtctcaatgatgctggactgagatgacaggacaacctgctcctggacatgtatctggccccccatgtcaggaccctgtacacccagattcgcaaccgtgccctcatccagtaagatcctatacgcccgggacgtggatcagcgcagcaccacctttgagaagtctctgttgatgggcaaggagttccagcgccgcgccaaggccatgatgctgcgggcagctgtgctccgcaaccagatccatgtcaagtccccgcccagagaagggagccagggggagctgactccagccaacagccagtcccggatgagcaccaacatgtgaggggtgaaccttggcctccaggacatctgcaccccctccccacctccacggacctcggacctccaggcggctcagtgctgcctgcggcccagctaaggggcctggccactgggtgccacccagcctgtgtgccctccctggggctgaggaggcaggcggctgctagttgtggcccttcctggaaggagaggcctgcagggctcgaccctgtgggtttctgtccccagggagcagactgtgcggcacccaggcccagtggcaccatttcccagacccctcctgttcccgcctcagtcaggtgcagacaagtgggcggtgtccattaaagagcagactcagcgtt

SEQ ID NO: 496091 - DNA, 1948 bp, Homo sapiens
tctctgaagttccagaatcgatggaagtggacggcacgccgcggcggggtgggtgcaagatgccgctgccggttcaggtgtttaacttgcagggggccgtggagcccatgcagatcgacgtggacccccaggaagacccgcagaatgcacctgacgtcaactacgtggtggagaaccccagcctggatctggaacagtacgcggccagctacagcggcctgatgcgcatcgaacggctgcagttcattgctgatcactgccccacgctgcgggtggaggccctgaagatggccctctccttcgtgcagagaacctttaacgtggacatgtacgaggagatccaccgcaagctctcagaggccaccaccagggagctgcagaacgcacccgacgccatccctgagagcggcgtggagcccccagccctggacacggcctgggtggaggccacgcggaagaaggcgctgctgaagctggagaagctggacacagacctgaagaactacaagggcaactccatcaaagagagcatccggcgcggccacgacgacctgggcgaccactacctggactgtggggacctcagcaacgccctcaagtgctattcccgggcccgggactactgcaccagcgccaaacacgtcatcaacatgtgcctcaatgtcatcaaggtcagcgtctacttgcagaattggtctcatgtgctcagctacgtcagcaaggctgagtccaccccagagattgccgagcagcgaggagagcgtgacagccagacccaggccatcctcaccaagctcaagtgtgccgcaggcttggcagagctggccgccaggaagtacaagcaggctgccaagtgcctcctgctggcttcctttgatcactgtgacttccctgagctgctgtcccccagcaacgtggccatctacggtggcctgtgcgccttggctacctttgaccggcaggagctgcagcgcaatgtcatctccagcagctccttcaagttgttcttggagctggagccacaggtccgagacatcatcttcaaattctacgagtccaagtacgcctcatgtctcaagatgctggacgagatgaaggacaacctgctcctggacatgtatctggccccccatgtcaggaccctgtacacccagattcgcaaccgtgccctcatccagtatttcagcccctacgtgtcagccgacatgcataggatggcggcagccttcaataccacggtggccgccctggaggacgagctgacgcagctaatcctggaggggctgatcagtgcccgtgtggactcacacagcaagatcctatacgcccgggacgtggatcagcgcagcaccacctttgagaagtctctgttgatgggcaaggagttccagcgccgcgccaaggccatgatgctgcgggcagctgtgctccgcaaccagatccatgtcaaggtgggctggcttgagggggggcaggcgcacggcgtgtggggcctggtggctgtgagctgctccttgtctcccctgcaagtccccgcccagagaagggagccagggggagctgactccagccaacagccagtcccggatgagcaccaacatgtgaggggtgaaccttggcctccaggacatctgcaccccctccccacctccacggacctcggacctccaggcggctcagtgctgcctgcggcccagctaaggggcctggccactgggtgccacccagcctgtgtgccctccctggggctgaggaggcaggcggctgctagttgtggcccttcctggaaggagaggcctgcagggctcgaccctgtgggtttctgtccccagggagcagactgtgcggcacccaggcccagtggcaccatttcccagacccctcctgttcccgcctcagtcaggtgcagacaagtgggcggtgtccattaaagagcagactcagcgtt

SEQ ID NO: 496092 - DNA, 1927 bp, Homo sapiens
  misc_feature (1602)..(1602): n is a, c, g, or t
tctctgaagttccagaatcgatggaagtggacggcacgccgcggcggggtgggtgcaagatgccgctgccggttcaggtgtttaacttgcagggggccgtggagcccatgcagatcgacgtggacccccaggaagacccgcagaatgcacctgacgtcaactacgtggtggagaaccccagcctggatctggaacagtacgcggccagctacagcggcctgatgcgcatcgaacggctgcagttcattgctgatcactgccccacgctgcgggtggaggccctgaagatggccctctccttcgtgcagagaacctttaacgtggacatgtacgaggagatccaccgcaagctctcagaggccaccaccagggagctgcagaacgcacccgacgccatccctgagagcggcgtggagcccccagccctggacacggcctgggtggaggccacgcggaagaaggcgctgctgaagctggagaagctggacacagacctgaagaactacaagggcaactccatcaaagagagcatccggcgcggccacgacgacctgggcgaccactacctggactgtggggacctcagcaacgccctcaagtgctattcccgggcccgggactactgcaccagcgccaaacacgtcatcaacatgtgcctcaatgtcatcaaggtcagcgtctacttgcagaattggtctcatgtgctcagctacgtcagcaaggctgagtccaccccagagattgccgagcagcgaggagagcgtgacagccagacccaggccatcctcaccaagctcaagtgtgccgcaggcttggcagagctggccgccaggaagtacaagcaggctgccaagtgcctcctgctggcttcctttgatcactgtgacttccctgagctgctgtcccccagcaacgtggccatctacggtggcctgtgcgccttggctacctttgaccggcaggagctgcagcgcaatgtcatctccagcagctccttcaagttgttcttggagctggagccacaggtccgagacatcatcttcaaattctacgagtccaagtacgcctcatgtctcaagatgctggacgagatgaaggacaacctgctcctggacatgtatctggccccccatgtcaggaccctgtacacccagattcgcaaccgtgccctcatccagtatttcagcccctacgtgtcagccgacatgcataggatggcggcagccttcaataccacggtggccgccctggaggacgagctgacgcagctaatcctggaggggctgatcagtgcccgtgtggactcacacagcaagatcctatacgcccgggacgtggatcagcgcagcaccacctttgagaagtctctgttgatgggcaaggagttccagcgccgcgccaaggccatgatgctgcgggcagctgtgctccgcaaccagatccatgtcaagtccccgcccagagaagggagccagggggagctgactccagccaacagccagtcccggatgagcaccaacatgtgaggggtgaaccttggcctcccctccaggacatcgggggcccaaaagcccacccccccgccctccttgtgaccccccntcgccaaaaccctaccaacgaccacctccacggacctcggacctccaggcggctcagtgctgcctgcggcccagctaaggggcctggccactgggtgccacccagcctgtgtgccctccctggggctgaggaggcaggcggctgctagttgtggcccttcctggaaggagaggcctgcagggctcgaccctgtgggtttctgtccccagggagcagactgtgcggcacccaggcccagtggcaccatttcccagacccctcctgttcccgcctcagtcaggtgcagacaagtgggcggtgtccattaaagagcagactcagcgtt

SEQ ID NO: 496093 - DNA, 2027 bp, Homo sapiens
tctctgaagttccagaatcgatggaagtggacggcacgccgcggcggggtgggtgcaagatgccgctgccggttcaggtgtttaacttgcagggggccgtggagcccatgcagatcgacgtggacccccaggaagacccgcagaatgcacctgacgtcaactacgtggtggagaaccccagcctggatctggaacagtacgcggccagctacagcggcctgatgcgcatcgaacggctgcagttcattgctgatcactgccccacgctgcgggtggaggccctgaagatggccctctccttcgtgcagagaacctttaacgtggacatgtacgaggagatccaccgcaagctctcagaggccaccaccagggagctgcagaacgcacccgacgccatccctgagagcggcgtggagcccccagccctggacacggcctgggtggaggccacgcggaagaaggcgctgctgaagctggagaagctggacacagacctgaagaactacaagggcaactccatcaaagagagcatccggcgcggccacgacgacctgggcgaccactacctggactgtggggacctcagcaacgccctcaagtgctattcccgggcccgggactactgcaccagcgccaaacacgtcatcaacatgtgcctcaatgtcatcaaggtcagcgtctacttgcagaattggtctcatgtgctcagctacgtcagcaaggctgagtccaccccagagattgccgagcagcgaggagagcgtgacagccagacccaggccatcctcaccaagctcaagtgtgccgcaggcttggcagagctggccgccaggaagtacaagcaggctgccaagtgcctcctgctggcttcctttgatcactgtgacttccctgagctgctgtcccccagcaacgtggccatctacggtggcctgtgcgccttggctacctttgaccggcaggagctgcagcgcaatgtcatctccagcagctccttcaagttgttcttggagctggagccacaggtccgagacatcatcttcaaattctacgagtccaagtacgcctcatgtctcaagatgctggacgagatgaaggacaacctgctcctggacatgtatctggccccccatgtcaggaccctgtacacccagattcgcaaccgtgccctcatccagtatttcagcccctacgtgtcagccgacatgcataggatggcggcagccttcaataccacggtggccgccctggaggacgagctgacgcagctaatcctggaggggctgatcagtgcccgtgtggactcacacagcaagatcctatacgcccgggacgtggatcagcgcagcaccacctttgagaagtctctgttgatgggcaaggagttccagcgccgcgccaaggccatgatgctgcgggcagctgtgctccgcaaccagatccatgtcaagtccccgcccagagaagggagccagggggagctgactccagccaacagccagtcccggatgagcaccaacatgtgaggggtgaaccttggcctccaggacatctgcaccccctccccacctccacggacctcggacctccaggcggctcagtgctgcctgcggcccagctaaggggcctggccactgggtgccacccagcctgtgtgccctccctggggctgaggaggcaggcggctgctagttgtggcccttcctggaaggagaggcctgcagggctcgaccctgtgggtttctgtccccagggagcagactgtgcggcacccaggcccagtggcaccatttcccagacccctcctgttcccgcctcagtcaggtgcagaggaggcaggcggctgctagttgtggcccttcctggaaggagaggcctgcagggctcgaccctgtgggtttctgtccccagggagcagactgtgcggcacccaggcccagtggcaccatttcccagacccctcctgttcccgcctcagtcaggtgcagacaagtgggcggtgtccattaaagagcagactcagcgtt

SEQ ID NO: 496094 - DNA, 404 bp, Homo sapiens
aataaatgggaagtagttggtaacatggctgtgtcacgctactactttgggtgctgtgaaatgcaaggtttaatttatgtaattgggggcatcagcaatgaaggaatagaacttcgttcttttgaagtctatgatccactttctaagcgttggtctccacttcctccaatgtggaaccaggagagcatatcttggtgtggctgcactcaatgactgcatctattctgttggaggatggaatgagacccaagatgctcttcatactgtagaaaaatattcctttgaagagacgtcgtcttgctcagtcaccaggctgctcggctcactgcaaacttggcctcccaggagaatcgcttgaacctgggagacagaggttgcagtgagccaagatcacaccattgcac

SEQ ID NO: 496095 - DNA, 1849 bp, Homo sapiens
tctctgaagttccagaatcgatggaagtggacggcacgccgcggcggggtgggtgcaagatgccgctgccggttcaggtgtttaacttgcagggggccgtggagcccatgcagatcgacgtggacccccaggaagacccgcagaatgcacctgacgtcaactacgtggtggagaaccccagcctggatctggaacagtacgcggccagctacagcggcctgatgcgcatcgaacggctgcagttcattgctgatcactgccccacgctgcgggtggaggccctgaagatggccctctccttcgtgcagagaacctttaacgtggacatgtacgaggagatccaccgcaagctctcagaggccaccaccagggagctgcagaacgcacccgacgccatccctgagagcggcgtggagcccccagccctggacacggcctgggtggaggccacgcggaagaaggcgctgctgaagctggagaagctggacacagacctgaagaactacaagggcaactccatcaaagagagcatccggcgcggccacgacgacctgggcgaccactacctggactgtggggacctcagcaacgccctcaagtgctattcccgggcccgggactactgcaccagcgccaaacacgtcatcaacatgtgcctcaatgtcatcaaggtcagcgtctacttgcagaattggtctcatgtgctcagctacgtcagcaaggctgagtccaccccagagattgccgagcagcgaggagagcgtgacagccagacccaggccatcctcaccaagctcaagtgtgccgcaggcttggcagagctggccgccaggaagtacaagcaggctgccaagtgcctcctgctggcttcctttgatcactgtgacttccctgagctgctgtcccccagcaacgtggccatctacggtggcctgtgcgccttggctacctttgaccggcaggagctgcagcgcaatgtcatctccagcagctccttcaagttgttcttggagctggagccacaggtccgagacatcatcttcaaattctacgagtccaagtacgcctcatgtctcaagatgctggacgagatgaaggacaacctgctcctggacatgtatctggccccccatgtcaggaccctgtacacccagattcgcaaccgtgccctcatccagtatttcagcccctacgtgtcagccgacatgcataggatggcggcagccttcaataccacggtggccgccctggaggacgagctgacgcagctaatcctggaggggctgatcagtgcccgtgtggactcacacagcaagatcctatacgcccgggacgtggatcagcgcagcaccacctttgagaagtctctgttgatgggcaaggagttccagcgccgcgccaaggccatgatgctgcgggcagctgtgctccgcaaccagatccatgtcaagtccccgcccagagaagggagccagggggagctgactccagccaacagccagtcccggatgagcaccaacatgtgaggggtgaaccttggcctccccacctccacggacctcggacctccaggcggctcagtgctgcctgcggcccagctaaggggcctggccactgggtgccacccagcctgtgtgccctccctggggctgaggaggcaggcggctgctagttgtggcccttcctggaaggagaggcctgcagggctcgaccctgtgggtttctgtccccagggagcagactgtgcggcacccaggcccagtggcaccatttcccagacccctcctgttcccgcctcagtcaggtgcagacaagtgggcggtgtccattaaagagcagactcagcgtt

SEQ ID NO: 496096 - DNA, 1734 bp, Homo sapiens
tctctgaagttccagaatcgatggaagtggacggcacgccgcggcggggtgggtgcaagatgccgctgccggttcaggtgtttaacttgcagggggccgtggagcccatgcagatcgacgtggacccccaggaagacccgcagaatgcacctgacgtcaactacgtggtggagaaccccagcctggatctggaacagtacgcggccagctacagcggcctgatgcgcatcgaacggctgcagttcattgctgatcactgccccacgctgcgggtggaggccctgaagatggccctctccttcgtgcagagaacctttaacgtggacatgtacgaggagatccaccgcaagctctcagaggccaccaccagggagctgcagaacgcacccgacgccatccctgagagcggcgtggagcccccagccctggacacggcctgggtggaggccacgcggaagaaggcgctgctgaagctggagaagctggacacagacctgaagaactacaagggcaactccatcaaagagagcatccggcgcggccacgacgacctgggcgaccactacctggactgtggggacctcagcaacgccctcaagtgctattcccgggcccgggactactgcaccagcgccaaacacgtcatcaacatgtgcctcaatgtcatcaaggtcagcgtctacttgcagaattggtctcatgtgctcagctacgtcagcaaggctgagtccaccccagagattgccgagcagcgaggagagcgtgacagccagacccaggccatcctcaccaagctcaagtgtgccgcaggcttggcagagctggccgccaggaagtacaagcaggctgccaagtgcctcctgctggcttcctttgatcactgtgacttccctgagctgctgtcccccagcaacgtggccatctacggtggcctgtgcgccttggctacctttgaccggcaggagctgcagcgcaatgtcatctccagcagctccttcaagttgttcttggagctggagccacaggtccgagacatcatcttcaaattctacgagtccaagtacgcctcatgtctcaagatgctggacgagatgaaggacaacctgctcctggacatgtatctggccccccatgtcaggaccctgtacacccagattcgcaaccgtgccctcatccagtatttcagcccctacgtgtcagccgacatgcataggatggcggcagccttcaataccacggtggccgccctggaggacgagctgacgcagctaatcctggaggggctgatcagtgcccgtgtggactcacacagcaagtccccgcccagagaagggagccagggggagctgactccagccaacagccagtcccggatgagcaccaacatgtgaggggtgaaccttggcctccaggacatctgcaccccctccccacctccacggacctcggacctccaggcggctcagtgctgcctgcggcccagctaaggggcctggccactgggtgccacccagcctgtgtgccctccctggggctgaggaggcaggcggctgctagttgtggcccttcctggaaggagaggcctgcagggctcgaccctgtgggtttctgtccccagggagcagactgtgcggcacccaggcccagtggcaccatttcccagacccctcctgttcccgcctcagtcaggtgcagacaagtgggcggtgtccattaaagagcagactcagcgtt

SEQ ID NO: 496097 - DNA, 2118 bp, Homo sapiens
tctctgaagttccagaatcgatggaagtggacggcacgccgcggcggggtgggtgcaagatgccgctgccggttcaggtgtttaacttgcagggggccgtggagcccatgcagatcgacgtggacccccaggaagacccgcagaatgcacctgacgtcaactacgtggtggagaaccccagcctggatctggaacagtacgcggccagctacagcggcctgatgcgcatcgaacggctgcagttcattgctgatcactgccccacgctgcgggtggaggccctgaagatggccctctccttcgtgcagagaacctttaacgtggacatgtacgaggagatccaccgcaagctctcagaggccaccaccagggagctgcagaacgcacccgacgccatccctgagagcggcgtggagcccccagccctggacacggcctgggtggaggccacgcggaagaaggcgctgctgaagctggagaagctggacacagacctgaagaactacaagggcaactccatcaaagagagcatccggcgcggccacgacgacctgggcgaccactacctggactgtggggacctcagcaacgccctcaagtgctattcccgggcccgggactactgcaccagcgccaaacacgtcatcaacatgtgcctcaatgtcatcaaggtcagcgtctacttgcagaattggtctcatgtgctcagctacgtcagcaaggctgagtccaccccagagattgccgagcagcgaggagagcgtgacagccagacccaggccatcctcaccaagctcaagtgtgccgcaggcttggcagagctggccgccaggaagtacaagcaggctgccaagtgcctcctgctggcttcctttgatcactgtgacttccctgagctgctgtcccccagcaacgtggccatctacggtggcctgtgcgccttggctacctttgaccggcaggagctgcagcgcaatgtcatctccagcagctccttcaagttgttcttggagctggagccacaggtccgagacatcatcttcaaattctacgagtccaagtacgcctcatgtctcaagatgctggacgagatgaaggacaacctgctcctggacatgtatctggccccccatgtcaggaccctgtacacccagattcgcaaccgtgccctcatccagtatttcagcccctacgtgtcagccgacatgcataggatggcggcagccttcaataccacggtggccgccctggaggacgagctgacgcagctaatcctggaggggctgatcagtgcccgtgtggactcacacagcaagatcctatacgcccgggacgtggatcagcgcagcaccacctttgagaagtctctgttgatgggcaaggagttccagcgccgcgccaaggccatgatgctgcgggcagctgtgctccgcaaccagatccatgtcccacctccacggacctcggacctccaggcggctcagtgctgcctgcggcccagctaaggggcctggccactgggtgccacccagcctgtgtgccctccctggggctgaggaggcaggcggctgctagttgtggcccttcctggaaggagaggcctgcagggctcgaccctgtgggtttctgtccccagggagcagactgtgcggcacccaggcccagtggcaccatttcccagacccctcctgttcccgcctcagtcaggtgcagacaagtgggcggtgtccattaaagagcagactcagcgttaaaaaaaaaaaaaaaaaaaaaaaaaaaaaaaaaaaaaaaaaaaaaaaaaaaaaaaaaaaaaaaaaaaaaaaaaaaaaaaaaaaaaaaaaaaaaaaaaaaaaaaaggggggggggccaaaaacccccgagggaggggcgcgcaagaaggcagcagcccacccgactcgcatgtattggaagaaaaggcgcggcgccaacaaggagggcgcccctctaatgaacaagcgagcgaccggggcggggggcgctacaaacaacctgcggcggaggagagacagaatgtgggcgcagcggcgacatatggggagaaggacaccccacctagctggcgaggggagagaaacgcgggggacgaaacgtgacgag

SEQ ID NO: 496098 - DNA, 149 bp, Homo sapiens
ttactaaatatgaggcactacaaagtggtaagagatcccatacatagtgaagcatacaactgtaagaagtagtaggaaagaccactagattcttcagtagatggagctacgagtggtccgggggagtcctctgagcagtcgaccgtgca

SEQ ID NO: 496099 - DNA, 2260 bp, Homo sapiens
tctctgaagttccagaatcgatggaagtggacggcacgccgcggcggggtgggtgcaagatgccgctgccggttcaggtgtttaacttgcagggggccgtggagcccatgcagatcgacgtggacccccaggaagacccgcagaatgcacctgacgtcaactacgtggtggagaaccccagcctggatctggaacagtacgcggccagctacagcggcctgatgcgcatcgaacggctgcagttcattgctgatcactgccccacgctgcgggtggaggccctgaagatggccctctccttcgtgcagagaacctttaacgtggacatgtacgaggagatccaccgcaagctctcagaggccaccaccagggagctgcagaacgcacccgacgccatccctgagagcggcgtggagcccccagccctggacacggcctgggtggaggccacgcggaagaaggcgctgctgaagctggagaagctggacacagacctgaagaactacaagggcaactccatcaaagagagcatccggcgcggccacgacgacctgggcgaccactacctggactgtggggacctcagcaacgccctcaagtgctattcccgggcccgggactactgcaccagcgccaaacacgtcatcaacatgtgcctcaatgtcatcaaggtcagcgtctacttgcagaattggtctcatgtgctcagctacgtcagcaaggctgagtccaccccagagattgccgagcagcgaggagagcgtgacagccagacccaggccatcctcaccaagctcaagtgtgccgcaggcttggcagagctggccgccaggaagtacaagcaggctgccaagtgcctcctgctggcttcctttgatcactgtgacttccctgagctgctgtcccccagcaacgtggccatctacggtggcctgtgcgccttggctacctttgaccggcaggagctgcagcgcaatgtcatctccagcagctccttcaagttgttcttggagctggagccacaggtccgagacatcatcttcaaattctacgagtccaagtacgcctcatgtctcaagatgctggacgagatgaaggtgggccccgcctggggtaggggtgaggtggggccctgcctggcctcctgtcctggtcctgaccagccccttccccaggacaacctgctcctggacatgtatctggccccccatgtcaggaccctgtacacccagattcgcaaccgtgccctcatccagtatttcagcccctacgtgtcagccgacatgcataggatggcggcagccttcaataccacggtggccgccctggaggacgagctgacgcagctaatcctggaggggctgatcagtgcccgtgtggactcacacagcaaggtggctgtgggctgcgtgggcggtgggggcagctgggggtgagcctgggccccgctgagcttgtgcctgcacaaagatcctatacgcccgggacgtggatcagcgcagcaccacctttgagaagtctctgttgatgggcaaggagttccagcgccgcgccaaggccatgatgctgcgggcagctgtgctccgcaaccagatccatgtcaaggtgggctggcttgagggggggcaggcgcacggcgtgtggggcctggtggctgtgagctgctccttgtctcccctgcaagtccccgcccagagaagggagccagggggagctgactccagccaacagccagtcccggatgagcaccaacatgtgaggggtgaaccttggcctccaggacatctgcaccccctccccacctccacggacctcggacctccaggcggctcagtgctgcctgcggcccagctaaggggcctggccactgggtgccacccagcctgtgtgccctccctggggctgaggaggcaggcggctgctagttgtggcccttcctggaaggagaggcctgcagggctcgaccctgtgggtttctgtccccagggagcagactgtgcggcacccaggcccagtggcaccatttcccagacccctcctgttcccgcctcagtcaggtgcagaggaggcaggcggctgctagttgtggcccttcctggaaggagaggcctgcagggctcgaccctgtgggtttctgtccccagggagcagactgtgcggcacccaggcccagtggcaccatttcccagacccctcctgttcccgcctcagtcaggtgcagacaagtgggcggtgtccattaaagagcagactcagcgtt

SEQ ID NO: 496100 - DNA, 147 bp, Homo sapiens
  misc_feature (86)..(86): n is a, c, g, or t
gtgccctaaagcacaggttttacaggcatgggcaccacgccatgcagcagctggactgtatatattctctgggctaggttctaatngccatcgtgacattatgagcctcacatacccttgcccccgtacgcggggtgttgccgtggt

SEQ ID NO: 496101 - DNA, 131 bp, Homo sapiens
tggggactacgcgactgacttactggtacgcggacggtgaaactatgctcgtgtgtctacgtctattcctactgtaaatatatggtgtgctcacacgatacacccctaggacagcaattgatatcatacag

SEQ ID NO: 496102 - DNA, 124 bp, Homo sapiens
agctaccagaaaatacaataattgtgtatgtggtttggcttgcattcttattatttagttggacagctttgggctagaaaattaaaatttatttgagctcgttatcagtattttgaaaactgaa

SEQ ID NO: 496103 - DNA, 625 bp, Homo sapiens
  misc_feature (112)..(112): n is a, c, g, or t
  misc_feature (134)..(134): n is a, c, g, or t
  misc_feature (235)..(235): n is a, c, g, or t
aaaaacagaaagaaaaaaaaaccatttggaagcaagaaagcagagagacaacccacagaatggcagaaaatatttgtaaatcatgtatccgataagggacttgtatcccaanacataaatgaactctatacaanctacagcaataaaacagacacaataatccacattcaacaacatgggcaacaggatgttacatcgacatttctccaacaggaaatatacaacatgatcaacntggcacattgaaatggatgctcactaaccatatgttcatataggcgaaatggtagatacaaaaccacaaatgcaataacttcttcacataccactaggatgggctaaaatcacaaaaaaacgaaaataagtttgcggatcgtagacacgacacatgaaaccctcatacattcgcagcgtaagacatatataaatgcgcgcagctcactgtggacaaacagttttggaagttgctcaaaaccttaaacaaggagtcaccacatgaccaagcgattccactcctaggtatatgcccaagaacaaaatgcaaacatgatcacacagaaatttgtacacacatgttcaagaccatattattcataatcggcgataagtagaaaccatgcccacc

SEQ ID NO: 496104 - DNA, 749 bp, Homo sapiens
gtaaccggctatcgtcgacccacgcgctccggcaaagcaaatcacagcgttcacagctctgcttcataacaagagtacataaaccaaatgccataaaatttcttcaactctagttggaaaccgtttggaatttttgttagttgtccagcaggtaagctggatgacctgtggtgctgacctttttacatagtgtagtgttatattagccaaccccaaaggagcagtggttttcaaggtttttactggcctacaaatctaccttcattccgtactgtagaaacatacataccaggtaactaaatcgaatcactctctatcatgagttagtactcactcgcacttaaggaacagggatttgtagttctgtctacaaaattctccaagcagtgttgtggttattttatagttttcgtatttttttctttctcttttcaaacagccagttcaggtgcacagcaacctttttctacatgcagttcccagggaaactgcagaacttagaatttgtactttttgtaaagctatactctatgggaattgcaagcaatatatctatcttagtattgtgtgtgctaatgagagcctcagtggctcccccaagtctctcaggtgtttcctgcttaaagaagcaacagtttaaaagccctctaagatactctgtgtgtcaccaaatctgtgtgtccaccatattttggtcatgtggtgctattttgttaagtgtcttttaggtcagtatagttgtagaacag

SEQ ID NO: 496105 - DNA, 428 bp, Homo sapiens
agcggctgcacggacaaaagcggaggcctgtaaggggaaactgaaccataaagaggttacttaatggcctcaaggtcacctacctgacctaccaccagctcaatggccttcccaaagaaaaaacttcagggtcttgtggctgcaaccatcacgccaatgactgacaatggagaaatcaacttttcagtaattggtcagtatgtggattattttgtgaaagaacagggagtgaagaacatttttgtgaatggcacaacaggagaaggcctgtccctgagcgtttcaaaccgtcgccaggttgcaaaggagtgggtgacgggaaggacaagctggatcaggtgataattcacgtaggaccactgaccttgaaggagccacaggaactggcccaacatgcaccagaccaaagatatcctgtttttcctggg

SEQ ID NO: 496106 - DNA, 1155 bp, Homo sapiens
gtatgaccatagtgaggggcgcagcgagccctgcgtatctagctaagtatggcctcaaccgtgttaagcgtcggaagatcacgtgggttcactgcagctaggtgccatggtactacgtcagacacatcatcgatggccgcggcgtagcactgtgcgcagacgtttcgaagagacaatctcaccagaattgaatatctcgcaggtctgtgtatcgcagtctatcgatgcagtgagtccctgagcgatacgtcgcagtattgccatggttattgaccatggtaagagctgggttggtcggaggggcgagtcggtcgtactggctcagcgaaagtctggggactggcgtctcgaccaccgaagggaatcctatgcatttaagataacttggcttggttgcacttaaaaccaatttaccggatgataggttttaaggcagactaggacaaattactttaaaatcgataggattccctcggtgggcctggactgcttaagttcccacagcgaaatcgctaggacccagcaaagggcgcactccctgccctatccgattcaaaacgaatgggtcgacatgggtagaggccaaggagcgctacggggctgggtttccagttgccggagccgactcaacgagggaggagagggcttggggagttcataggccaaatcccatggcggagacattcgtttaaccttccaactgccgagttgcgatcaatacgccatggtcgacaccggacagtttccgggggccattggcaaacaggggaaggccgcccgacacgggacggtctagagcaccctggggatcttcacccaacgttggggaaacctactgaaccggcgttctgctccctgcccttccattctcggcctgcagcgcctggaagaggctacgtgaagggcaactgaggaagcaggggattgtggcaggcgctgttgatgtgctgccgccggagcttgatggtcacgcggggcgcgcagattccattgggacctgtgggcaactggtgggggccaaatacttgttcacgcgaatggaacggttctgattcctgacagtcccccttccggtaaataaccctgtgggggttaatatggagatgggttaccatgcaagagagcccgttaatacaccttagctaccaactgaac

SEQ ID NO: 496107 - DNA, 355 bp, Homo sapiens
taatatcccaaagaaagtgcatccaagcgggaattggagatgcacgctcgcatctcatggagattaggccacctgcaaacacacacctgacctgtcctacatgctgagtaccactgtaggacccatcacctgtcccaatcagccatccccagctggggtgcagagaaatacttaaactgtgccccagtctacggtgactgtcttttctactgcgctgcagtcaagtggttggtcagactggcgagtctcatagacctgggtccatattctgactgtgtcctttatgtgctaactcacaccttggcctcttggcttctcttatctctcatgtgccctcacgtgtgccatgggtcca

SEQ ID NO: 496108 - DNA, 389 bp, Homo sapiens
agcgggggcgggcgccacggttgcccggtgaaggaaagcgaacaccgagtccggtgcccgtccctccgcggccccatccgcccggtgcacccggggtcgcgctcgacaggccgcgataggccatagctgggcgcaagaagcgtgcgccgggtacgggccggtgggcagtggcgccgatagggtccccggggtacttcagacggcgcgtctgtcggcagggtccgtacctctcgcgttgcaagtatggatcccgtggtgggtagcggccctggctccggggccagctcagcaggcagcaacgagacatgggctcgcatgcttggctttcatactacggccggggatcgttagtgccctgttccttgttcggtgactcagcgatctacgcc

SEQ ID NO: 496109 - DNA, 595 bp, Homo sapiens
aatatgaggactccaagacagaagtcagataaggctatagctgtaagagaatgatctttccatgtgaagaacaagactaaagagtcgtctagaacgtcgacgatcgctgacctacttgtgaaacaacacggaagtagacatactttagcaaaatgagattagaagagaaagaatggcgtcttgtaaagcatgaaaagatcactgaagagaatcaaagacacaaagaaagacatcagacaggtctcttccgtagaagagaaagaccgttcggaataaagcgagaaaaggagagatcgcatgaaggatagaagtctccgataagaagaaaattactgagactgtagcaaagaggagagaaagaagaaatctaaaagaccgggcctgcaaaattagagaagagagaatgatttaagaagagtgagcaaagaatttcaagaagagaaggacgaagatgtcttaagagaagataaagataaagaactcaaagaaagaagaggtttactaggggaagatgctggttgtgacgaactatcgtaatcggaatagatcagtgttctggagaatgagagacggcaaattttatggcctttctgag

SEQ ID NO: 496110 - DNA, 143 bp, Homo sapiens
caaacagtgtatagttagtgaatgtgtctgagaggaggagcttgataaatgtgtctgtagaggaggaggtgattgaatgtgtctgtagaggaggagctgaagaaatgtccgttagaggaggagcgtgggtggaatgtgtctgt

SEQ ID NO: 496111 - DNA, 671 bp, Homo sapiens
gcgtcgaatagttattgtgtcatatagcaagagattgtacttccattcagctggttaaagtacaaaatctattgatatggttggctgtgtccccaccgcaaatctcaacttgaattgtaccttccagaattcccacaggacccagggggaggtaattgaatcaagggggcggtgggtctattccgcactgctgattcttgtgataggtgaagtaaggtctcacagagatctgatggttttatcaggggggtttctgcttttgctgcttcttcatttgttctcttgctgctgccatgtacgaaatgccttgtcacctcctgtccagtgattctgaggcctccccgagccaggtggaagctataagtcgcaattgaaagctctgtttgggttcccagtctcaggtatgtctattgagtcagcgagcgatgaaagatggagtaatagtaccagtagagtggggcattgctgaaaagatagccgaaaatgtggaagagcaattgggaactgggtgttgacataatctggagggctcagaagaagataggaaagtgtaggaaagtttggaactcctagagactgtgaatgggattgacatgggatactgactagtgatatgagcactaaggtacaggctgaggtggtctcagatggaagctgaagaccttgtggga

SEQ ID NO: 496112 - DNA, 108 bp, Homo sapiens
tcgtgggtcctaccgtttttcctgttgtagatgcaaatggccgggtgggggggttggatgtggctggcagagtttggctttgtcgttggcttgtggacctgggcgtga

SEQ ID NO: 496113 - DNA, 135 bp, Homo sapiens
ccaagagtcaggtgatagtgcattcgggtatttaagaagggtttcagctatgaactgcgtatgtgctataagtgtgacggtaccataagttacttgaactttttaaaacgacggaacacctccgtgagatgacgc

SEQ ID NO: 496114 - DNA, 673 bp, Homo sapiens
tgctctgagcattgccacactgctgtagagcactccactgtcctgaccagagtcatcagtggtcctgacccccaatgtgggcatggggctgggcaggagggtggtggctctgcctgtgcggttcatgaggattcgcacactcctggactggtcttacctgactgtctgtcccatttttctcatgggatatctgcttggaccacgtaggacttttacgccttacctcctgaagacgcctgtccactgtcattttccctactgccatagataccctaagcccagggccaccttgaggcccagactcagcctgcccactggtgccggagacggatgtggagtgggcctggatccgagggatgctaccctctccctttcccacttgaggatccctggggagagatgggggcggggatacaactggaggtatgaattttggggtaacgaggaaagtgacgatctcctgcttgcagcgtcagcccctgccttgcagggcgggctggcttgactcaggccctgtgagatagagggcccagcccagccccacccacagatccctgctcctgttgtgttctgattgtaaatcatttggcgagactgtatttaagtcactgctgcctaattccttggtgtttctaataaacgcccaggcgcctgtctggataacgttcatatt

SEQ ID NO: 496115 - DNA, 634 bp, Homo sapiens
  misc_feature (41)..(41): n is a, c, g, or t
  misc_feature (45)..(45): n is a, c, g, or t
aattcgcggccgcgtcgactacgctgcgagaagagacagangggnctctcggccttagcgccatttttttggaaacctctgcgccatgagagccaagtggaggaagaagcgaatgcgcaggctgaagcgcaaaagaagaaagatgaggcagaggtccaagtaaaccgctagcttgttgcaccgtggaggccacaggagcagaaacatggaatgccagacgctggggatgctggtacaagttgtgggactgcatgctactgtctagagcttgtctcaatggatctagaacttcatcgccctctgatcgccgatcacctctgagacccaccttgctcataaacaaaatgcccatgttggtcctctgccctggacctgtgacattctggactatttctgtgtttatttgtggccgagtgtaacaaccatataataaatcacctcttccgctgttttagctgaagaattaaaaaaaaaaaaaaaaacatgtcggccgtttggggccgcctgagtctagactaatctagactatgcatgctgatgcatgcgggcgtaattggagcttacttgctatattgagcctatttacagtcgacttacacgtcactgacagcggtttgacatggctgttgccaga

SEQ ID NO: 496116 - DNA, 460 bp, Homo sapiens
  misc_feature (30)..(30): n is a, c, g, or t
  misc_feature (437)..(437): n is a, c, g, or t
gcagtggtatcaacgcagagggcccattanggccggggtctctcggccttagcgccatttttttggaaacctctgcgccatgagagccaagtggaggaagaagcgaatgcgcaggctgaagcgcaaaagaagaaagatgaggcagaggtccaagtaaaccgctagcttgttgcaccgtggaggccacaggagcagaaacatggaatgccagacgctggggatgctggtacaagttgtgggactgcatgctactgtctagagcttgtctcaatggatctagaacttcatcgccctctgatcgccgatcacctctgagacccaccttgctcataaacaaaatgcccatgttggtcctctgccctggacctgtgacattctggactatttctgtgtttatttgtggccgagtgtaacaaccatataataaaacagggaanaggcggccggtcgcgcggccgcg

SEQ ID NO: 496117 - DNA, 429 bp, Homo sapiens
  misc_feature (264)..(264): n is a, c, g, or t
aaagaagtccatctcctctcgcacttcttatgtgagtcgcacaggtagggatgctcataggctttcacttcgtcgagatccttgctgtctcctgcgttaggactatgtatcctatacaggttatactaatttcgtgggttacaagataagttgtttgtatagcttgctaaagtggaggtcgcctcgtccaagtcgtcgagcagctttaggtttatctgatttcgcaagatggaccatacgtagtctcacacatagtcgtgtccnatagtctttgagctgatctgcgtcatcagtgagtatgtctctccatcgatcctaggggctctgtgtaggttcatcttgatttcataaagccgtagattgactttcagttagcaacagcaggttcaaggtcagctttacatctttcatcgtgaaagccaggtatgg

SEQ ID NO: 496118 - DNA, 718 bp, Homo sapiens
  misc_feature (13)..(13): n is a, c, g, or t
  misc_feature (495)..(495): n is a, c, g, or t
cctgcgttgggangccgtgtacaatccatagacatctgacctcggcacttagcatcatcacagcaaactaactgtagcctttctctctttccctgtagaaacctctgcgccatgagagccaagtggaggaagaagcgaatgcgcaggctgaagcgcaaaagaagaaagatgaggcagaggtccaagtaaaccgctagcttgttgcaccgtggaggccacaggagcagaaacatggaatgccagacgctggggatgctggtacaagttgtgggactgcatgctactgtctagagcttgtctcaatggatctagaacttcatcgccctctgatcgccgatcacctctgagacccaccttgctcataaacaaaatgcccatgttggtcctctgccctggacctgtgacattctggactatttctgtgtttatttgtggccgagtgtaacaaccatataataaatcacctcttccgctgttttagctgaagaattaaanctatagtgaggccgatacaattactggcccggcggttaaaacgcgggactgggaaaccctgggggtaccaacttaatgccttggagaattccccttttgcgctggggtaatagcgaaaaggccgaccgaaacgcttcccaaaaatgggcaacctgatggcaatggaaatgtaacgtaatttttgtttccgggaaattttgttaactcattttaacaatggccg

SEQ ID NO: 496119 - DNA, 465 bp, Homo sapiens
  misc_feature (447)..(449): n is a, c, g, or t
  misc_feature (451)..(451): n is a, c, g, or t
  misc_feature (454)..(454): n is a, c, g, or t
  misc_feature (457)..(458): n is a, c, g, or t
  misc_feature (460)..(460): n is a, c, g, or t
gcggccgcctactactactaaattcgcggccgcgtcgactggctctcatggcgcagaggtttccaaaaaaatggcgctaaggccgagagccaagtggaggaagaagcgaatgcgcaggctgaagcgcaaaagaagaaagatgaggcagaggtccaagtaaaccgctagcttgttgcaccgtggaggccacaggagcagaaacatggaatgccagacgctggggatgctggtacaagttgtgggactgcatgctactgtctagagcttgtctcaatggatctagaacttcatcgccctctgatcgccgatcacctctgagacccaccttgctcataaacaaaatgcccatgttggtcctctgccctggacctgtgacattctggactatttctgtgtttatttgtggccgagtgtaacaaccatataataaatcacctcttccgctannncngcnganncncattt

SEQ ID NO: 496120 - DNA, 492 bp, Homo sapiens
tgccctggctgtatcttgagtgctctagaggacaaggtcctcatgatctcatgctggaaagatgttcaccacgcatacttagcttgtccaggcttgttatgattccccctttcaattcctaaatttgtgatttgcctggctttctaaaaaatggatcttggagagcctgtgttgcctttgggcaaggcctctttaacagaggaaacgtgctagattgcctgctattatggcccatgctaaagcacttacctttaaaaaaaaatggttctagttaacttccgaacttaaaatccccttactaattaagtaacattttaataggaaacactataggtgccttagaagaacgtagaaaccaaatggccatcttttttgctgatgggaaaatattgagactaacatttgactacagaagatatcttactcccaactgctgaaggcagaactttcctcatcacagaagtagcagtagaaaaacttaaaaaggaaaag

SEQ ID NO: 496121 - DNA, 473 bp, Homo sapiens
  misc_feature (13)..(13): n is a, c, g, or t
  misc_feature (472)..(472): n is a, c, g, or t
cctgcgttgggangccgtgtacaatccatagacatctgacctcggcacttagcatcatcacagcaaactaactgtagcctttctctctttccctgtagaaacctctgcgccatgagagccaagtggaggaagaagcgaatgcgcaggctgaagcgcaaaagaagaaagatgaggcagaggtccaagtaaaccgctagcttgttgcaccgtggaggccacaggagcagaaacatggaatgccagacgctggggatgctggtacaagttgtgggactgcatgctactgtctagagcttgtctcaatggatctagaacttcatcgccctctgatcgccgatcacctctgagacccaccttgctcataaacaaaatgcccatgttggtcctctgccctggacctgtgacattctggactatttctgtgtttatttgtggccgagtgtcatctcagcggggatcctaatagagtcgng

SEQ ID NO: 496122 - DNA, 439 bp, Homo sapiens
  misc_feature (71)..(71): n is a, c, g, or t
agaaggctcacgaagggcatccgcagcctgcctgctgacaacacctaggctgattttagataaagccgttntccggtgctcgaatgcgcaggctgaagcgcaaaagaagaaagatgaggcagaggtccaagtaaaccgctagcttgttgcaccgtggaggccacaggagcagaaacatggaatgccagacgctggggatgctggtacaagttgtgggactgcatgctactgtctagagcttgtctcaatggatctagaacttcatcgccctctgatcgccgatcacctctgagacccaccttgctcataaacaaaatgcccatgttggtcctctgccctggacctgtgacattctggactatttctgtgtttatttgtggccgagtgtaacaaccatataataaatcacctcttccgctgttttagctgaagaattaaa

SEQ ID NO: 496123 - DNA, 769 bp, Homo sapiens
  misc_feature (27)..(27): n is a, c, g, or t
tcgccatctcctgcctcccccaccccntgctccctcctcctctccccccctgacccctccaggccccacagacaccgagatttcagcccctacgtgtcagccgacatgcataggatggcggcagccttcaataccacggtggccgccctggaggacgagctgacgcagctaatcctggaggggctgatcagtgcccgtgtggactcacacagcaagatcctatacgcccgggacgtggatcagcgcagcaccacctttgagaagtctctgttgatgggcaaggagttccagcgccgcgccaaggccatgatgctgcgggcagctgtgctccgcaaccagatccatgtcaagtccccgcccagagaagggagccagggggagctgactccagccaacagccagtcccggatgagcaccaacatgtgaggggtgaaccttggcctccaggacatctgcaccccctccccacctccacggacctcggacctccaggcggctcagtgctgcctgcggcccagctaaggggcctggccactgggtgccacccagcctgtgtgccctccctggggctgaggaggcaggcggctgctagttgtggcccttcctggaaggagaggcctgcagggctcgaccctgtgggtttctgtccccagggagcagactgtgcggcacccaggcccagtggcaccatttcccagacccctcctgttcccgcctcagtcaggtgcagacaagtgggcggtgtccattaaagagcagactcagcgtt

SEQ ID NO: 496124 - DNA, 304 bp, Homo sapiens
  misc_feature (116)..(116): n is a, c, g, or t
  misc_feature (125)..(125): n is a, c, g, or t
  misc_feature (276)..(276): n is a, c, g, or t
tatgggtgatgatgtgggagtgatggatcagcatcgtgggttagttatcagagacacatttagaaagtggtctgatgatggtcaaatgcagagaaagcgtaagctagaaagtaagngccagatanacttaaaaacagattaccaagggattcacagcaaccattctattggcgcatccacacacagactgggaatgagaaccaagactccagaactggctagaactgggttcagagtctgacagtgctcttcgtagcccacatgcttctttcctgnacttgtaaatttctgggtacacagtgag

SEQ ID NO: 496125 - DNA, 974 bp, Homo sapiens
  misc_feature (5)..(5): n is a, c, g, or t
  misc_feature (7)..(8): n is a, c, g, or t
  misc_feature (10)..(11): n is a, c, g, or t
  misc_feature (30)..(30): n is a, c, g, or t
gcctncnncnnctactactactactaaatncgcggccgctcgacaaaagaagaaagatgaggcagaggtccaagtaaaccgctagcttgttgcaccgtggaggccacaggagcagaaacatggaatgccagacgctggggatgctggtacaagttgtgggactgcatgctactgtctagagcttgtctcaatggatctagaacttcatcgccctctgatcgccgatcacctctgagacccaccttgctcataaacaaaatgcccatgttggtcctctgccctggacctgtgacattctggactatttctgtgtttatttgtggccgagtgtaacaaccatataataaatcacctcttccgctgttttagctgaagaattaaaaaaaaaaaaaaaaaaaaaaaaaaaaaaaaaaaaaaaaaaaaaaaaaaaaaaaaaaaaaaaaaaaaaaaaaaaaaaaaaaaaaaagaaaaaaaaaaaaaagaagggggggggcgtagtatataaatattactccggagaggagaccaaaatgatgagtacaccagtagattttgttcaaaaagaggggaccatcaaacaagggagttattaaacagaggaagacgagggcggctgtaaaaacaagacgtgagtagtagaaacaatgtcatgggtgattcttattgagaggagacagcaatctattgggtggggtgaaagaatatttagtgggaggacgacacaacactacagaaagtatttaactcactggccggggaggaataaaaaactaaagaaggtttagttacggtggaaacaccacagcagattaatggcggcggagataaaaaagtcatcgaccaaagagattgttacttaaacaaaattttaggcgggctatcttaagatgaagaaagaacgatagaagcagaaagaagaagagagagagagtagagagagagaaataagagaaagaacgaaaagaagataagac

SEQ ID NO: 496126 - DNA, 1067 bp, Homo sapiens
tctctgaagttccagaatcgatggaagtggacggcacgccgcggcggggtgggtgcaagatgccgctgccggttcaggtgtttaacttgcagggggccgtggagcccatgcagatcgacgtggacccccaggaagacccgcagaatgcacctgacgtcaactacgtggtggagaaccccagcctggatctggaacagtacgcggccagctacagcggcctgatgcgcatcgaacggctgcagttcattgctgatcactgccccacgctgcgggtggaggccctgaagatggccctctccttcgtgcagagaacctttaacgtggacatgtacgaggagatccaccgcaagctctcagaggccaccaccagggagctgcagaacgcacccgacgccatccctgagagcggcgtggagcccccagccctggacacggcctgggtggaggccacgcggaagaaggcgctgctgaagctggagaagctggacacagacctgaagaactacaagggcaactccatcaaagagagcatccggcgcggccacgacgacctgggcgaccactacctggactgtggggacctcagcaacgccctcaagtgctattcccgggcccgggactactgcaccagcgccaaacacgtcatcaacatgtgcctcaatgtcatcaaggtcagcgtctacttgcagaattggtctcatgtgctcagctacgtcagcaaggctgagtccaccccagagattgccgagcagcgaggagagcgtgacagccagacccaggccatcctcaccaagctcagtgctgcctgcggcccagctaaggggcctggccactgggtgccacccagcctgtgtgccctccctggggctgaggaggcaggcggctgctagttgtggcccttcctggaaggagaggcctgcagggctcgaccctgtgggtttctgtccccagggagcagactgtgcggcacccaggcccagtggcaccatttcccagacccctcctgttcccgcctcagtcaggtgcagacaagtgggcggtgtccattaaagagcagactcagcgtt

SEQ ID NO: 496127 - DNA, 852 bp, Homo sapiens
gctgtgtgcatcgcacattcggcttggtgaaatccttctctaaagcctgcttttcgtatttttataactaaacagaggaagtcttcagaagacctcgctttagaaacaaattggtgcaaggcactgcatagagtcatttgaagctcagagcagttttcacttggtttcgttacatgtgtactttttagtttacttgtgaaaatggccatctttaagcatatttattttctgccactttatttaaaggcaagcaatattttgttgatcatagaatagtttgtaatgaaggtacttcctcttttccagggcgttgtatgcactggtataattacatgagtggcaatgtagagtgtgaatctcaggtctgtaaatactttttggaaaatagaaattttcatgctttaaagtttggatatgggtggttttcttttccgggttgggtggaagagtaatttgacgaactttaatggttgtcttgtttagctgtggcaacaagtgtgatttgttaatattagataacacgagtaacgaaattctcccagacattagtagtaagtggggtctttgtgggtcgggacgtagtttgactgtagcaagacttactatcagtctgttattgcaagggttgtgacgaatgcctggcgcacaagatcagactggtatctggacttactctttcataaggtcccaacagaaaaaaaaaaaaaagttggggccggccaaaccaaacatcgggccggccaggaagcaggcacgccaaaacggggcggggggcccaaaaccggaccgcgaacaggggggcggtcagacaaaacgcccgcagaaaaaaaagacaacgacacagcaaataag

SEQ ID NO: 496128 - DNA, 440 bp, Homo sapiens
  misc_feature (13)..(13): n is a, c, g, or t
cctgcgttgggangccgtgtacaatccatagacatctgacctcggcacttagcatcatcacagcaaactaactgtagcctttctctctttccctgtagaaacctctgcgccatgagagccaagtggaggaagaagcgaatgcgcaggctgaagcgcaaaagaagaaagatgaggcagaggtccaagtaaaccgctagcttgttgcaccgtggaggccacaggagcagaaacatggaatgccagacgctggggatgctggtacaagttgtgggactgcatgctactgtctagagcttgtctcaatggatctagaacttcatcgccctctgatcgccgatcacctctgagacccaccttgctcataaacgtgtttatttgtggccgagtgtaacaaccatataataaatcacctcttccgctgttttagctgaagaattaaa

SEQ ID NO: 496129 - DNA, 986 bp, Homo sapiens
tctctgaagttccagaatcgatggaagtggacggcacgccgcggcggggtgggtgcaagatgccgctgccggttcaggtgtttaacttgcagggggccgtggagcccatgcagatcgacgtggacccccaggaagacccgcagaatgcacctgacgtcaactacgtggtggagaaccccagcctggatctggaacagtacgcggccagctacagcggcctgatgcgcatcgaacggctgcagttcattgctgatcactgccccacgctgcgggtggaggccctgaagatggccctctccttcgtgcagagaacctttaacgtggacatgtacgaggagatccaccgcaagctctcagaggccaccaccagggagctgcagaacgcacccgacgccatccctgagagcggcgtggagcccccagccctggacacggcctgggtggaggccacgcggaagaaggcgctgctgaagctggagaagctggacacagacctgaagaactacaagggcaactccatcaaagagagcatccggcgcggccacgacgacctgggcgaccactacctggactgtggggacctcagcaacgccctcaagtgctattcccgggcccgggactactgcaccagcgccaaacacgtcatcaacatgtgcctcaatgtcatcaaggtcagcgtctacttgcagaattggtctcatgtgctcagctacgtcagcaaggctgagtccaccccagagattgccgagcagcgaggagagcgtgacagccagacccaggccatcctcaccaagctcaagtgtgcgaggttggaaaactggcgcaggagtaaagcgggggcagtgctctgggggtccttgtcactggattcctgagtgtgtaccaaacgggcctaagggcgtgcctgaacttgacgggaaggggagttccccgcctcatgttggggggcggggaattattaaaaacccttaaggaaaaaccgtttc

SEQ ID NO: 496130 - DNA, 337 bp, Homo sapiens
  misc_feature (5)..(5): n is a, c, g, or t
  misc_feature (7)..(8): n is a, c, g, or t
  misc_feature (10)..(11): n is a, c, g, or t
  misc_feature (30)..(30): n is a, c, g, or t
gcctncnncnnctactactactactaaatncgcggccgctcgacaaaagaagaaagatgagcaggagcagaaacatggaatgccagacgctggggatgctggtacaagttgtgggactgcatgctactgtctagagcttgtctcaatggatctagaacttcatcgccctctgatcgccgatcacctctgagacccaccttgctcataaacaaaatgcccatgttggtcctctgccctggacctgtgacattctggactatttctgtgtttatttgtggccgagtgtaacaaccatataataaatcacctcttccgctgttttagctgaagaattaaa

SEQ ID NO: 496131 - DNA, 332 bp, Homo sapiens
gagagagagagagagagagagagagagagagagagagagaggcaccgtggaggccacaggagcagaaacatggaatgccagacgctggggatgctggtacaagttgtgggactgcatgctactgtctagagcttgtctcaatggatctagaacttcatcgccctctgatcgccgatcacctctgagacccaccttgctcataaacaaaatgcccatgttggtcctctgccctggacctgtgacattctggactatttctgtgtttatttgtggccgagtgtaacaaccatataataaatcacctcttccgctgttttagctgaagaattaaa

SEQ ID NO: 496132 - DNA, 544 bp, Homo sapiens
tggcgagcggactcgactcggcacgttgtgcaccatggccccgggccctgtgccgtctcccgcggcgcggctctggtgtcctggccatcacctcttcgtgagcactgcctgcaggaggtgaaactacggtgccctccttccgggagctccgtgccgttcacccaggttccatggtagtacatggttggcggtctggggagaggctcgtggtgtgactggggcagggcgcgggtcgaggagagctacaggtagcggtggcgatgtgcaccctgtgcaactattggctggactaagctggggctggttcttggcccactgcgaggtggccgggttcttccttggcatgtgctggccgatctttctagtgagctgaccctatctcatggcgagggccgtgtgggctccggccgtgtggcgttactcgtaccctctttcatcgtggtccctctgtgcacgggtgacgcctgctggttgaccggcagtggtggcactggcggtaggcaatgcggcgctgtgggcatggggtgggcgggggccctatgtt

SEQ ID NO: 496133 - DNA, 263 bp, Homo sapiens
  misc_feature (179)..(179): n is a, c, g, or t
  misc_feature (197)..(197): n is a, c, g, or t
  misc_feature (209)..(209): n is a, c, g, or t
  misc_feature (233)..(233): n is a, c, g, or t
taccacacgaggctaatttttgtatttttagtggtagagacggggtttcaccatgttggacaggctggtctcgaactcctgactcaggtgatccgctcgccctggcctcccaaagtgctggggttacaggcgtgaaccaccacgcccagcctctgttgaatctttatacccctcatggnaccaagcacactgtcatnatgcaattaatnaaactggacatcttgagagaagtncctagactgcctgcagagggcatctaaaga

SEQ ID NO: 496134 - DNA, 127 bp, Homo sapiens
ctcaacgctttatacttcagttcacaatattcagatgtcattttttctttccccatttcctttgggggaggtttctcttaaaaggtcttcagaaatggcctcattaacgggtccattctctatggcg

SEQ ID NO: 496135 - DNA, 124 bp, Homo sapiens
aaggcacgatggcgcgtcctacggaaggctcagcgcgtgttttccaccaccgcgactcgtgaaggggccctgactgcccccgcctggggcatacaggcgcacactgcggaggaggtggatctgc

SEQ ID NO: 496136 - DNA, 541 bp, Homo sapiens
gaaaataaaggtataacctgggggtgaatctgggtaatggaatttcataagggtttagattttctgggaaaaaaaatggaagctttaatataatgaatccccagctttggggttaacccccccccgcccccaaccacccttttgttttttttttttttttggaaatggcaaaaccttgtaaaaaaaaccaaagcctcctttgaaaataacttttagcctttttccccaataacccataaacaaaattttccccttccccccatatgcgggaactgccggtaaaagccttgtgaaaacccaatggggggatccccgcttaaatctaagtttaaaacccccccgttaggagcctgaaaaaggcccgggggggaatttttccccccccaaaatcccccaatcctcccaatttgggctcctccttgggcagttaaccgttcaacatttaccggcccccccctggtacaaaatgttaaacaggtcttgttaacaaaaaagtccccccttggaaaaaaggttcccccaaaatctctttttttaaatt

SEQ ID NO: 496137 - DNA, 166 bp, Homo sapiens
attgggtcagtggcacaaaattatgggagcttagggagctacaattcaagatatgatttgggtggggaggagagcaaaccatatcacaagcaccattgttttgctaaatagtaggttgttatactaaagaaaaagggcattagaactatagatgatgatatctaat

SEQ ID NO: 496138 - DNA, 268 bp, Homo sapiens
tcagcagtcctcctgcccggcctcccagagtggtgggattatagacaccatgatcaattacgagccaccatgcctggcattagctagatcttctggatgactgctgcagcttctccactagtactggctgcttcacttagcacttttatgttacagagacagcttatttccttaaacctcatgaaccaacttttcttccgcagcttcctcacctctctgtcttcacagaaatgaggcgagttagggcctcactctggattaggctttg

SEQ ID NO: 496139 - DNA, 968 bp, Homo sapiens
gcgtccatttgtgagaatgccaggcgctactgcgaagctctattgctgatgccgtacaagagtctgctgtctcagtacaaggagagggaagtggtaccataaagatgtcctggtacgtttacattgagcatcggctaatgatggagcagcggattcgggaccctgggatggtccgaagcccccagaagcagtaccctgctgaactcatgcgcagatttgagctgtattttcaaggccctagcagcagcaagcctcgtgtgatccgggaatgtgctgggctgactctgtgggcgaccgttcggtaactgtgcgctggaatcgtcactcgatgtctctgaagatcagatcccaagatggtggtggccacttacacttgatgactcagtagtggcggcaagagacataccagactgatccagtcatacctcaacgttatcactgcctctgaatcatgtagcccaaagcccaggagtgccaaagtcgaacgctcagtgagggcggctgtatctgcatgacacggaggcttccagcacttccatccaaatttccacggagcactgacacgcatcgcaagcacccactaaggtgactcgaaggtgccctgttggggaacatactccactcgataagtaactcaccggctggctaggttacaacggagaagaaccaaccacagcgaatatagcccccagtaccttctcacaactcaaaccacaacaccctcacactcgcctccttcccccattcggaccaatatccccttatcctcactgccacatcccctacccacgacaacaccaagcgactactaacctcactccaataaaaaccactccacctaataaaacccccacaacttcacaataagctataaccccactcacaacccaccccaccctcacagacatcacatccacccccatccaacacacctaaccacaacccaaccacaaaacacaaacaacaaa

SEQ ID NO: 496140 - DNA, 279 bp, Homo sapiens
  misc_feature (29)..(30): n is a, c, g, or t
ttgtgggggggggggggggttttttgtgnnacacccctttcccccccccttaggggggggcgggggttttttttgcctttcccccatttttgggttttcccctggcggggggccccctggaaaaattgggggggggccaaattcttgggggggcgcccccctccggggtgtttgttgggttttcccccccccccccttttcccccccccctgggtgggggggggctttttgggggccggggttccccccggggggtttaagcccgggtttttttcccca

SEQ ID NO: 496141 - DNA, 145 bp, Homo sapiens
  misc_feature (58)..(58): n is a, c, g, or t
tggatccccggacttatcgcccaacactttggaggcaaagataggtggtcacttgtgntcaggagttgagacaggcctggcaacatggtgaaaactctgtctctactaaaaatacaaaattagctgtgtgtggtgttggggataa

SEQ ID NO: 496142 - DNA, 254 bp, Homo sapiens
cggggatggcaaagaagcccccttcccccccccccctttttgtaatgtttgtaataaatttcaggggggcaggatggatgaaccccagatcccgtgaatgattcagctgttcccagccctaccttttccctcattcatcaccccttttccttcaggggaacctcttgccctattgtggtttattttttgtaaaacccggttatgtttttttttttttaaaatgggcctatgtaataaagtttcccccctggcca

SEQ ID NO: 496143 - DNA, 767 bp, Homo sapiens
gttctcttttctcccttctcactttttcggctatcgggtctttctcttagcgcgctcttccttttctgtgtttcagctgggcttcgtcgaacgtattccagccctccgattgtgattgtcccatgtttcggatccatgatctaggacatttgcattactattcgccttgttcatggaagcgcacactcttgtaaacgagtaaggatccccgctggttaatgcctttacccaattgttcttgtaccctctggcaccttctcttcgcctctttacctctgtcccgctccccccttcggtctgtatcgacttctgtcttctgtctcctggtaagcatcccctcggaactcagcgcctcttttcacggtgttgtgctgggagctcgggcctcatcccacctctctgggttacctgcctctctctctcctgtggtgtccgttccctctcccatgtgctcggtgttcagtgtgtgtatatttcttctcccagacatggggcacacgccctcaggggacacgatcctctccttagtcttagctcatggggctctttataaggagttggggggtagaagcaggaaatgggaaccacgagacgtgaagtcagaggtctgagttagggcgttaagaggacagatgctcctggctcacccagcttctgctgagaaccattcactgggattagagctgccctccccagggaaaaagtgtcgtctccgccgaccctcccgatggggaccatgtggtgtgatgcctgtgtctgataatccc

SEQ ID NO: 496144 - DNA, 332 bp, Homo sapiens
ggagacttgttttactcaaaggggaaaattttgcccggggcaaagtcaccccaaagaaacaaacaccaaaaaattgcccgaaagagaacagttaagtgcagctcggggagtcccggcagttccttcccggcactggctcgtccctgggttttaaagggtccatgcgggcacagggtccgtccacctgtccacgcgagccacatgctgaaatggggggggataaaattcatcaggcagctgctgtaacacggaaatgtgcaaatgccaaagtagcttcttctgaacttgaacaagacagacaaaagggaatctttccataggctgaaaaaaaa

SEQ ID NO: 496145 - DNA, 127 bp, Homo sapiens
aagctcgaagagggggtctgagtttcttcctctctctccctcaacacaagcctgttcccaggttctagctttgtctccctgtaagctactgccaggactctggtctggccaccatcatcttctccct

SEQ ID NO: 496146 - DNA, 1615 bp, Homo sapiens
gtgtctgcttcgctgttggtaacgctcgctgcgttatctggtcgtgtggtctgtctcgctctacctagctgctgtggggtctcccacacgcgggggtccactcatgggtcgatcctttgtgtgcgcactctctgttgttgttgtgggcggccagctgcgtgtgtagtaaggggtgttgtgacctccctcgaacacaggggttgtgtccccccgctatgttggtgatttggggggccaccaccgggtgcgccccccccggcgccgggcacggtttttccgccgcaccgatgttttggcccccgtgtgagtttttcctacatcctcccgctgttgagtccccctcgttcttgtcttcgcgaggcccttctccacggaggacatctctgttggggaggtggcctcgtttttccttccccagtgtgcccggtgctcccctcaaaatggttgccgccgcgttctattttgggcgccgccttggtcacacgagtcgttgggactgacgccacagtctgttcggtagccccactcggtggggccagacagagtgttttgcaagaggcgaccccagggtgtggtcaaacacatacacgggggggagctgtgtcgccctgtcgtgacaggttgtcgttttatcacggggtgcttttcgctgtgcgcgctgtgggctctcgattgtgtggggtgttcccgtctttggttccggcggaaagttgtgtggggggaatgccgcagcacaccggtgtggaggggccccctgtctggtggtgcgtgccttgtcccctctgctgggacgcgctctgggctccacacacgggttctacgcggggagtggtcctcccttgtgttttggggcgcgtttctttgtggtgtgtcgtgttggtccgtctgtgaccttttttgggagggggccccccctcgggggagcccactcatcttgttggacggcgcgcgcggagagtgtggggtggggagaacccctccccctcggtcactatgtatacacccgcttttttctcggtggggccactgccgcgctgtgtgctgcgccccgcgccccgcgcccactctgtggccacagctttgttgagactctctctacccgcgccgggtgtgtccacgcagatatgccctcctctcgcggagagggcacattgttggcaccacagagccgcgcggctttcccacagagaagttggcccacacacacacacactcgcgtggtgttcactaagacgtctcacagggacgccacagggtgttgtggcgccaccgcgctcacaagcgcacacgtgtctcacaccccgtcactacctcacacagagagatctctctgcacacacaggcgccccacacaggcgctatagaggttctccctgtgtgagaggcgctcttgcgcacaagatctcctcaattcctcgtgtgtcccacgagggtgtccctctctgggcgcaccacaacccgcaaccctctttcacacttcttcctccacgtgggtaagcacctgttgtgattttttgagaaacttttaaaacttgtgtttctggttttgctggttcttgatcccaccctttggttctggcaaccctcattccattaagacccctggagaacccca

SEQ ID NO: 496147 - DNA, 154 bp, Homo sapiens
aatggaacatacgatgatggagcaaccaaactcaatgatgaggcacggcggctcattgctgatttggggagcacatctattactaatcttggttttagaagcacaactgggctcttactgtggtcgggacagggcattacagacacaaaagccc

SEQ ID NO: 496148 - DNA, 150 bp, Homo sapiens
actatcagctgatggaagactagtcatcagtcaactgaagggttgtacaattattgctggattgagttactctgtgattcatcaatacagtcagttttcattgtctagtaatagtcattgtaagggatcactagcgcgtcgtacattaca

SEQ ID NO: 496149 - DNA, 974 bp, Homo sapiens
cagcggaggccttcgaccgatccctcgccgtccttcaccatcgcacgccaccgacaccccatctctcgaaatctgcagacatcttgatttattcccactgctgtctgtcaggtctccgccgaccacatacgacgccagtggcgccgaggatgagtccacagcactggctgcattgtcggctccactctcacccatacgggggaaactgagagccccggggaaacgcgtgccagacgagtgtcaggcacctgtcacttggttgcagttgtcatcggtcctctttatagcacggcagtgtagccccgccaaggaatatcgcagttgatccgctccggcgaaacggacacctagggacaaaggcctttgctgaggcctggtgcctcgcaacccatcgggaacggatatcgaaaccaaacacaatacgacccattctctcatccctgacaaggcacctcatgcattcttgacacacgccacatgcaagggggctttccagagttgatacctgcacaggggatgcgaagagcattggccccccatggggacgttgatccaccaatgtagatggccggacccacccacatgtcgctcttgcaagagtgctcttcgccttcatggggacaacagctactggaatacccagtcgaaacggataccacaagtgagccacaaaccaaagacagtgatagcaaccatgcataccatgcatcaactgtacccccaagcaggggccccacaagggtctacagctaggtcacacttccaaagaccggaagcgacatgaagcgaatgctcgagatggccacgactacaaaaggcgacgaaggcccacgacgctatagccacacgctgacacacaccaccccacacgacgcgacagtaagatccacagactggacgctcaacaaggagcgacggagacagacacagagaaagcaggccacgcgccgcacaagcccacgaaacaccgacgc

SEQ ID NO: 496150 - DNA, 709 bp, Homo sapiens
atgacaatggcggtttgtggaatagaaggggggaaaggtggggaaacagattgagaaatcggatggttgccgtgtctgtgtagaaagaagtagacatgggagacttttcattttgttctgtactaagataaattcttctgccttgggatcctgttgatcggtgaccttacccccaaccctgtgctctctgaaacatgtgctgtgtccactcagggttaaatggattaagggcggtgcaagatgtgctttgttaaacagatgcttgaaggcagcatgctcgttaagaatcatcaccactccctaatctcaagtacccagggacacaaacactgcggaaggccgcagggtcctctgcctaggaaaaccagagacctttgttcacttgtttatctgccaaccttccctccactattgtcctatgaccctgccaaatccccctctgcgagaaacacccaagaatgatcaataacaaaaactacaacaattaaacaacacaacaagttacacacaatatatatatataaactaattaattttaaccagacaaatgataattggtgcatattcatggggtacatagtgatgtttcagtacatacaatgtttagcgatcagatcagtgtaattagcatggccatcttctcaaacatttataattcttggtgttaggaacttttaccatcctccttctagctatttgaaactctgta

SEQ ID NO: 496151 - DNA, 258 bp, Homo sapiens
aaaactcaccttaaattttaaccaccaccagagggaggggattttatttttggttattgtggggggtttaaaaaattccccccatgaaattattgggacccccttgttttggggtccctgtaacatttggggggggggacaggggggaaaagaaacaaagtccccatgccccgggcatttgttcaaaccggggggcaaaatgtaaggtttttttgtaaaaaacgttttatgatttttaaaaaaaatttggggccccca

SEQ ID NO: 496152 - DNA, 385 bp, Homo sapiens
  misc_feature (10)..(10): n is a, c, g, or t
taggccgtanttatatcacagctcatctgattttctttctttttctttctttctatcttctctctctcgcgctctctctctctctctctctcccccttcctccctccctccctctctctctctctgagagatggggtctcactatcttgcccaagctggtcttgcactcctgggctcaaatgatccacctgccgttggtctcccaaattgctgggatctcaggcatgagccactgtacccggtctcaaaatattttttaacagaaatagcagggtgtggtgatgcctgtagttacagctactcaggaggctgaggtgggaggatcacttgagactgagaggtagaggctacagtgagctgtgatcgcgctactgcactccagcct

SEQ ID NO: 496153 - DNA, 146 bp, Homo sapiens
ctgctaaaattttccagttgataagcagcaggtgctgagagtctggatcagaacaaaaggcaggcagccgggatcccactcgccttccatgagctctccgcagctcaccgtgccatcacttgaagcacacactcctgagggagctg

SEQ ID NO: 496154 - DNA, 315 bp, Homo sapiens
gcggccgcctactactactaaattcgcggccgcgtcgaccaggagcagaaacatggaatgccagacgctggggatgctggtacaagttgtgggactgcatgctactgtctagagcttgtctcaatggatctagaacttcatcgccctctgatcgccgatcacctctgagacccaccttgctcataaacaaaatgcccatgttggtcctctgccctggacctgtgacattctggactatttctgtgtttatttgtggccgagtgtaacaaccatataataaatcacctcttccgctgttttagctgaagaattaaa

SEQ ID NO: 496155 - DNA, 414 bp, Homo sapiens
gagagagagagagagagagagattgagcgtgcccttctcccccctcgtccctccttggtcgttcgttccttgagttgtctcctcttctcccgcccgctgttgctctctttccggcccctgtcttgtcctctccgtgtccctcgctcttctcttccgtcttcctcctccttctctcccgttcccccccgctgtcctttctcttccctcccgccttctcgtccccttgctgtctctctcgcagtcctcacttttttccagtcctagatattcttaccacttcacctcacccgccttgacttaccatgctccctgatcccctccctcctctccttcaccaccacattctctgccggtattactatacactacactcttacccctgtccatctcagatcttcacatccttttccctcg

SEQ ID NO: 496156 - DNA, 299 bp, Homo sapiens
  misc_feature (16)..(17): n is a, c, g, or t
  misc_feature (272)..(278): n is a, c, g, or t
aattcttcagctaaannagcggaagaggtgatttattatatggttgttacactcggccacaggagcagaaacatggaatgccagacgctggggatgctggtacaagttgtgggactgcatgctactgtctagagcttgtctcaatggatctagaacttcatcgccctctgatcgccgatcacctctgagacccaccttgctcataaacaaaatgcccatgttggtcctctgccctggacctgtgacattctggactatttctgtgtttattnnnnnnngtcgacgcggccgcgaattta

SEQ ID NO: 496157 - DNA, 318 bp, Homo sapiens
tttttttttcaacaggtcaaaaagaacctttattactttttatgattgccacttatgctttctcaggagcagaaacatggaatgccagacgctggggatgctggtacaagttgtgggactgcatgctactgtctagagcttgtctcaatggatctagaacttcatcgccctctgatcgccgatcacctctgagacccaccttgctcataaacaaaatgcccatgttggtcctctgccctggacctgtgacattctggactatttctgtgtttatttgtggccgagtgtaacacggggatccttagagtgaccagacgt

SEQ ID NO: 496158 - DNA, 174 bp, Homo sapiens
gcggccgcctactactactactgctcgaattcaagcttctaacgatgtacggggacatgttggtcctctgccctggacctgtgacattctggactatttctgtgtttatttgtggccgagtgtaacaaccatataataaatcacctcttccgctgttttagctgaagaattaaa

SEQ ID NO: 496159 - DNA, 233 bp, Homo sapiens
cgccacttctcaggacgacgattcttctcaatgggggggcgggtgatctccagccacccctcagtcactacctttgtaacaacttcagttgttgccatcgtaaactgacacagtgttcctaacgtgtccatacataaactaatcacctcaatttgttatttttcgaaacaaagccctgtggaagaaaatggaaaacttgaagaagcattaaagtcattctgttaagctgcgta

SEQ ID NO: 496160 - DNA, 208 bp, Homo sapiens
gacgccgatgatgatgtacatcgggatcagcgtggcttcgaagaacacgtagaacagcatgcgtccagcgcgcagaacacgccgaccatcagacccgacaggatcaggaaggcggccatgtactgggacacgcggctggtgatgacttcccagccggccagcaccacgatgatggtgatgaacgcggtcaggagcacgaaccacagcg

SEQ ID NO: 496161 - DNA, 177 bp, Homo sapiens
  misc_feature (35)..(35): n is a, c, g, or t
ttcactttatttttcttgtataaaaccctatgttntagccacagctggaacaaatgcccatgttggtcctctgccctggacctgtgacattctggactatttctgtgtttatttgtggccgagtgtaacaaccatataataaatcacctcttccgctgttttagctgaagaattaaa

SEQ ID NO: 496162 - DNA, 505 bp, Homo sapiens
caatatcttaaaaatgtcctccataattggtaaaaaatatttttgctctcacattggtcaggtagcaacttgttccattcaccaaaaacacaatttggataaaaaaattaaagtgcagtaaagacgagagccaaccatttcatataaaccagagttctgtattactgtgtttacctgactcatggctacaattttaaaatggaagctataaggtctccatttgcatctatctgtatgtttatgtatgtacatatgtatgttatgtatatgtgatactttcctatcttctgatggtattacccaattaatttataaaaccctataaagaagctctattctgacaggcttagggacaaattgcttatatcaattaaatatttataaagctctcagaaatataggaattaaccccaattttttttaagttcatgtgactttgggaaatatttgttagataaaaccagtttaaaattgttgattgaataaaacagctgtcttctgagtt

SEQ ID NO: 496163 - DNA, 462 bp, Homo sapiens
  misc_feature (30)..(30): n is a, c, g, or t
gcagtggtatcaacgcagagggcccattanggccggggtctctcggccttagcgccatttttttggaaacctctgcgccatgagagccaagtggaggaagaagcgaatgcgcaggctgaagcgcaaaagaagaaagatgaggcagaggtccaagtaaaccgctagcttgttgcaccgtggaggccacaggagcagaaacatggaatgccagacgctggggatgctggtacaagttgtgggactgcatgctactgtctagagcttgtctcaatggatctagaacttcatcgccctctgatcgccgatcacctctgagacccaccttgctcataaacaaaatgcccatgttggtcctctgccctggacctgtgacattctggactatttctgtgtttatttgtggccgagtgtaacaaccatataataaatcacctcttccgctgttttagctgaagaattaaa

SEQ ID NO: 496164 - DNA, 440 bp, Homo sapiens
tctagcctcgccagtggctctcggccttagcgccatttttttggaaacctctgcgccatgagagccaagtggaggaagaagcgaatgcgcaggctgaagcgcaaaagaagaaagatgaggcagaggtccaagtaaaccgctagcttgttgcaccgtggaggccacaggagcagaaacatggaatgccagacgctggggatgctggtacaagttgtgggactgcatgctactgtctagagcttgtctcaatggatctagaacttcatcgccctctgatcgccgatcacctctgagacccaccttgctcataaacaaaatgcccatgttggtcctctgccctggacctgtgacattctggactatttctgtgtttatttgtggccgagtgtaacaaccatataataaatcacctcttccgctgttttagctgaagaattaaa

SEQ ID NO: 496165 - DNA, 432 bp, Homo sapiens
actagttctagatcgcgagcggcgccatttttttggaaacctctgcgccatgagagccaagtggaggaagaagcgaatgcgcaggctgaagcgcaaaagaagaaagatgaggcagaggtccaagtaaaccgctagcttgttgcaccgtggaggccacaggagcagaaacatggaatgccagacgctggggatgctggtacaagttgtgggactgcatgctactgtctagagcttgtctcaatggatctagaacttcatcgccctctgatcgccgatcacctctgagacccaccttgctcataaacaaaatgcccatgttggtcctctgccctggacctgtgacattctggactatttctgtgtttatttgtggccgagtgtaacaaccatataataaatcacctcttccgctgttttagctgaagaattaaa

SEQ ID NO: 496166 - DNA, 421 bp, Homo sapiens
aggtgttgctgggtcgatctagaggtccccattggatagcgagagccaagtggaggaagaagcgaatgcgcaggctgaagcgcaaaagaagaaagatgaggcagaggtccaagtaaaccgctagcttgttgcaccgtggaggccacaggagcagaaacatggaatgccagacgctggggatgctggtacaagttgtgggactgcatgctactgtctagagcttgtctcaatggatctagaacttcatcgccctctgatcgccgatcacctctgagacccaccttgctcataaacaaaatgcccatgttggtcctctgccctggacctgtgacattctggactatttctgtgtttatttgtggccgagtgtaacaaccatataataaatcacctcttccgctgttttagctgaagaattaaa

SEQ ID NO: 496167 - DNA, 196 bp, Homo sapiens
acgttgtcagtgttctggcctgtagttagctatgccgatcggtatacgcactaatgtacggcatcaatatatgtgacctcccgggtagcgggggaccaccaggttgcctaaggaggggtgaaccgtgcccaggtcggaaacggagcaggtcaaaactcccgtgctgatcagtagtgggatcgcgcctgtgaatagc

SEQ ID NO: 496168 - DNA, 1145 bp, Homo sapiens
acccggcgctccattaaatagccgtagacggaacttcgcctttctctcggccttagcgccatttttttggaaacctctgcgccatgagagccaagtggaggaagaagcgaatgcgcaggctgaagcgcaaaagaagaaagatgaggcagaggtccaagtaaaccgctagcttgttgcaccgtggaggccacaggagcagaaacatggaatgccagacgctggggatgctggtacaagttgtgggactgcatgctactgtctagagcttgtctcaatggatctagaacttcatcgccctctgatcgccgatcacctctgagacccaccttgctcataaacaaaatgcccatgttggtcctctgccctggacctgtgacattctggactatttctgtgtttatttgtggccgagtgtaacaaccatataataaatcacctcttccgctgttttagctgaagaattaaaaaaaaaaaaaaaaaaaaaaaaaaaaaaaaaaaaaaaaaaaaaaaaaaaaaaaaaaaaaaaaaaaaaaaaaagagggggggcgcgcgggaaaaaaaacccaccacgggggcgcacaacaaagacacacacgcattatagaagaaagaaggggaccacagaagagggagaatataatacacaaaaacagcaggcgcaaacaacaaaacagaagagagaggaaaacaaaaacaacgagcatatcggagagagaaacaaaaaagaggggagagaaaaacaaggggaaacaacacaccaaaaacaaaaaacgccacagcggagaaaccaagacaagagagagaaaagagaaaaacaaagaaacataaacagagaagagaaaagataagcacaagaagaacaaacaaacacataccagggcaggaacgaacaaagggagaagaacaagagagggagaaacacccggcgacaaggaggaaacaagaaagagaggaagaccacaacaggagaaacagcgggagggagaaaaggtaggagagcaaacggaggagaaacagaaaaaaacggaagaaaacaaaacgaaggaaagaaagaaacagaagccggcagacaggaggagaacaggcacgaggacaacaacagaaaaaaaagcaaaagagaccaaccaagaagacggcgcaagaca

SEQ ID NO: 496169 - DNA, 1364 bp, Homo sapiens
agcggactgatgacgccattttcggcggctggaacggcgcatgcggccgagcgtggactggctgggtcgtgctgggccttgcctgggtgccgaggagcccgcggggcttgtgcatctggctggccaatggggacagctgcgtggttcgggcgacgattcttgcggaggcgggtacgctccgggtgccccttcgctggttgacttgcttggtgccgttgcgctcacactagtctgacgcgtcgggcatcggttgcaccattctgcctgcttccggcagcatccgctgccccgtgtagagccgctccacgtggttgcttgaacaatgctagccgaagacgatggcagctgaggactcttcagtgatgcaatcgagctgaaatttgttgttgaacaactagttgtcccatcgaagttggttgtaacactagaaggggaaggacccagcgtgtgtgaggacattgcgttgactaccagtgcactgggatcatgtaattttttcgtctcagcacgagacgaggcggacagctcaaatgtcccacggggacgtgcgacagtccgttctcgcagaggcaaattgggaggctcacaacagatatcgctaatcttgttacaaaaatgggttttgtgcctgggagggaactgccttggcacacgattgcgtgttcgccaacgggcccccgcactcttcgacgttggcagaagaatcgggtcacaatttctgtgcgcggactacgcgcacacggcgcaaacggcacactagtttcccaagaacacccactttttgatttccacctggtcgcagaagtgcgtgcacaaccgcttgtggtgacgcacactgggttttctggagcaacggaccttacgtaggtgcgacccatctgttaaagattttgtgacatcccggctgcgaccccacttgcggtgtccttcagatttctgcacacttagtcggccgctgctcattcagcgtgaccgcgcaggacgagttaatcagagcgccggttggccataactttggacccttaggttgggacacgctccccggtaagcggaaacgcaccacgaagaggaaacctttgtcagccttgggcacgccccacggcgctttctaccagggtccgctgtctcccttggttggttcccgcagttggtgaaggcacatcttccagggttgctggcatacccaggggtggacttgaacgaccttgtgtctgcctcgcaccaccgtcggcatcggcgcacgttagtgaacccttgggctagggaacagagcgaagatttggtcaggcgcccatgcgtccattggttgggggccctcccaacccttgtctatggtgcagcgggggagtcacaacggacatagc

SEQ ID NO: 496170 - DNA, 368 bp, Homo sapiens
ggatctggaactgcgctatctcactgtgtgttgtgctctcccacacggattctaccttttaacctctgtatctttgttagtttgaaagtcaacagaagttgtcattttggttgcctttttagttaaaattctagctatgaaatgtcctggtgaggaccagcgggtctggggtccggagggccccctaggggaccccgaattgagtcttctttccccagggaaggaagaaagggggcgaaacttacagagacttggaagagggcatatagtgaatttacacatattacaaatatttggtaagaaccctctctaatactgagataacatgaattacttgaaataaatgcaaaagcaaaagtactctctct

SEQ ID NO: 496171 - DNA, 431 bp, Homo sapiens
  misc_feature (6)..(6): n is a, c, g, or t
gagtanatagctacaaataaattaatacctaggaataccaaagaagtacaggatctctacagcgaaaactataaaacgatgatgtaagaaattgaagaggacaccaaaaaaaatgaagatattccatatttgtggactggaagaatcaatattgttaaaatgtccatgctacccagaacgatttacagattcaatgcaatctctatcaaaataccaatgcttttcttcacagaaatagaaaaaataaccctaagatttatatagaaccacaaaagacccagaatagccaaagctattctaagcaaaaagaacaaaactggaggaaccacattaccttacttaaattatactatagagctatagtagccaaaacagtatggtactggcataaaaacagacacatagactaatggaatagagattgcggtgtt

SEQ ID NO: 496172 - DNA, 316 bp, Homo sapiens
gtggccagcctgcaggttgcgggagcgaggagtgggcgtctgcaccaggcatccaggcgtgctcttccccaagaacagggcaggcagccttacgtggtggagtctgttgagcccctccgccagcctggcccccgacagcgaggaacactcgcttggagggacaaatggaggacatcaagctggaggactcctcgccccggggaacaaagggggccctgctccttccatgcttgatcaactgacaaggggcctcacttgacaaggggggggttaccggagctcgaaattcggtaaatcaatggtcataagcttgttt

SEQ ID NO: 496173 - DNA, 1386 bp, Homo sapiens
gggaacgcggacgtttgcagcctcggaaatgggctacgagcgccagatgccgagtcagccactaaacgctacgacgctaggctctgtggccctgaccgtgagggcgcgcagagactggcgtaaccgggacattagttttcaagcgtactatttaaagttccctggcttcagacggaccctctttacatcttggactttgggtcccgtgtattctaagaaaacgcaacctggacacacacgggtcggtaattacccggaaccccttgagacacaacacacgggacgcacgcgtctaccactacactcgacgacaacatggccctcctctttggaaaggggactactaggacgactggaaaacacacgaatactacgcgaaccgggatttggaagaaactcaataattaatattacaagggacggctttaaaaagaaacactaatgggctgcgacttggattaaaatgattgggggtaacttaatataaggacgggcggctttggggactagtgttacccaggaggaacactgtttggcaagacgacagggtttcaccaccacggaatcacggggccgcccaccccgcctgggacaattggggccccaaaaacaaattcctgcaaattttacctgggcacaggttacaatgttgccaacacacgggcaccaaaacattgggtttccacacaggactcataaccaaggataagaacacacggggggtacactacggacaccgagtcaacaggaaggggacgaccacaccatcgacaggacagaacttccttaaggaaagggggccccggggaccccacaggtggcaggcaatgtaccaaacactactaaactggagcatttacaacgtacggagaccagcaaccacagtgtaacaaccacgcggacgatggcacaccagataggcacacaaagctgtgggatagcggctgtgggaacgaagacgcacagagctacacgaagggggcaaactacatacaccgtgtgagcacacccgacaccatgtgtcgcaccacggaacacactttgggaagcggcaacacagacagaactgtatacgtacattttgtaatcaagacagcattgtggtgtactacaacaagggggtcgttcacacatatataggcgatatctaacaccctttctttgtaaacacaagtgggatttatcaatatgggtatctcatcatggaacacagtcaagtgaaagttttgtaggagcaaattatttttcaacgggagggttgccacatgaatatcaatggtgaaacattttacaaacaagagccacgagacgacacatgttttatataccagacggcaatacaaccagtgatcgatagcagcaaaccgatagcacagggagtatcac

SEQ ID NO: 496174 - DNA, 235 bp, Homo sapiens
actgtactccatcacactactgtgcgtcgcagtgatggagcggatactcaaggaggcactggctcagcctgggcagtagagggacaggagtcagctcatacgctgtctgtgactaaagagggcacagcagggccagcgtgagcttacagggacgtacgcccaggtgcagatggtatgggtgactcacttaccgcctctaggtggtgccaggggctggagggccctagaaaaagat

SEQ ID NO: 496175 - DNA, 187 bp, Homo sapiens
aaagtggcatacaagcttcatctatgtaactttgcttatatctcacagagacagactttccatctgattgtgcttaatggattttctgcttcctcagaaaaacttgaatttttaagaaacgtaattgtctccgtaaaaataagcaaagttacatagataaagcttggtattcctcttacttttgagt

SEQ ID NO: 496176 - DNA, 685 bp, Homo sapiens
  misc_feature (685)..(685): n is a, c, g, or t
cacctttatctttattctcttgagaattctagctatcccattctgtgtccccaagccaaaaaaaaaaaaaaaaatagggatttggtgtaattagtggggaaaggtgttttcctatatttgggttttctaattaattctcaaggtctgggaattttttttttacatttctcttccttttgcccttagtcaataaaggtcaattaagaactggtaatggtataacggtgggggggcgttcaagaaagacgccttccaatcaaactctaacttaaagtccctctaaagaaggtcagcgccactttggccaaggtggatatgcgccttccattatcagcaatggcatcatggaatttgggacattccagtcactaagttcttctcaaagagaacaaagcgccttcatataattttgacggctaccaattatctcagcgtatttttagcgcacaattattcagcgtattttccacaacggtggtgtcccttggcattaaagtagagaatcacctataacatgtggatctcccaaatttccataaatatgggtatctcaactggtgaaactttctcctacccaaattttttacaacgattgcggccacatggcttttaacaaattacctccttttttacacattggaaaacgcccactaatatagcgtggagcaagggggaatcctcaatn

SEQ ID NO: 496177 - DNA, 422 bp, Homo sapiens
tgtagactctagacgatcccattctacgctgcactgtctggatacatggtaaaaccccgttgctacgtaaaaatacaaaaattagccgggtgtgatggcatgcacctgtaattctagctactcaggaggctgaggcaggagaattgcttgaacccaggaggcagatgttgcagtgagctgagatcatgccactgcattccagcttgggcaacaaggaatgaaacttcttattaaaagaaaaaaagttgtcctgagccactgcgcccggtccacagcttggttttatacattagggagacatgatacatcagtcagtatatgcaagaagtacattggttgggtctgaaaaggtgggacaacttgcagcaaaggcaggaagacttgaagcggctcccggatcacagacaggtgcagcgtagaat

SEQ ID NO: 496178 - DNA, 99 bp, Homo sapiens
ggcctgcatatgacctgctgtgtcctttgcaggaaggagctaggcacctttctgagcttattctattccccacccacacatacgcccggcttggaaata

SEQ ID NO: 496179 - DNA, 300 bp, Homo sapiens
actctagaggaccccctgaatcttccatcaggtgggcacatttccgttaccggaatcgcagctggaccgttttctgatgtgtctgtcgctgggctacccggatccggcggcagaacgcgccctgctcgcaggcgacgaccgtcggcaattgctggccagactgcatccggtcatgcaggtaacagaattactggaagcacagcaggaactgaagcagattcatgtctctgcttcactgctggattatgtgcaggcactggcgcaggcgacccgcaaacggcgatgtattcgccgaaggga

SEQ ID NO: 496180 - DNA, 198 bp, Homo sapiens
gcatctattgacttagagagttaatcgtgtacccgcggtggctgacacgaaattgaacaaacctgggagttagtatagcttagttaaactttacgtttatttgctaaagtgctaatcactgactgtttccctgtgagaggtgtggctaggctaagcagtttagaactagcattgctgcagtagcttgatgcttgtccc

SEQ ID NO: 496181 - DNA, 226 bp, Homo sapiens
ggtatttaaaaagggtctatgttggtcttattccccaacttaaacactctcacctctacacctcactttcttacaatcatcttgccccttttggcgcaacacccaattcttttccgcccccaggcccttatgttaacccccgggttgaggttcagttttgttgtcacctctgttttgtcctcattgaccaataatgatctgtggggtccctcgtgtaagttgtttg

SEQ ID NO: 496182 - DNA, 1125 bp, Homo sapiens
  misc_feature (775)..(775): n is a, c, g, or t
aagtcttcttgcagcactcctgcttccaacacgaaagacgccagccagcttggagaagcgcgcttgcgcgtggcaagcaggtgaatccgaggagaggcaaattacgaagcctggaagaccacagaggccgcctttgtgattccagcacggggaagcgtctgcttgattcagaagtgcttgcccaaggtctctgccaggtgcacctgcttctgtcctgaattctgtgacagtctgccagcagttaggagattgccagctgcactattccagcgattaaagacacttgaaaattaaggcagacctttaacaaccatgcatcattttgtattcataataaaattacaattctgaacactagccgtgtgggaaccgggtgtgctggctttccttgaggaaggtgagcatgctgatctagccccaggtaggggagcagtatgtgcagtgatgcctgcgaaactctatgactgctacacggactccaccgagataaggggagaaaggtaatgaaggaacatggttaagtggagacaggaacaggggagcaaagcaaagcaaacacctgaagggagacggtggtggagtgcgtctgcgggcctgtgcgaggagcacaggcaggaagaaccctgtgtaaggcgcgtggatggcacagcggtgtgggcggcaccggctcccctgcctcttctggagcttcctgggtctgacctccaaccttgcatgtctttgttttcctttgagatggtttgataggtgtgatctatttggtctcctcaggganacagagctgaaaggaaatgagagggtgttcccaatctgggcatggtggctcatgcctgtaatcccagcactgtaatcccagttacgatgcctacgactcccagaccaaagtgggaggattgcttggggtcagtagttcaaaaacagcctaggcagtgtagcaagaccctgtctctaggaaagaaaaaagtacattagccagtcatggtggtgcacacctgtagtcccagctacgtgggaggctgaggcaggaggatcacttgagcatgggaatcagaggctgtggtgagctgtgatcgcaccactgcactccagcctgggcgatacagcaagaccccatctcaaaaagga

SEQ ID NO: 496183 - DNA, 690 bp, Homo sapiens
  misc_feature (45)..(45): n is a, c, g, or t
  misc_feature (70)..(71): n is a, c, g, or t
  misc_feature (73)..(73): n is a, c, g, or t
  misc_feature (77)..(77): n is a, c, g, or t
  misc_feature (81)..(81): n is a, c, g, or t
  misc_feature (88)..(88): n is a, c, g, or t
  misc_feature (107)..(107): n is a, c, g, or t
  misc_feature (119)..(120): n is a, c, g, or t
  misc_feature (127)..(127): n is a, c, g, or t
  misc_feature (129)..(129): n is a, c, g, or t
  misc_feature (134)..(134): n is a, c, g, or t
  misc_feature (138)..(139): n is a, c, g, or t
  misc_feature (145)..(145): n is a, c, g, or t
  misc_feature (158)..(158): n is a, c, g, or t
  misc_feature (174)..(174): n is a, c, g, or t
  misc_feature (195)..(195): n is a, c, g, or t
  misc_feature (206)..(206): n is a, c, g, or t
  misc_feature (217)..(217): n is a, c, g, or t
  misc_feature (225)..(225): n is a, c, g, or t
  misc_feature (229)..(229): n is a, c, g, or t
  misc_feature (233)..(233): n is a, c, g, or t
  misc_feature (427)..(427): n is a, c, g, or t
  misc_feature (462)..(462): n is a, c, g, or t
  misc_feature (521)..(521): n is a, c, g, or t
  misc_feature (598)..(598): n is a, c, g, or t
  misc_feature (686)..(686): n is a, c, g, or t
tttatcccctactcctccttttaccctctctttccattactcttntcttcccttaatcctccaccaactnntngganatangaaactngaccttggagaacttcctntttatcaacttnnttctccnanaacangttnngtattntacaccatttatncttccatcaccccctntcccttccatccttcttcatngccccatttanccttccaaatncaacattntcanacanttcccaacactattgtccctcttgcctctcattctcaccgctccagcctctgtaatactgccagccctttaatgccctaatgccaaagtaaccattctcccaggctacagttccttcctttggcagatgtccctggccagggcccccaacctctacgcacccctgacctggagttaggggtagaggtttggggnaggggtagtttatccacccctcactcaaggtgggnaatcagcaccatcatgataactccccccagcagccccagcacctccagaagtgattgcnatggtgatgcctccctcagcagctcgggcaacacagacactgttgctacgtagataaagccacctgcagtaaatggnaggacccagccaggacctgcaccacctgcaatttcactgcccactgctcctccttcagtgagaagggcacaggctgtgcctgccagtncccc

SEQ ID NO: 496184 - DNA, 153 bp, Homo sapiens
actgattgtgcactgcactccagccatgggtgcccagagcgagactccatctcaaaaaaaaaccttgagaatccaaggatggctgtaagctaatcgttaaatacttgaaatatacttcgtaaggatcaacagaataacactctctaaagagag

SEQ ID NO: 496185 - DNA, 1199 bp, Homo sapiens
gatgaaacatgcaaggtaccacacagctgtctgaattttggcacaaaaagtgactgtacgtgatcacgtggtgatagctccagaatgtacagtgtcttggtggaccaagatgccttctaaaggctgatataccttggaccctaatggggcagagagtatagccctagcccacgtggtgacatgaccactccctttgggaggcctgaggtaaggggagtggtatgcgttcactcagtgtgataggcacgcaaatgactgggtgatcacggactgttaccatccatggatctacctcagcggtgtaggtgccagaagagagacgtgaatgcctccataggacttagaagagtagagggtgtatggacccctctgtcagcgatgctctatagactcattcagccggaggactcagagacatgagtaactctccttgatcaacggcgtacccacttgtctagtgtgggaaggtggtcattacgagggatccaaaaaatctctgatagggaaagaaagggacagactcgtaagaacagctctacataggatgccctgtgcatatccttgatttatacctcgaggatatactaaaatatctctacccttgcatgtgccataggtagggggactctcaagtcgtgaactggtaatctcttggtgaatggacagccaatgacagacctatgagataattcaaattgtgaccagttcgtacctgttgacatcatactacactccaatccaggaaaacctcttctgcattgcaaagaagcgaaaaccatgatgttaacagcgtccagggagagcttgccatcagacagatgcctgggatcgtgaacgcaacagccgtcggagatccagtgaagacaggaacaaggccacgcaagaacgctctgaactgcccaagtggaagctaccggaaataggacaaggacaaaaaagggaccggcaactgtacaggggacataaacacggaggcggcacgaaacatccaaacgaacctgctaaacccaggagggaaagaaacagagacggaccaaacgacagcagaagcgaaaacagagaagaaaggaagcgacggaaagcaaaacgacaagagcagagcgaacatcaaagaaagaggcagacaccacagacacacacacaagcgaaccacgcgcgacacaaagaaaggacgagcaaaaccagaaggaacgcccgcg

SEQ ID NO: 496186 - DNA, 106 bp, Homo sapiens
aagatcctccagaagtgccacggtctctccatcgatggttatgtcctccatcctcgacgacccgagagatgaccccgaatgagatcaagtgtgctgtccatgtcgt

SEQ ID NO: 496187 - DNA, 470 bp, Homo sapiens
ggtagagcctctgagcctattttcttaacaaggatttagtggggttgagagacaatcctgggctccaggtctgagtctagtagacgctcttaagttcaacattcattctacagatgtggggccggagaaacagcagctattcagataaactttcattcaatacactgctcctatctgagtatctaacaaacactcttagataacaaaagctcttggcagattcctggaaatgggggtctttaagacagttaagtttcagcacagcaaaccacacaaatgtgagctccacaaatgtatacagctgaggggtgcgctggatctatttttgacacaggcagtgatgtgcacaagggaagaagtcagtccagggcgcacatctccactgttcctttgctacgggctttcttggcctctcttctcctgggcccttccaagcacagctcggtatctgggcggggaactgagcttcc

SEQ ID NO: 496188 - DNA, 134 bp, Homo sapiens
tgcgtcagagtcccgggcggcttgggatcttggcagggtaaatttgaccctccagacctcacgttggttccggagcccatactcgcggaccagcttcagttattggtcgagacgagatttctcgaagggtctcg

SEQ ID NO: 496189 - DNA, 224 bp, Homo sapiens
gttgggctgaatggacctctccagctctgggttccttgcgtgagtccctcacgttattctttcccccaaaccctcaagattgtatattttctatttctactgtgtatttatcttaaaatttattaacctatttaatattccccagggacaggaaaccaagggccccgagctcagggcagctgtgctgggtgagctcttccaggagccaccttggcacccattct

SEQ ID NO: 496190 - DNA, 864 bp, Homo sapiens
  misc_feature (550)..(550): n is a, c, g, or t
  misc_feature (557)..(557): n is a, c, g, or t
  misc_feature (570)..(570): n is a, c, g, or t
acccggcgctccattaaatagccgtagacggaacttcgcctttctctcggccttagcgccatttttttggaaacctctgcgccatgagagccaagtggaggaagaagcgaatgcgcaggctgaagcgcaaaagaagaaagatgaggcagaggtccaagtaaaccgctagcttgttgcaccgtggaggccacaggagcagaaacatggaatgccagacgctggggatgctggtacaagttgtgggactgcatgctactgtctagagcttgtctcaatggatctagaacttcatcgccctctgatcgccgatcacctctgagacccaccttgctcataaacaaaatgcccatgttggtcctctgccctggacctgtgacattctggactatttctgtgtttatttgtggccgagtgtaacaaccatataataaatcacctcttccgctgttttagctgaagaattaaaaaaaaaaaaaaaaaaaaaaaaaaaaaaaaaaaaaaaaaaaaaaaaaaaaaaaaaaaaaaaaaaaaaaaaaagggggggggggcnaaaaaancccccgggggggnccattgggaacccgtttttggaaaagggggccccaaaagggggggacgcaatatgaggccaagagacagggggcagcatgtattcaacaagccttcgctgcaagcgggaaacaacttgtctgcggggaatctctgtggaaaggaaccccaactcgggggggcaaccaatctggggacaaactcccccggaaaattacacctccggggaaatacaaattgcgggtaagtgtgaaccacgcggtatattgccgctaaaattcctcacggatacatgtgaaaaatttacggcggaca

SEQ ID NO: 496191 - DNA, 449 bp, Homo sapiens
ctggtagctggcagcattctcgcgcccgcgctcctcctcgtacccgtgcgcccccgtgagaccgatcccgccccgtggcccaggccggtgtctggtgagagccgctggggggaggtggccgcgtcggctccggaaccgggagaggcgccgaggggtgtggggtgagggccgcccgttgtgggtcccggcgatgtctgcgtagccgcttctctgcccggtggacgcacagtgctcgtagctcctcgttttcatgggaccgtgcccccggtctgggcggtagccgatgacccgtctgtgcgggtgctcgcggtcgtcgggagtctgtgggtccgcgtccgtcgctggggcccaggtcggggtgcctgaggggcggtggccgggcgcgcggacctcgcgcgcgctgtccacggggcctgcgccagcgctacggccgtggactgccctgggct

SEQ ID NO: 496192 - DNA, 158 bp, Homo sapiens
  misc_feature (96)..(96): n is a, c, g, or t
  misc_feature (131)..(132): n is a, c, g, or t
gtgttagaacttgaactggcagaggaaaaatacctatgacgctttctaggcaagaggtcatcagaagattgagagaaagaggagaaccaatcaganctatttggagagactgattatgaatgcttttcaanncgtttaaggaaaattagagattcctc

SEQ ID NO: 496193 - DNA, 811 bp, Homo sapiens
  misc_feature (552)..(552): n is a, c, g, or t
  misc_feature (557)..(559): n is a, c, g, or t
  misc_feature (561)..(561): n is a, c, g, or t
  misc_feature (575)..(575): n is a, c, g, or t
acccggcgctccattaaatagccgtagacggaacttcgcctttctctcggccttagcgccatttttttggaaacctctgcgccatgagagccaagtggaggaagaagcgaatgcgcaggctgaagcgcaaaagaagaaagatgaggcagaggtccaagtaaaccgctagcttgttgcaccgtggaggccacaggagcagaaacatggaatgccagacgctggggatgctggtacaagttgtgggactgcatgctactgtctagagcttgtctcaatggatctagaacttcatcgccctctgatcgccgatcacctctgagacccaccttgctcataaacaaaatgcccatgttggtcctctgccctggacctgtgacattctggactatttctgtgtttatttgtggccgagtgtaacaaccatataataaatcacctcttccgctgttttagctgaagaattaaaaaaaaaaaaaaaaaaaaaaaaaaaaaaaaaaaaaaaaaaaaaggggggggggcgaaaaaaatattccccggggggggcccaatttnggggnnncnaggttttttgtganaaaggggggccccatatatagagggagtggaaattattaaaaagagagaagggggggcgctggtttaaaacaagcgtgctgtgggggaaaatgtgtcactggggggatcctggggagaggacctcattgtggggcgcgcacaatgggggacattcacaaagaatttaaggccgagaattatattgaggttcaggtgacaggcgatggtgcgcgaaattggctggatgttggaattc

SEQ ID NO: 496194 - DNA, 820 bp, Homo sapiens
acccggcgctccattaaatagccgtagacggaacttcgcctttctctcggccttagcgccatttttttggaaacctctgcgccatgagagccaagtggaggaagaagcgaatgcgcaggctgaagcgcaaaagaagaaagatgaggcagaggtccaagtaaaccgctagcttgttgcaccgtggaggccacaggagcagaaacatggaatgccagacgctggggatgctggtacaagttgtgggactgcatgctactgtctagagcttgtctcaatggatctagaacttcatcgccctctgatcgccgatcacctctgagacccaccttgctcataaacaaaatgcccatgttggtcctctgccctggacctgtgacattctggactatttctgtgtttatttgtggccgagtgtaacaaccatataataaatcacctcttccgctgttttagctgaagaattaaaaaaaaaaaaaaaaaaaaaaaaaaaaaaaaaaaaaaaaaaaaaaaaaaaaaaaaaaaaaaaaaaaaaaaaaaaaaaaaaaaaaaaaaaaaaaaaaaaaaaaaaaaaaaaaaaaaaaggaggacggaaagagaccatgggggtttgaattgggccaaaggttattttaaggggggcaaatttagggttagggggcaaattgggccttatggggggatttttcccattaggggggcggttttaaaaaaagggggggcggggaaaaaccggggggtcgggaaaaaaatggggtttgccaaaattaaccttttggcagaagggccccttttcaaaagggggggcggacgtgtccggggg

SEQ ID NO: 496195 - DNA, 580 bp, Homo sapiens
  misc_feature (560)..(560): n is a, c, g, or t
  misc_feature (563)..(563): n is a, c, g, or t
  misc_feature (565)..(565): n is a, c, g, or t
acccggcgctccattaaatagccgtagacggaacttcgcctttctctcggccttagcgccatttttttggaaacctctgcgccatgagagccaagtggaggaagaagcgaatgcgcaggctgaagcgcaaaagaagaaagatgaggcagaggtccaagtaaaccgctagcttgttgcaccgtggaggccacaggagcagaaacatggaatgccagacgctggggatgctggtacaagttgtgggactgcatgctactgtctagagcttgtctcaatggatctagaacttcatcgccctctgatcgccgatcacctctgagacccaccttgctcataaacaaaatgcccatgttggtcctctgccctggacctgtgacattctggactatttctgtgtttatttgtggccgagtgtaacaaccatataataaatcacctcttccgctgttttagctgaagaattaaaaaaaaaaaaaaaaaaaaaaaaaaaaaaaaaaaaaaaaaagaaaaaaaaaaaagaaaaaaaaaaaaaaaaaaaaaaaaaaaaaaaaaaaaaaacnaananaaaaaaaaaaaaaat

SEQ ID NO: 496196 - DNA, 782 bp, Homo sapiens
  misc_feature (612)..(612): n is a, c, g, or t
acccggcgctccattaaatagccgtagacggaacttcgcctttctctcggccttagcgccatttttttggaaacctctgcgccatgagagccaagtggaggaagaagcgaatgcgcaggctgaagcgcaaaagaagaaagatgaggcagaggtccaagtaaaccgctagcttgttgcaccgtggaggccacaggagcagaaacatggaatgccagacgctggggatgctggtacaagttgtgggactgcatgctactgtctagagcttgtctcaatggatctagaacttcatcgccctctgatcgccgatcacctctgagacccaccttgctcataaacaaaatgcccatgttggtcctctgccctggacctgtgacattctggactatttctgtgtttatttgtggccgagtgtaacaaccatataataaatcacctcttccgctgttttagctgaagaattaaaaaaaaaaaaaaaaaaaaaaaaaaaaaaaaaaaaaaaaaagaaaaaaaaaaaaaaaaaaaaaaaaaaaaaaaaaaaaaaaaaaaaaaaaaaaaaaaaaaaaaaaaaaaaaaaaaaaaaaaaaaatttgtgacccttttgtcccaatnttttttaaacttagaaaaattttaatttggcgcccaattgggctattttggcaaatccccctattgggggggtttaaacaataaggggccctgtttttaaaagtgtggtattgaaaaaaccctgggtgtacccatttaaaacgccttggaaacccctttttgggtggggc

SEQ ID NO: 496197 - DNA, 423 bp, Homo sapiens
  misc_feature (39)..(39): n is a, c, g, or t
  misc_feature (49)..(49): n is a, c, g, or t
ccacttgagctggacccactttcagagtaggagtagtancgaggagacnaagtggaggaagaagcgaatgcgcaggctgaagcgcaaaagaagaaagatgaggcagaggtccaagtaaaccgctagcttgttgcaccgtggaggccacaggagcagaaacatggaatgccagacgctggggatgctggtacaagttgtgggactgcatgctactgtctagagcttgtctcaatggatctagaacttcatcgccctctgatcgccgatcacctctgagacccaccttgctcataaacaaaatgcccatgttggtcctctgccctggacctgtgacattctggactatttctgtgtttatttgtggccgagtgtaacaaccatataataaatcacctcttccgctgttttagctgaagaattaaa

SEQ ID NO: 496198 - DNA, 711 bp, Homo sapiens
gtggtggtacccaatacccaaacattgccaatagaaaatgcaatgtgaggtaaaggatgaaacaacgatgacatgaaaatggagactgatattaagagaaacaaaaggactcttctagaccaggcatgggacagtacccaataatggatgaacgcaataggtaaagaaaaaggctgaaggcaaaggcgagagaaagagaaaggggaatatagcataagcaaaagtcagtgaaagtggcaaagggtttggcctgggtatactcttaaataccttggtaaaatgccacgatggagagtagagtgacaggagttgatgaatgtatagcacatgtatactttggatttgcaactgacaccaaaatgagaagaccatttggttgtgcctcattttaacttggcccttttgttcttcaattcaaacccagcataactcctcaagttggttattgggaacttgaataaaatattttctttgatacatcgcaagctctagctgatactttaactggatgctacccaatatccagttataatcaggcctcaacgttctgtcaggtattaagtatggttagaattgttcttacaactggtaattatagtcaaatagagataaaacagatgatgtactgacaaatttttgtgaattagattttaaagaaagttgttgtataatcatatcatttaaaatactagattagggctgggcatggtg

SEQ ID NO: 496199 - DNA, 863 bp, Homo sapiens
  misc_feature (15)..(15): n is a, c, g, or t
  misc_feature (62)..(62): n is a, c, g, or t
  misc_feature (84)..(84): n is a, c, g, or t
  misc_feature (89)..(89): n is a, c, g, or t
  misc_feature (91)..(91): n is a, c, g, or t
  misc_feature (96)..(96): n is a, c, g, or t
  misc_feature (98)..(98): n is a, c, g, or t
  misc_feature (102)..(102): n is a, c, g, or t
  misc_feature (104)..(106): n is a, c, g, or t
  misc_feature (109)..(109): n is a, c, g, or t
  misc_feature (111)..(112): n is a, c, g, or t
  misc_feature (126)..(127): n is a, c, g, or t
  misc_feature (129)..(129): n is a, c, g, or t
  misc_feature (131)..(133): n is a, c, g, or t
  misc_feature (144)..(144): n is a, c, g, or t
  misc_feature (150)..(151): n is a, c, g, or t
  misc_feature (156)..(156): n is a, c, g, or t
  misc_feature (160)..(160): n is a, c, g, or t
  misc_feature (168)..(168): n is a, c, g, or t
  misc_feature (174)..(174): n is a, c, g, or t
  misc_feature (177)..(177): n is a, c, g, or t
  misc_feature (189)..(189): n is a, c, g, or t
  misc_feature (193)..(193): n is a, c, g, or t
  misc_feature (202)..(202): n is a, c, g, or t
  misc_feature (204)..(204): n is a, c, g, or t
  misc_feature (207)..(207): n is a, c, g, or t
  misc_feature (212)..(212): n is a, c, g, or t
  misc_feature (215)..(216): n is a, c, g, or t
  misc_feature (219)..(219): n is a, c, g, or t
  misc_feature (225)..(225): n is a, c, g, or t
  misc_feature (228)..(229): n is a, c, g, or t
  misc_feature (233)..(234): n is a, c, g, or t
  misc_feature (240)..(240): n is a, c, g, or t
  misc_feature (254)..(254): n is a, c, g, or t
  misc_feature (258)..(258): n is a, c, g, or t
  misc_feature (261)..(261): n is a, c, g, or t
  misc_feature (269)..(269): n is a, c, g, or t
  misc_feature (286)..(286): n is a, c, g, or t
  misc_feature (299)..(299): n is a, c, g, or t
  misc_feature (306)..(306): n is a, c, g, or t
  misc_feature (333)..(333): n is a, c, g, or t
  misc_feature (352)..(352): n is a, c, g, or t
  misc_feature (388)..(388): n is a, c, g, or t
  misc_feature (436)..(436): n is a, c, g, or t
  misc_feature (451)..(451): n is a, c, g, or t
  misc_feature (466)..(466): n is a, c, g, or t
  misc_feature (475)..(475): n is a, c, g, or t
  misc_feature (510)..(510): n is a, c, g, or t
  misc_feature (523)..(523): n is a, c, g, or t
  misc_feature (805)..(805): n is a, c, g, or t
taacagaggcaaaantgagcaccatagtttacaagtagaaagaccatgcttgaagaaaaaanaagtacactaaggatgcacgantaaantnaaaanantttnannntgntnntcgccctcttcttnntngnnntccccttgttngttggnngtggngtcntggtattnttggtnttnggtcaccaggtngttnatgttgttntnggntttgntgnnttncatttngtnnatgnnctcgcncgtgtaccagtggngganggncttgggcnggaacatggccgtgaantgctcggagatgngcttgancagctcctggatggccgtgctgttgcngatgaaggtggccgacatnttcaggccgcggggcgggatgtcgcacacggccgtnttcacgttgttggggatccactccacgaagtagctgctgttcttgttntgcacgttgagcatntgctcgtccacctcnttcatgganatgcggccccggaagatggcagccacggtcaggtngggggggtggggngggtcgcaggcggccatcatgttcttggagtcgaacatctgctgggtgagctcgggcaccgtgagcgcccggtactgctggctgccccggctggtcaggggcgcgaagcgggcatgaagaagtgcaggcgagggaagggcaccatgttcaccgccagcttgcgcaggtctgcgttcagctggcccgggaagcgcaggcaggtggtgaccccgctcatggtggccgacaccaggtggttgaggtccccgtaggtggggggtggtcagcttcagggtgcggaanagaatgtcatacagggcctcgttatcaatggagtaggtttcatctgtgttttccacca

SEQ ID NO: 496200 - DNA, 399 bp, Homo sapiens
aggtgttgctgggtcgatctagaggtccccattggatagccgaatgcgcaggctgaagcgcaaaagaagaaagatgaggcagaggtccaagtaaaccgctagcttgttgcaccgtggaggccacaggagcagaaacatggaatgccagacgctggggatgctggtacaagttgtgggactgcatgctactgtctagagcttgtctcaatggatctagaacttcatcgccctctgatcgccgatcacctctgagacccaccttgctcataaacaaaatgcccatgttggtcctctgccctggacctgtgacattctggactatttctgtgtttatttgtggccgagtgtaacaaccatataataaatcacctcttccgctgttttagctgaagaattaaa

SEQ ID NO: 496201 - DNA, 381 bp, Homo sapiens
  misc_feature (18)..(18): n is a, c, g, or t
  misc_feature (66)..(66): n is a, c, g, or t
  misc_feature (68)..(68): n is a, c, g, or t
  misc_feature (99)..(99): n is a, c, g, or t
  misc_feature (113)..(113): n is a, c, g, or t
  misc_feature (142)..(142): n is a, c, g, or t
  misc_feature (145)..(145): n is a, c, g, or t
  misc_feature (147)..(147): n is a, c, g, or t
  misc_feature (150)..(150): n is a, c, g, or t
  misc_feature (170)..(171): n is a, c, g, or t
  misc_feature (197)..(197): n is a, c, g, or t
  misc_feature (201)..(201): n is a, c, g, or t
  misc_feature (203)..(203): n is a, c, g, or t
  misc_feature (218)..(218): n is a, c, g, or t
  misc_feature (230)..(230): n is a, c, g, or t
  misc_feature (302)..(302): n is a, c, g, or t
  misc_feature (304)..(304): n is a, c, g, or t
  misc_feature (311)..(311): n is a, c, g, or t
  misc_feature (317)..(317): n is a, c, g, or t
  misc_feature (327)..(327): n is a, c, g, or t
  misc_feature (349)..(349): n is a, c, g, or t
gcgtgctggaaaaagcgntaatgcacttagttttccgttaggtttctatgacgcagatgtaaaggncnttctctgtacagtatattatccaatgcatgnttgttctctccccngatatattgaacaccacacagttgtgaanccntncantgggatgccccacaccccgnngaggcatctaccccggtgtataaggnaagncnttttccgttgctgtncttgcttgagcngttttattgtctgtacatgtgagctgtgtgagatagatgtgaaaagttcaaatgaatgcattttcctgcccngngtatacngattgncatctgtacnaggaactgtatgtatgaaagcnaatgtacgtatttataaatggctaacgcgtgg

SEQ ID NO: 496202 - DNA, 1174 bp, Homo sapiens
aaaaaaaaaaaaaaaaaaaaaaaaaaaaaaaaaaaaaaaaaaaaaaaaaaaaaaaaaaaaaagggccccgctcgcgatttagaaccgccatttttttggaaacctctgcgccatgagagccaagtggaggaagaagcgaatgcgcaggctgaagcgcaaaagaagaaagatgaggcagaggtccaagtaaaccgctagcttgttgcaccgtggaggccacaggagcagaaacatggaatgccagacgctggggatgctggtacaagttgtgggactgcatgctactgtctagagcttgtctcaatggatctagaacttcatcgccctctgatcgccgatcacctctgagacccaccttgctcataaacaaaatgcccatgttggtcctctgccctggacctgtgacattctggactatttctgtgtttatttgtggccgagtgtaacaaccatataataaatcacctcttccgctgttttagctgaagaattaaaaaaaaaaaaaaaaaaaaaaaaaaaaaaaaaaaaaaaaaaaaaaaaaaaaaaaaaaaaaaaaaaaaaaaaaagagggggggcgcgcgggaaaaaaaacccaccacgggggcgcacaacaaagacacacacgcattatagaagaaagaaggggaccacagaagagggagaatataatacacaaaaacagcaggcgcaaacaacaaaacagaagagagaggaaaacaaaaacaacgagcatatcggagagagaaacaaaaaagaggggagagaaaaacaaggggaaacaacacaccaaaaacaaaaaacgccacagcggagaaaccaagacaagagagagaaaagagaaaaacaaagaaacataaacagagaagagaaaagataagcacaagaagaacaaacaaacacataccagggcaggaacgaacaaagggagaagaacaagagagggagaaacacccggcgacaaggaggaaacaagaaagagaggaagaccacaacaggagaaacagcgggagggagaaaaggtaggagagcaaacggaggagaaacagaaaaaaacggaagaaaacaaaacgaaggaaagaaagaaacagaagccggcagacaggaggagaacaggcacgaggacaacaacagaaaaaaaagcaaaagagaccaaccaagaagacggcgcaagaca

SEQ ID NO: 496203 - DNA, 472 bp, Homo sapiens
  misc_feature (13)..(13): n is a, c, g, or t
cctgcgttgggangccgtgtacaatccatagacatctgacctcggcacttagcatcatcacagcaaactaactgtagcctttctctctttccctgtagaaacctctgcgccatcgaatgcgcaggctgaagcgcaaaagaagaaagatgaggcagaggtccaagtaaaccgctagcttgttgcaccgtggaggccacaggagcagaaacatggaatgccagacgctggggatgctggtacaagttgtgggactgcatgctactgtctagagcttgtctcaatggatctagaacttcatcgccctctgatcgccgatcacctctgagacccaccttgctcataaacaaaatgcccatgttggtcctctgccctggacctgtgacattctggactatttctgtgtttatttgtggccgagtgtaacaaccatataataaatcacctcttccgctgttttagctgaagaattaaa

SEQ ID NO: 496204 - DNA, 355 bp, Homo sapiens
gccccaaaattgggcccgggggggggggttttaaaactcctttcccccggccttttcccaaccggggcccccccaaggcttaaggggcgccgggtttccctttgggccggggccccccaaaaaaaaacccatttagaaaaaattttttgaaaccctttttgaaatttttggggggggggggggggaaaaaaaaaattttttttggaagggggggttttccctttttaatttttttaaccccccccccctttgttccccctttaaaagggttttttttgggtttccaaaacccgaagggggggcccgaaaagtttttgccctttgaaaaacctttaaaatgtttttttttggggga

SEQ ID NO: 496205 - DNA, 671 bp, Homo sapiens
tgggcgcattatggcccgggggcctgtacaaattcgcgcggctatttttttttgggcgaagataactggacacgaaagggtagcttggctcgacctatgttaattgcctaccatcacagaccttgaatttttgaatacgtatgtgattaaggagaaatccttcggagacttctgcctgcttagggacagcgcaggcagatgtcctctacaaatctgaaagaaagaataccagcgggaatgcacacagaagcgccgtcagatcactccttttttacatgcaggcagacgcatacttacgatgcatgagctagcattacaccaattatgcctgtaacgtcaggggaattagagacccactcgaccgatttgaacaaactgaggcagttagctagagaagaaagccttgctaatggaggcagtctgtcacattaccatggaatgtgcaagttacggaagcagtggcgcctggagagcacccctggcgaagatttttgcaatgctaaatctgccaaggaattatgtggaccccaataacatctttggaaacagaaaacttctataaattcattagtaccatttcgcccacattaagatttttgacagcttaaacaaggcggcccgcacttctgaataattttgcccacaatcccctatagggagttcttccacac

SEQ ID NO: 496206 - DNA, 1142 bp, Homo sapiens
  misc_feature (2)..(2): n is a, c, g, or t
cngcacgatctctctctctctctctctctctctctctctctctctctctctctcgccatttttttggaaacctctgcgccatgagagccaagtggaggaagaagcgaatgcgcaggctgaagcgcaaaagaagaaagatgaggcagaggtccaagtaaaccgctagcttgttgcaccgtggaggccacaggagcagaaacatggaatgccagacgctggggatgctggtacaagttgtgggactgcatgctactgtctagagcttgtctcaatggatctagaacttcatcgccctctgatcgccgatcacctctgagacccaccttgctcataaacaaaatgcccatgttggtcctctgccctggacctgtgacattctggactatttctgtgtttatttgtggccgagtgtaacaaccatataataaatcacctcttccgctgttttagctgaagaattaaaaaaaaaaaaaaaaaaaaaaaaaaaaaaaaaaaaaaaaaaaaaaaaaaaaaaaaaaaaaaaaaaaaaaaaaagagggggggcgcgcgggaaaaaaaacccaccacgggggcgcacaacaaagacacacacgcattatagaagaaagaaggggaccacagaagagggagaatataatacacaaaaacagcaggcgcaaacaacaaaacagaagagagaggaaaacaaaaacaacgagcatatcggagagagaaacaaaaaagaggggagagaaaaacaaggggaaacaacacaccaaaaacaaaaaacgccacagcggagaaaccaagacaagagagagaaaagagaaaaacaaagaaacataaacagagaagagaaaagataagcacaagaagaacaaacaaacacataccagggcaggaacgaacaaagggagaagaacaagagagggagaaacacccggcgacaaggaggaaacaagaaagagaggaagaccacaacaggagaaacagcgggagggagaaaaggtaggagagcaaacggaggagaaacagaaaaaaacggaagaaaacaaaacgaaggaaagaaagaaacagaagccggcagacaggaggagaacaggcacgaggacaacaacagaaaaaaaagcaaaagagaccaaccaagaagacggcgcaagaca

SEQ ID NO: 496207 - DNA, 443 bp, Homo sapiens
gcgagtgagtgagcgagccagtctttcttctgaaaccatgtgcgagtcgcctccctactagctgcagccggagaccaagacggccaccaccaccagggggaaccaaggcagccgagatgaacacgggtggcctgctggacccttccccggcagccctcggcccgacccctcttcccgcgacgtctccggcgctcgtgttctacgaagacgattaccggtactactacgatgacgacagttgcctccaggaggaccaggagggcgaccacgacgcctatcaactcctagaggacgaggacgaagacgtcgccgccaccgggtcgcttgctgacaggctacgtgatctcgtccgtcagaggctggccgaggttaacgcctccagcgcggtcgtcgcggggctcggcctcgtcgggagcgccgtcggcgcctacttcctctggccc

SEQ ID NO: 496208 - DNA, 203 bp, Homo sapiens
cctagagttcccggtcgctcggacgacagagatggcgagaagttcgccgcctgggtgaccagcatcaactggtcgcagctcatcgctgacgtgaaggagtttttccaggaactcgacaaaggggtgcaggcgctgggtggctggaaggtcgtgctgatggcgctgctcggcttgaagataatctcgatggtggtccgagcgga

SEQ ID NO: 496209 - DNA, 115 bp, Homo sapiens
cattgttcccatcattccagcatgtcattgcctgtgtccatggtgtgtgcacctactcacagtctgcacctgcattgcatgcaatgcttgtgcactttgcctgtctgttttcacc

SEQ ID NO: 496210 - DNA, 478 bp, Homo sapiens
  misc_feature (197)..(197): n is a, c, g, or t
  misc_feature (205)..(205): n is a, c, g, or t
  misc_feature (274)..(274): n is a, c, g, or t
  misc_feature (353)..(353): n is a, c, g, or t
  misc_feature (412)..(412): n is a, c, g, or t
  misc_feature (448)..(448): n is a, c, g, or t
tgtgttagccagggtggtctcaatctcctgacctcctgatccgcctgcctcggcctccgaaagtgctaggattacaggcgtgagccactgcacgtggcctgtctgctcttaaagagattaataaattagagggaaaactcagaatgtctttgtaatttaaatttttgttaagggaaaataataacatttataattgnttctctgngttaataatgggtactgtcaattaatttccttttttaatatattttttgagacggagtttctctcttgntgcgcaaggtggagtgcaagtggcaccatctctgctcactgcaagctctgcctccagggtcatgccattctgctgcctnagccttccgagtagctgggactacaggcatccgcaccacgcccggataatttttttcgnatttttagtagagaccggggttcaccatgttagccngatggctttctcctgacttgtgatcctgct

SEQ ID NO: 496211 - DNA, 415 bp, Homo sapiens
tgctgctagttggtctagagtagtcccctctggatgcaaagtgtcacgggtagaaactctacaaggttaaatttactgtcaaattgcagttagtatgatgaaatgaaaggttggtattatcaggaaaatgttttcttaagcttttcctttctcttacacctgccatgcctacccaaattgggcatttaatttcatctttaaactggtcgtcctgttacacgctaacttagtaagtgcttttcttatagaaccccttctgactgagcaatatgcctccctgtattataaaatctttctgataatgcattagaaggtttttttgtcgattagtaaaagtgctttccatgttactttattcagagctaataagtgctttccttagttttctagtaactaggtgtaaaaatcatgtgtc

SEQ ID NO: 496212 - DNA, 298 bp, Homo sapiens
tgctgcagctgatgcccgcctgacgcatgatcagcaagcagttccaccaggcagctgcgcgtgggcgagcgacagcccctgctgggtccccctgagtccatgcgggaacatgtggtcgctgactccaaggacatgaagacatgatgacatggaagaactgtcaaagatttatcatcaatgagaagatgaatgggaaagtgtgggaccttttccccagaggctgacaaaatcacagcaccatgctggttaggaaagatcaggaagagacactgaaggacctaactcttcaactaccaga

SEQ ID NO: 496213 - DNA, 775 bp, Homo sapiens
gcccggtatctgttctcgcccgaagaagctggtccttagcctgcgctgggagcaacctttcggtggccagctgtagcctggtcaccgttcttcaaataatggtttaattcttcagacgagaacgtttaggattacaaaagaaagggttctcttcacatccttatccgttgtgatgtagcattccgtttgaaatggtagccgttcgaatgtcagagagaagcatatgtatgagaatgaagagaggcttctcagaatgattgaaagcaggcggttcggttactggtatcatcagtggtaatgtgatataagacagttgtcgcagtttcatgatatgcctgggtgaaacaatgtgactttgtcaaaagacccaagatagttaaagtgggatcgagacatgtaagcaagcatcatggaggttgaagatgccgcatttggatggatgaattccaaattctgtttgctttgcttttaaatattgatatgcttatacatttacagtttatgcacaaaatgtagggttaataatatgttaacatggacatgaatcttctgtataaattctacgtttgaagtggctggcctaccatgtatgatgtattctgagcaggttgtccaaggaagctctaggaggggatggggacttagaggtgtgaaccaaggaattcgtatgcaaaataaatagcgcgggggagggtggattacttttgcccaaggtttgtaaaattgtaaggggatagaaccaagaattctcggtaatgggggaataaattatggc

SEQ ID NO: 496214 - DNA, 360 bp, Homo sapiens
tctcatatatgaggtaaagctctcagactcctgcgccaacttttatagtaagctggcttacctaggctgggggcttgcaactcactgtaacgaagccaaggagttcagatctagatagcagagaagtacgtctcatactaaaacatggcaactacggttagagtccaccccatgaagctgttacagatagtgtatctttgcctgaattctataagtatatatggtacagactaaaaaaaatgtggctaagctaggtagggctgtgctgtctcagtaggacattgacagcctccagctttcaccctctggagaccttggacctaagtgccacatgcattatgagacccggcaggggaaccg

SEQ ID NO: 496215 - DNA, 942 bp, Homo sapiens
ctctcgcgctacctcccgcgccgggtcctccgtcggttctctcgtgagtccacggtctggtcttccaggctacccgccttcgtctccgagttgcgactcgcggacggcgtccccgggcgaagaggctggactcggattcgtgcctgagcaatggctgccatccggaagaaacggtgatgtggtgatggagccgtgtggaaagaatgcttgtcatagtcttcaggcaaggaccagttcccagaggtgtatgtgcccacaggttgagaactatgtggcagatatcgaggtggatggcaagcaggtagagttggcttgtgggacacagctgggcaggacagattctgatcgcctgaggccctctcctacccagatacgatgttatactgatgtgttatccatcgacagacctgatagttagaaaacatccccagaaagtggacaccagaagtccacgcattcagtcccaacgtgccccatcatccccggggggcactaaagacggctctcgggaatgctgaagaacacaagcggcagctagccacgcatgaagccacggagcaggcgacaccctgacgaaccggcagacctcccgggacaccacacgagggagcaagggtaccatgcagggcacgccaagacccaacacgcgacgtgcaaccacggcaccggcaacgcaccccaccccgcccgcccgcacagcgggaagaacaccgggcgtccgggcccggccaccctgccgaccccggccgcaagccgcaccacgaggccgccccaccccggccaccaggcacgcacacgcccgaccaccaacccgcaaccacgccccgacaccaccaacaacaccacggcaagcaggaccgaaccaaacggaccacgaccgcgcaacccaccgaacaaccacgagcggcccaccgccaccccagcgagccgagagcccacaca

SEQ ID NO: 496216 - DNA, 264 bp, Homo sapiens
atagagtaaaatcttgggtcttcggtcttatcagagtagtgtgaccctgcaacgtgtcacagacagctctcagtgtcaccatctgtacagcgacgggataacgattgggtccagctcatagaactgtgaggatgaaacgatcgtgcccagtgacgcaggtagtatagtgtcagactgcagacgggttcacgagtggcggtgactaacaagccctgtgatccgagccctcccaagttctctgggactgcctgagaactcaggagc

SEQ ID NO: 496217 - DNA, 340 bp, Homo sapiens
ggacaccccggcgtgcgcagcccaggcgtctgcacctttcaccggagccgactacagcgggcgctatgaatgtaccggtccaggataaacatataggcagctataagggtgttgttgatatggcactcgacgccaagcaaagtactggcaagtacgccgcctacaccttcaccttcaccttgtaccttggaagacaagtcccgttatgacggaatggccaccgggacttcggacgcgctgggcgtttattttgctcacaccgaccctgtcttgaaagacttcggcgtgggggtcgcacaaatgacgtccaccccggagggcaaagtgtctttcgttaagt

SEQ ID NO: 496218 - DNA, 256 bp, Homo sapiens
aaggtaagtgcctttagtacgttctctctgccttaggctgtagtgcatgatagctagatcagcaggacagcattctcagtgaaagtgagccattcgtgggtggcatgtcactccacggaataaacataacttagaaataaatgattacgtaggatagcacagtgacatggtgcactgtgaacctgaggccactgtgtcaaactgtgcactggttgtgaatagggagagccaaaaattatgtcctactggtaatgag

SEQ ID NO: 496219 - DNA, 238 bp, Homo sapiens
aagactactcagtctgccctgaccgcctgtggcctccctctccgagagatgacggtgaacacgctgggtgatgaacgggaatgcttattgtctcggccattcattgttgaaacgcacctggaggacagacagattactttccttataaggctacatctatctgctatgccctgctcagttaactggcttgatctggaagactgctcctgaaatggtcttccccaggaagacttttctg

SEQ ID NO: 496220 - DNA, 198 bp, Homo sapiens
tttcggtgctgggtaggcccggtttcagcatagtagacaagaagcgcaggacagactgaattggggccaaacacagaatcaggaaagaggaggccatgcgctggttccagtagaagtatgatgggatcattcttcctggtaaataaatttccgtttgtatacaaaagagcaataaaaagtttttagtgaaaaaaaaaa

SEQ ID NO: 496221 - DNA, 370 bp, Homo sapiens
tttttttcttttttccacaaatagcacttttaatttggccactatttggaagtctgaacttaaaacagattcttggactgggtgggttcatatcccatcagctcgttcaatctttagccacctgtctcgtccccagtgggtctttcccagaaactactgccttcaccatgaagctccatgagtcttccccaattcaaacttgggcttcttcagcatttttatcttttcctaacgaagactatcatggagaggataaatagattggcaagccttttctatagtcttattcccaatgtctgtctgggaatcaatttattgaccatctttctttacaagtcatttgtctgcacctcctcgggtcatgattccc

SEQ ID NO: 496222 - DNA, 234 bp, Homo sapiens
agagacgagatgtacagagacagagacgagatgctggtggcgggacattgaggacagcaatggtagtctcaactataagagctcgtccgcatggtgctgaatggattaggaacttaccagtctccccagagtccgtgcctttccctgtgtgaatatagtatctatgcctatagtttaccctaaggactattcttgtatacagacaactttcccatctcgtctcttctctatgta

SEQ ID NO: 496223 - DNA, 304 bp, Homo sapiens
  misc_feature (145)..(145): n is a, c, g, or t
ccccccccccccccccccccccgctggtggagggcccaaaaaacctggggggggggaaaccgccgggggtgggcttcctaccaccccccgggggaaaaaggggccccggcccaattggggcccccaatttttggggtttaggacnaaaaggaaggggaagggaattcccctccccctcccccccccgtgggtgggaaccccccctaaggccaagcctgccctggggccccccaaccaggggtggggggacccccccccccccccccccgggccaaaaattttttctttaaagaatgttttggga

SEQ ID NO: 496224 - DNA, 610 bp, Homo sapiens
taaaaaaaagtgggggggccgcggggggggggtgacccccccggggggggggccctccctcttttttgggttaaaatttttagggggtgccgagggggggaggagggggggggcgccccactaattactccccccggggtgaagagaagggggcctctccaatcaactagaggaggagtcttcccgcctcaagaacgagagagaggcgtcttccaacaacggcagcgagccaagcatccatccacaactaatccgcgcgcggcggaggaagagaaaagcaccagtacgaccccacaaaataagaaggaggaggatgtccacgggggagcaatcacagcgggggtagcccccccggagaagaagggcggggggcggatcactcgagcgagagaaggcccgcgaagaacaagcgtgcgtgtgtgtggagacacaacaaccctcaattaaatttctacgcgccgaggagataaacaatatagacagaagcagaaaccagagagtctctgcggcggacgaagcagcgtgcgagcgcaccaggcgacgtgccccgaagaagaaaggtgggcacacacctgagaaagagccccgctagttgacgaggcgaaagact

SEQ ID NO: 496225 - DNA, 105 bp, Homo sapiens
ggatttgctggtgcagtacaactaggcttaatagggacatgaggtcaggagatcgagaccatcctggccagcacggtaaaaccccgtctctactaaaaacaagaa

SEQ ID NO: 496226 - DNA, 150 bp, Homo sapiens
ggaacctcagatcggctaacggacacacacaagtatatgcctacccgcgcagtactgatcattctatttccccctctattgatccccacctccaaatatctcatcaacaaccgcctattttacaccaaccccgccgttaggccgatctga

SEQ ID NO: 496227 - DNA, 324 bp, Homo sapiens
cgatcgagctcggtccccctagttttagaagtttcaatagcatcattaagctgggcacagtggctcattcctgtaatcccagcacttcagaaggccgaggcagggggaccacccgagcccaggcatccgagaccagccagggcaacatggggagacatctccacaaaaaattaaaaaataaaaattagccaggtgtagctggtggtcttagctactcaggaggctaaggtaggagactcactggagtccgggtggtcgagaatgcagtgaaccgcgaccgcgccactgcactccagcctaggcaacagagcaagaccctgtctc

SEQ ID NO: 496228 - DNA, 101 bp, Homo sapiens
gaggatccctaatttcaaaatattacgagtcttatgggtgaaaaatgaatcgagagggcagggtggctcgtatgggactaccggggagggatcagtggagc

SEQ ID NO: 496229 - DNA, 843 bp, Homo sapiens
gccggttcaaagaggttgttaaacggccgttgtgccaattttggggcaagatggcagcctctatgtggggcgagccgcttgttcacacccgtgttggggtgcgaccccgcaaagatacctttgcttgttgccccctggtatgccgccacgggtgtggtgtatccgaggtgctgtctctttcaaagaagggacaaggagtacgccctgctgtctccaaactcccccggcggtatatgctggggtgtggataaacaggacgttgtaccgacccgcgcgggttcattactctttctagaaagcaccaccggtgagaaatggacgagggtttccaccacgccaacatcaacgcgcgctaaggtttccccccacagagaaactccgcgtgtctgtctgggcggaagagagcacaccacagaaccagaacttgaaataatgaccgggcacgccgccggccaccctgcgcgaggtacgagagaccccccaggcagggatcgcacctcgcgccctgtgagtcgagcaaccaacccaagggtagggacggcgacgcttacgtgggatacccccccggccgtttttaaacgaaacacgcctccccggccggcacagcggcgcaacaacacccccgatgttttttcggaacatctccgcacgagacccccgggtatatgctgcagagagcccccgaggagctgaggaggatctcgaagggtaaatggatggtagggataccgctacccccaaggagggagggctgcctagcggaccccatagtcagagcaccagcggcttcaccgctctgggggcgacaaacacaaaggcttttcccccacaaaacaaaaacac

SEQ ID NO: 496230 - DNA, 938 bp, Homo sapiens
acccggcgctccattaaatagccgtagacggaacttcgcctttctctcggccttagcgccatttttttggaaacctctgcgccatgagagccaagtggaggaagaagcgaatgcgcaggctgaagcgcaaaagaagaaagatgaggcagaggtccaagtaaaccgctagcttgttgcaccgtggaggccacaggagcagaaacatggaatgccagacgctggggatgctggtacaagttgtgggactgcatgctactgtctagagcttgtctcaatggatctagaacttcatcgccctctgatcgccgatcacctctgagacccaccttgctcataaacaaaatgcccatgttggtcctctgccctggacctgtgacattctggactatttctgtgtttatttgtggccgagtgtaacaaccatataataaatcacctcttccgctgttttagctgaagaattaaatcagaaaaatgagaacacaagaacatagaaaacaaagagaaaaggaacaacagaacaatacataggaaaaacaaaaacacaagacaagaaaacaacaagtaagagaggcggagcgccgcgaacgccaaccaagcccaagatccctaaccagggggcgcgcggcccaaaacgacattagacgggggcgatggacaccaaaccactctggagggccgaaaacaaataggaagagagagacccaccccacggacgagagaagggataggccgaagtccggcaatgtcccaaaccagatcccaacacaccaggaaaacggacatctgcgcgcacccccggggcacccgttgtgttcccaaaccacagccgacgcgcgtgcacgggaggccgccgaacggcgcaacaagaaaaacgcgagcctcgcagacacgagacgacaccacaaaggggattacaccactacccggcgaccgga

SEQ ID NO: 496231 - DNA, 924 bp, Homo sapiens
acccggcgctccattaaatagccgtagacggaacttcgcctttctctcggccttagcgccatttttttggaaacctctgcgccatgagagccaagtggaggaagaagcgaatgcgcaggctgaagcgcaaaagaagaaagatgaggcagaggtccaagtaaaccgctagcttgttgcaccgtggaggccacaggagcagaaacatggaatgccagacgctggggatgctggtacaagttgtgggactgcatgctactgtctagagcttgtctcaatggatctagaacttcatcgccctctgatcgccgatcacctctgagacccaccttgctcataaacaaaatgcccatgttggtcctctgccctggacctgtgacattctggactatttctgtgtttatttgtggccgagtgtaacaaccatataataaatcacctcttccgctgttttagctgaagaattaaaaaaaaaaaacaaaaaaaaaaaaaaaaaaaaaaaagggggggcgcggcataaaaagacccaaaagggggcaaagtcagagggagaccaaaggttccggagaaaaggggcgcccaataaggggagccgcatattaaaaccaaaggaccgggggcgcagaatataaacaaaggcgagaaggggacaacaaggcgaacacctgggacacatggggaagggcaccatcaacaaaggagggaggggacaaaaaaatgggagaacacaatcgccccagaggaatctatcaaaggcccccaccggggccacatatatccaacagtttctacgacgccgcgtcaatcggtgtggataaacacacagcgggggaaagaacacgcgagagacgtcacagcactttcggcccaacaggagaaaagacaatctcgcagacatttcttcacccggggaggtatcacagctaa

SEQ ID NO: 496232 - DNA, 620 bp, Homo sapiens
acccggcgctccattaaatagccgtagacggaacttcgcctttctctcggccttagcgccatttttttggaaacctctgcgccatgagagccaagtggaggaagaagcgaatgcgcaggctgaagcgcaaaagaagaaagatgaggcagaggtccaagtaaaccgctagcttgttgcaccgtggaggccacaggagcagaaacatggaatgccagacgctggggatgctggtacaagttgtgggactgcatgctactgtctagagcttgtctcaatggatctagaacttcatcgccctctgatcgccgatcacctctgagacccaccttgctcataaacaaaatgcccatgttggtcctctgccctggacctgtgacattctggactatttctgtgtttatttgtggccgagtgtaacaaccatataataaatcacctcttccgctgttttagctgaagaattaaagccccctattccccaattgggcccaaaatgtttcttttccggggcctttaatttggcttgcggctccttttttttttttgggcgggaggtgtgttcaacggcctctcaaaaaaataaggttttcttcccgggccccccccgcgaatgggaaggg

SEQ ID NO: 496233 - DNA, 471 bp, Homo sapiens
gagtcccggtcttcaatcggtaagccaatctgggaagtgggggggattcccttggataggactgggtcatctttggaaccaagaacaacctcggggcctggggaatccttaaatctggcaggcaaatctaagcagcatttccttcaaaaatttctaaaatccggcggaatggtcttagagaaataagggtttaaaatgagggtttttcttcaagaaaacaaggcttccaaaggaaaaggttggggaaaaatctttctttaagaatttcttagtctttttctgcattggagcggggaatggttgggtggaccctgttggaggatttccttgccactagagcccctggagatcatttgcccatagaggacagtcttccaaatgggtctcacaagcatttgccccgttttcttggcatattccttccttggccaggtaacttccctcaatccgggtcctttggagaagtttgct

SEQ ID NO: 496234 - DNA, 540 bp, Homo sapiens
  misc_feature (520)..(520): n is a, c, g, or t
  misc_feature (523)..(523): n is a, c, g, or t
  misc_feature (525)..(525): n is a, c, g, or t
acccggcgctccattaaatagccgtagacggaacttcgcctttctctcggccttagcgccatttttttggaaacctctgcgccatgagagccaagtggaggaagaagcgaatgcgcaggctgaagcgcaaaagaagaaagatgaggcagaggtccaagtaaaccgctagcttgttgcaccgtggaggccacaggagcagaaacatggaatgccagacgctggggatgctggtacaagttgtgggactgcatgctactgtctagagcttgtctcaatggatctagaacttcatcgccctctgatcgccgatcacctctgagacccaccttgctcataaacaaaatgcccatgttggtcctctgccctggacctgtgacattctggactatttctgtgtttatttgtggccgagtgtaacaaccatataataaatcacctcttccgctgttttagctgaagaattaaaaaaaaaaaaaaagaaaaaaaaaaaaaaaaaaaaaaaaaaaaaaaaaaaaaaacnaananaaaaaaaaaaaaaat

SEQ ID NO: 496235 - DNA, 181 bp, Homo sapiens
cttcaccgagtctgtgtctgcagccagagcgaggggcgtgtcttctttgcaggaagccagccttggtctccacagtcagaaggtggccaggatcccaagaacttctcagacatccatcctggaatgctgctcattggttattgtgacgagcatccaggcctctggcgtgtacatccagtat

SEQ ID NO: 496236 - DNA, 526 bp, Homo sapiens
acccggcgctccattaaatagccgtagacggaacttcgcctttctctcggccttagcgccatttttttggaaacctctgcgccatgagagccaagtggaggaagaagcgaatgcgcaggctgaagcgcaaaagaagaaagatgaggcagaggtccaagtaaaccgctagcttgttgcaccgtggaggccacaggagcagaaacatggaatgccagacgctggggatgctggtacaagttgtgggactgcatgctactgtctagagcttgtctcaatggatctagaacttcatcgccctctgatcgccgatcacctctgagacccaccttgctcataaacaaaatgcccatgttggtcctctgccctggacctgtgacattctggactatttctgtgtttatttgtggccgagtgtaacaaccatataataaatcacctcttccgctgttttagctgaagaattaaattattatatggttgttacactcggacacaaataaacacagaaatagtccagaagtcgacc

SEQ ID NO: 496237 - DNA, 475 bp, Homo sapiens
caaaataatgatttattacgccttcagctatttacaaagatgatctggttggaaatgtcacatggcttgggtaaaatattcttctatgatggaaggtctcttttcatttcacctgctggcgtgagttaatattcaaaacgcatgttggttttctagagtcatggctgccagtatttgctctagccttcttacgatatttcctcctggtgcagtagacactgacgagagtgatgattagcatcacagcaaacacggtgaccgtggaagaaacagcgatgataacagtgtctcgggtggaccctctcttctcacaccttttgcccatgtaccaccagtcttctcctgcaggacacttgcactcagctctgccatcttggacaacacagatgccaccgctctgacatacaacctcagagcaggcattatggacagccaaggtggggactgggtcgggggacagctgatgtagaattga

SEQ ID NO: 496238 - DNA, 1122 bp, Homo sapiens
  misc_feature (659)..(659): n is a, c, g, or t
  misc_feature (671)..(671): n is a, c, g, or t
  misc_feature (682)..(682): n is a, c, g, or t
  misc_feature (692)..(692): n is a, c, g, or t
  misc_feature (697)..(699): n is a, c, g, or t
  misc_feature (701)..(701): n is a, c, g, or t
  misc_feature (710)..(710): n is a, c, g, or t
  misc_feature (715)..(715): n is a, c, g, or t
  misc_feature (729)..(730): n is a, c, g, or t
  misc_feature (736)..(737): n is a, c, g, or t
  misc_feature (748)..(750): n is a, c, g, or t
  misc_feature (771)..(772): n is a, c, g, or t
  misc_feature (774)..(774): n is a, c, g, or t
  misc_feature (778)..(778): n is a, c, g, or t
  misc_feature (789)..(789): n is a, c, g, or t
  misc_feature (796)..(796): n is a, c, g, or t
  misc_feature (800)..(802): n is a, c, g, or t
  misc_feature (804)..(806): n is a, c, g, or t
  misc_feature (811)..(811): n is a, c, g, or t
  misc_feature (822)..(823): n is a, c, g, or t
  misc_feature (828)..(828): n is a, c, g, or t
  misc_feature (832)..(832): n is a, c, g, or t
  misc_feature (836)..(836): n is a, c, g, or t
  misc_feature (840)..(840): n is a, c, g, or t
  misc_feature (859)..(859): n is a, c, g, or t
  misc_feature (867)..(867): n is a, c, g, or t
  misc_feature (875)..(875): n is a, c, g, or t
  misc_feature (877)..(878): n is a, c, g, or t
  misc_feature (880)..(881): n is a, c, g, or t
  misc_feature (890)..(890): n is a, c, g, or t
  misc_feature (892)..(892): n is a, c, g, or t
  misc_feature (897)..(898): n is a, c, g, or t
  misc_feature (900)..(900): n is a, c, g, or t
  misc_feature (902)..(902): n is a, c, g, or t
  misc_feature (904)..(904): n is a, c, g, or t
  misc_feature (912)..(912): n is a, c, g, or t
  misc_feature (914)..(914): n is a, c, g, or t
  misc_feature (917)..(917): n is a, c, g, or t
  misc_feature (929)..(929): n is a, c, g, or t
  misc_feature (934)..(934): n is a, c, g, or t
  misc_feature (953)..(953): n is a, c, g, or t
  misc_feature (955)..(956): n is a, c, g, or t
  misc_feature (960)..(961): n is a, c, g, or t
acccggcgctccattaaatagccgtagacggaacttcgcctttctctcggccttagcgccatttttttggaaacctctgcgccatgagagccaagtggaggaagaagcgaatgcgcaggctgaagcgcaaaagaagaaagatgaggcagaggtccaagtaaaccgctagcttgttgcaccgtggaggccacaggagcagaaacatggaatgccagacgctggggatgctggtacaagttgtgggactgcatgctactgtctagagcttgtctcaatggatctagaacttcatcgccctctgatcgccgatcacctctgagacccaccttgctcataaacaaaatgcccatgttggtcctctgccctggacctgtgacattctggactatttctgtgtttatttgtggccgagtgtaacaaccatataataaatcacctcttccgctgttttagctgaagaattaaaaaaaaaaaaaaaaaaaaaaaaaaaaaaaaaaaaaaaaaaaaaaaaaaaaaaaaaaaaaaaaaaaaaaaaaaaaaaaaaaaaaaaaaaaaaaacaaaaaaaaaaaaaaaaaaacttttgggggcggtttgggccaagggatttttaaattggaaaaggtttatcattgcggccgaatttagagttaattgggcnaattcccctaanggggggggttnaaaaataaangggcnnngntttaaaaanggggnaatgggaaaaaccnnggggtnnccaaattaaannncttggaaaaaatccccttttnncnagtngggaaaaaacnaaaaagncccnnncnnntcccntttccaaaaanntgccnaccntaangggnaaaggaaaattgtacggtnaaattttngtaaaaancnngnnaaaattttngnaaaannancntntttttaancnaangggcaaaagggnaaaanccttttaaaaaaaaaaaananncccnnaaagggtagaggttttcccaatgtgaaaaaagaggccccttttaaaaaagggggccccaacctcaagggcgaaaaaaccctttttataggggaggccccctattggaaaccattcccctaaacaaagtttgtggggtccaagggcccacctttggcccccg

SEQ ID NO: 496239 - DNA, 117 bp, Homo sapiens
cctgatcggaacaaaaatgggagaaatgaagttagcagtaacaaacacttactgtatcgacttaccagtgtgccaatgcactgttttaatgcacttgacgacatgttagctacactt

SEQ ID NO: 496240 - DNA, 623 bp, Homo sapiens
  misc_feature (603)..(603): n is a, c, g, or t
  misc_feature (606)..(606): n is a, c, g, or t
  misc_feature (608)..(608): n is a, c, g, or t
acccggcgctccattaaatagccgtagacggaacttcgcctttctctcggccttagcgccatttttttggaaacctctgcgccatgagagccaagtggaggaagaagcgaatgcgcaggctgaagcgcaaaagaagaaagatgaggcagaggtccaagtaaaccgctagcttgttgcaccgtggaggccacaggagcagaaacatggaatgccagacgctggggatgctggtacaagttgtgggactgcatgctactgtctagagcttgtctcaatggatctagaacttcatcgccctctgatcgccgatcacctctgagacccaccttgctcataaacaaaatgcccatgttggtcctctgccctggacctgtgacattctggactatttctgtgtttatttgtggccgagtgtaacaaccatataataaatcacctcttccgctgttttagctgaagaattaaaaaaaaaaaaaaaaaaaaaaaaaaaaaaaaaaaaaaaaaaaaaaaaaaaaaaaaaaaaaaaaaaaaaaaaaaaaaaaaaaaaaaaaaaaaaaaaaagaaaaaaaaaaaaaaaaaaaaaaaaaaaaaaaaaaaaaaacnaananaaaaaaaaaaaaaat

SEQ ID NO: 496241 - DNA, 731 bp, Homo sapiens
acccggcgctccattaaatagccgtagacggaacttcgcctttctctcggccttagcgccatttttttggaaacctctgcgccatgagagccaagtggaggaagaagcgaatgcgcaggctgaagcgcaaaagaagaaagatgaggcagaggtccaagtaaaccgctagcttgttgcaccgtggaggccacaggagcagaaacatggaatgccagacgctggggatgctggtacaagttgtgggactgcatgctactgtctagagcttgtctcaatggatctagaacttcatcgccctctgatcgccgatcacctctgagacccaccttgctcataaacaaaatgcccatgttggtcctctgccctggacctgtgacattctggactatttctgtgtttatttgtggccgagtgtaacaaccaaaaaaaaaaaaaaaaaaaaaaaaaaaaaaaattttggggggccgctcgggcctataaagaggtttttataaacccagctgttgtgggggggcgccgcgccccagtatatgtttagatgacactttgtgcccatagaggtgttcccaagaaaacccggcgtctgtaccatatgttgttgggttctctccaccaaataaaaaagcgcggcggaacccgcgttttgtgaaaaccccagaggggtttggagccaataaggccttcaacgggcccaggagctcataaccccgccgggtgagaatagaaagaaa

SEQ ID NO: 496242 - DNA, 464 bp, Homo sapiens
  misc_feature (441)..(441): n is a, c, g, or t
acccggcgctccattaaatagccgtagacggaacttcgcctttctctcggccttagcgccatttttttggaaacctctgcgccatgagagccaagtggaggaagaagcgaatgcgcaggctgaagcgcaaaagaagaaagatgaggcagaggtccaagtaaaccgctagcttgttgcaccgtggaggccacaggagcagaaacatggaatgccagacgctggggatgctggtacaagttgtgggactgcatgctactgtctagagcttgtctcaatggatctagaacttcatcgccctctgatcgccgatcacctctgagacccaccttgctcataaacaaaatgcccatgttggtcctctgccctggacctgtgacattctggactatttctgtgtttatttgtggccgagtgtaacaaccatataataaaacagggaanaggcggccggtcgcgcggccgcg

SEQ ID NO: 496243 - DNA, 466 bp, Homo sapiens
  misc_feature (448)..(450): n is a, c, g, or t
  misc_feature (452)..(452): n is a, c, g, or t
  misc_feature (455)..(455): n is a, c, g, or t
  misc_feature (458)..(459): n is a, c, g, or t
  misc_feature (461)..(461): n is a, c, g, or t
acccggcgctccattaaatagccgtagacggaacttcgcctttctctcggccttagcgccatttttttggaaacctctgcgccatgagagccaagtggaggaagaagcgaatgcgcaggctgaagcgcaaaagaagaaagatgaggcagaggtccaagtaaaccgctagcttgttgcaccgtggaggccacaggagcagaaacatggaatgccagacgctggggatgctggtacaagttgtgggactgcatgctactgtctagagcttgtctcaatggatctagaacttcatcgccctctgatcgccgatcacctctgagacccaccttgctcataaacaaaatgcccatgttggtcctctgccctggacctgtgacattctggactatttctgtgtttatttgtggccgagtgtaacaaccatataataaatcacctcttccgctannncngcnganncncattt

SEQ ID NO: 496244 - DNA, 583 bp, Homo sapiens
accctggtcgagtaccaaagctgctgagcaagcaccagaagcaccaggctattgaagcagagcatgatgccagcgctgcacggactccgatgaggttatcgacatggtgtgaatccctcattgaacgtggagcctgtgccggcagtgaggatgctgtcaatgcccgactggctgccttatctgaccagtgtgccgttcttggtgcaaaagtcagcggaaaagagccagaaactgaaaggaagccaacaagcagcagaacttcaacacagggatcaaggactttgacttcgtggctgtctgaggtggaggccctgctggcatccgaagattatggcaaagacctggcttctgtgaacaacctgctgaaaaagcatcaactgctggaagcagatatatctgcccatgaggatcgcctgaaggacctgaacagccaggcagacagcctgatgaccagcagtgccttcgacacctcccaagtaaaggacaagagggacaccatcaacgggcgcttccagaagatcaagagcatggcggactcccggtgagacaagctgaatgaacccatcgcctcaccagttcttcg

SEQ ID NO: 496245 - DNA, 92 bp, Homo sapiens
ccccggggggggggggtttgggttttttttttcccctttaggggtcccgggggggttgtgtcccttaaatttttttggggccccccccccca

SEQ ID NO: 496246 - DNA, 271 bp, Homo sapiens
tcagtggttatcaaaaatcagcaagtagcgcaatgtctactgttggtaaggtaatgatgggagctggagctgcaattacagcagttggtgtaacaggtgtaaagagctttggagacttccaagcgtcacttaaccaagccgcagtcatcgctggtggtacatcaaaagacattaacggacttgctgacgtagccacaaaatgggtgctgacctgcctttaagcgctggtgctgctgcgaaagtattggtagccatggctcgtgacggggcg

SEQ ID NO: 496247 - DNA, 114 bp, Homo sapiens
ggaagacaggcgcatgagccagtggatcttgaagacgctgtacgtgtacctgcagaggatggacacccatgaagatgccagcggcacggaagcaggcggacatgaccatgtaga

SEQ ID NO: 496248 - DNA, 221 bp, Homo sapiens
cacgggaggatgtcagccaatgaacgccctggagtcctacgccttcaacatgaagagcgccgtgtaggatgaggggctcaaggtgctagatcatgcgaggccgactagaagaaggtgctggacaagtgtcaagagcgtcatctcgtgtcttgacgccaacacctttgcctataaggacgattttgagcacgagaggaaggagctgtcgccgctgcgcctgt

SEQ ID NO: 496249 - DNA, 466 bp, Homo sapiens
tttccatcacttgtgaaggtcaagagttcatgagctttatgtgcaccattgattcgttaggaaacacgttccaaggagatctcctgtcaggcgatcttacaactgcaatgtcctgtgcatccgacgttagatattctacctcggggcctctctatgtcgcctacttgacctccaccggccggtacgtgcgttgagacccataatgagtcacacttttctcaggatacagcctcccttgacatagtctcatccacagtatgggtgcagaattgtataaggcaactccatggtttcattacccaatgtaaactgtttatagacatatgcccagtctagctcgattcattctctctttattccgggctgtcagctgcccagatctcattttagacatgttctagacatgatatgattctatcgatagacactagatattatcatgatgccacacagggaatcttcattt

SEQ ID NO: 496250 - DNA, 245 bp, Homo sapiens
cataattcccaggtgttgtggtaggtaattgaatcatgggggcagtttccctcatgctattctcatgatagtgagctttcataagatctgatggttttataagtgcctggcatttcccctactggctctcattatcactcgtgccgccctgtgaacaggtgccttccaccgtgattgttaagtttcctgaggccttcccagccatgtggacctgtgagtcgaaaattaaacctcttttataatta

SEQ ID NO: 496251 - DNA, 117 bp, Homo sapiens
agcccaaagtgaaaacagtatctaagtattcaagtttattctagcacatattttttaagagccttaaagaggtttcacggatggtccgagggatcctcgtagagatcgacctcgcag

SEQ ID NO: 496252 - DNA, 101 bp, Homo sapiens
ggtaagaccaacatgtttggtttaagattgagagttcagctcctggaattaggcaaggagggggattcatatatgcttggaaaattgaatatctctggttt

SEQ ID NO: 496253 - DNA, 258 bp, Homo sapiens
ggccaggctggtctcgaactcctgacctcaggtgatctgccttccctggctccggacatgctgggattacaggtgggagccaccacgccaggccacagtttgatgagttttgagaaagtaatatacgcatgtaaccaccatcaccacaatcaagatctagaacatttccatcaccccaaaattccctggtactcgtccctggtcaccagcaagccctgatctgttttctgtcactgtggatcagatttttcttttcta

SEQ ID NO: 496254 - DNA, 497 bp, Homo sapiens
  misc_feature (84)..(84): n is a, c, g, or t
  misc_feature (101)..(101): n is a, c, g, or t
  misc_feature (135)..(135): n is a, c, g, or t
  misc_feature (195)..(195): n is a, c, g, or t
  misc_feature (325)..(325): n is a, c, g, or t
  misc_feature (347)..(347): n is a, c, g, or t
  misc_feature (353)..(353): n is a, c, g, or t
  misc_feature (356)..(356): n is a, c, g, or t
  misc_feature (386)..(386): n is a, c, g, or t
  misc_feature (396)..(396): n is a, c, g, or t
  misc_feature (411)..(411): n is a, c, g, or t
  misc_feature (436)..(436): n is a, c, g, or t
cgttatagaggatcccttcagcacatctagtcaccatgagtgatctgtattgatgtgacatgtgtgtgtcccatgatacctgcngtgtgaatgctgatggnctgtggcacacagatgctcataactgttgtcctntggctgtcccctttattatttaagatgcccttctctgtctcctttcatgttttttgcccntatttcatccctctttgatattataactaccacccctgccttctttttgtttggctggtatacttttgcctatcatttgaatttaaacctttgagaatcacatttttatgtggttctcttggatgaagcnttgagttttgctttctgatccnacttcnaantctttttaattcataagtgagtttaggccntttatatgcnttgctgtggtataantgtttggtcttggttatgtcatacnttctgttggctttttgtgtttgtaatttttcatatatcctaactgtgctgaagggtaccga

SEQ ID NO: 496255 - DNA, 426 bp, Homo sapiens
ttgatctagagatcccctaggtggacagcgacgcgcacagcatgcagcaggcagtacgctctggcgcagtcccatggccccacatccaccagcccaacccagcccatagtgccccaatggtgctctgcctctgtggacatcctctgatggcccctgtggaaaatccaccagacccggggtcacctcttcttcccaggaaggtggctgtccttaccttggccttgaggccagtgagctcacaggccaaacatggaagcaagctgatctggggccctgaaggagtggcctggctctgggcccctgtgctctgaggtgcactcaccctggctgtctgttgagaacctgctggggccccgcaatcttggttgtgagtacctgctaggtgtgaggctctgctttctcaaacttcatggccccaggaggcgt

SEQ ID NO: 496256 - DNA, 526 bp, Homo sapiens
gagtgtgtatgctgaaacctgggcttctgtgaggcgatgcctcaccccacttcggctcttgcttggtgggctgcatccactgtctgacaagccccagtgagatgaacctggtacctcagttggaaatgccgaaatcacccatcttctgcgtcgctcatactgggagctgtagactggagctgttcctattcggccatcttggaacctcctgtatcacaatttctttatccactttttgattggtgggaatttgagctgcttccatgtttttgcaattgccaattgtgctactataaacatgtgtgtggaagtatcttttttgtataatgacttctttcctctgggtagataactcatagtgggactgctggattaaatggttgttctacttttagttctttaagggatatcctcactgttgtccttagtggttgtactagtttacattcctaccagcagtggaaaagtgtttccttttcaccacatctatgccgacatctgtttttttttaatcttttgattatgg

SEQ ID NO: 496257 - DNA, 662 bp, Homo sapiens
tcacaccactgcactccagcctgggcgacaaaacaagactccgtctcaaaaaaaaaaaaaattacagtctgtccatacagttaaagaaattaaaaagcccccgataggaatatctattctgttctctaaaattgagtgtacatttaagaccatttaagacagaaaaggcagaactaacaagtgtactctaggtgataaatctggtaccactactgtaccccaatatgttcagttctatctgagtaaaaatagagatctggaatataactactgggccccctactcagctcttaactggcatgggtacacaggctcttgacaacagcaagcacaactctcacgcttaaaccaatatcaacaacacataggtatgaagaatccccttaagaataaaactatccccccaaaaccagctgtagagcatacgtatatcccgtgacaataacaaaaattcacaagccatcactgggaagcgtggatattgcaccagaagggaaaatagcagtccacactatcactgtttacctaacacgcacacaaaaccctaacctaggcactgacctacgcattgaaccttacccagggcacaataactgcctgtagaacggaaaaacaagccgaggctccccacaagtgtgacctgcattaatcccactcaaatc

SEQ ID NO: 496258 - DNA, 256 bp, Homo sapiens
atgatgtgtgcgaccaagcacacgccctcgccagggcccttgctgccctggctgcacagcagcgcggactgagcgtagccggtctccaccactgacacggcgagctgctgccccagaggtgactccggcagctgtagaagccgaggcaccccgcgaactgcagcagcatgcgtcggaactcacactggtttttcctgagcaaggcggaggtcagcttgaggacaccatccgtggcaagccccaccacagacttgca

SEQ ID NO: 496259 - DNA, 738 bp, Homo sapiens
tctgtgaacaaccagctctcccagaaactaatagagtgagaactcgaccattaaggaagggcactaaactattcatgaggaatctaccttcaagatccaagcacctcccattaggcctacgtctccaacactgggggtcaaatatcaacatgaagtttggagggcacaaacaaaccacatccaaatcatagcaaggtgtttggctgtgaacaaacaaaacaaaacatgattttttattagacaaagtagagattgtgtattgatgaacaatccattgactgatgatattaactgattgatatggattaatatataattaatatcaattgagtgagttgggagtctgtggcaggtggatcacatgaggccaggagtttgagaccagcctgggtgacagggcgagaccccatctcaaaatcaattgatattaattgataatacagaaggagggtacaactgctgctgtaattaccttgaataaatgaaagaagaagagccattggggcacaaatgaaagggttggccttagctaggatcatggacagtctaccaaagaaacatccgggaaggccagtatgtcgaccagctgcgaagtgagtgacggtggtgagggccggaggctaatcaatcctcgggcgcttacgaactgcgcagccgaggggaacctcagggcggcaaaaggaattggtgccccattcccacgggggcgtataagacacacaagggtgctgtgccgcg

SEQ ID NO: 496260 - DNA, 910 bp, Homo sapiens
cgctgcactggccgtgtccacgggtcacgggttgaccaaggtgatcgcgcgttttggcacccaacctgcgttttttaacgggtaccctccccagtgggcttgccccccccccgcggtggtggacaccattgcgccttgggggacttcgttgtgtttttggtttttttagttgttgtgtggttaaaattggttatattctaaagggtaactgccccgtgttaacgaaataatttgggtgacctacaaaaagatggccttttttcccacccgcccctatgagggaaatttgaacaacagctgggaaaaacccatctttgggttgccaattctaaggaaccccctgccgctctatgtagttcaccctgaggtcttcccgttgtttcccggaacccggtccatggtgaaatttttggtgtgttttgggtgtttttttatgcagcaacccacggtgagaacccgggcgagtgttttccaggctgtgtagaagcacacgtttacccgttggcttgctttgtgtgtctggtataaaagggaagtgccactacagtaaaaaatgctgtaaataaaatcgaccacgtgttctccacgaaaactggaataatctcgcccgagagcttcgaatggcttcttgtaaccacctgtacggagatttatagaaaatagattgggttttaaatccccggaaaattgtggaggttggtggagcccctcgaggtggaggggaactttcacggctttcttaaagctgaataaaagggtgtaaccccaagagtaccttttttttggaacccccgttttgatggccaaataaattatggtcgaaacaaccaatctccggtttattattccctaaggaatctgtggtataataccctgggaccccttataaagcccaaagtggttgtttcca

SEQ ID NO: 496261 - DNA, 477 bp, Homo sapiens
tgcatgcaggcagactgtagagggacccccgccccgagcacagtgcttccagaaacactggtgacattctacagcagctttggccaatgataattcctgcatatgtactatatctgcactgaccaatacaacagagccattggccactcacagacactgactactcgaaatatgcctgcactgatgaattttgagcctaatataaatgcaaagagccatattagctagatgctacaggactcaacagagcagcttacatgactatgtaaatatcaggcacatggaagacacatactctgtgatctaaacttatgacactatcaatacgcattcgatgagaaataacatcttccacagaaacaccaatttataagctcttataaataatttgtcactacaaaggaactatcaaagagctaaaagaacagatatttggctgggcgcagtaactcatgcccgtaatcccagcactgtgct

SEQ ID NO: 496262 - DNA, 239 bp, Homo sapiens
  misc_feature (141)..(141): n is a, c, g, or t
  misc_feature (214)..(214): n is a, c, g, or t
cccatgccattatagcttaggtatgtcgtactatctaggttgggtaagtagatccatgatgttgcacagtgacgaaattgcctaatgatgcatttctcagaaggtatccccgtccttaagcaaggtgtgactatgtgtatnaggctgctttctatgttgcttagcacccagaaggcagctcccggaaaatataatttagtctgggtgtcagagnagcatgcagtcaaagttagaggggg

SEQ ID NO: 496263 - DNA, 81 bp, Homo sapiens
gcggccgcctactactactactactgctcgaattcaagcttctaacgatgtacggggacatgttattaaaaaatgtgaact

SEQ ID NO: 496264 - DNA, 444 bp, Homo sapiens
cacccatcccataaaatatgtagtgaagataaaataaagataatagtatgttgatgtccccggagctagctctttagagcaagagtcagtccacagaccgggtcaaggaacggagataataactacttgaggctttgccagtcatgtcacctccatagcagttactcaactgtacatttagaacacagtttccttttactgtgcataaattatttggtgtggttatgctcccatataattttatttctggacatagaaatttaggtctcatataatgctcatgtatcactgagctccttgtgttctcctgcataacatcttatctttgtcttaccctctcagccccggctccagcttccgcagctcctccaccgcctgaaccggctccatcgatgtcatctgttcttgttctccttgtgtaaattcttttgggaggggtgttcc

SEQ ID NO: 496265 - DNA, 117 bp, Homo sapiens
catgacgtgtgggagacggaatggggtagcgtgataagggcgatgagtgtggagaggaatggggtgggttattgtatgttcaaactgtcattttatttttaccccggtacatgcaag

SEQ ID NO: 496266 - DNA, 187 bp, Homo sapiens
gaggactctgaagcactggggaggactctgaagcatggatttgtttctgggagctctattctgtcccttatgctctatatattgtttttatgcaagtaccatactgttttccttactataatgtgtgtgtgtgtgtatgtgtgtgtgtgtgtgtgtgtgtgtatctatgttgcccagtgctacagag

SEQ ID NO: 496267 - DNA, 131 bp, Homo sapiens
gcgaatggctcattaaatcagttatggttcctttggtcgttcgctcctttccaccacgcttctgtttcgtcaggaccgtggccgcgcaacaggtcttgaggcttgccgccgcaattttggccgtatggccc

SEQ ID NO: 496268 - DNA, 1101 bp, Homo sapiens
gtttttcttgtgtttctttctttgtgcctctgtcgttttgttctctcgttttttactgtagtatcttgtccaaattttgtgtttttcttcttttttattatttttgtgatgtgtgtggtcatgtgcttcatctcttttatctctttgtagtacttcgtcaatgcccctagtctgttaaatcgttttggctcttaggccttttttatcgtgggaaatcatctctgtattaatttttgtcttttgggttctgtgtattggatgattttatccttcggtgcttctcgtatcctgctttcttctgtggtggtagctgttcttgttgtatgaggtgatggaattcggatgtgtctcgatccttccacatctgcccgcccagagctgtacgggctgatgcgtgagtgggggcacagcagcgccactcccagaggccgtaccttcaagcagctggtggaggcgctggacaaggtcctgctggccgtctctgaggtagtacctcgatcctcgcgcctgaccgttcggaccctattccccctctggtggggacgcctgcagcacctgctcctccagcgattctgtcttctgctcacgacccctctgccattgggatccagctccttccccttcgggtctggggttctagacatgagcaagggcttaaggctgtgctggctactataggctggtggccttgggccttggggctcagccacagcctgacacagtgctcgaccattgatagcatggggcccctggcccagagttgctgtgcctgtgtccaagggccgtgcgccttgcccttggagctgccgttgcctgtgtcctgatggccacaaatgtcagggttcatgctcaggcttcattggaccattaggcagcattaagtccccatcaccagggtttggcatgaagcacatagagacataggaggagcagtgcatatagcataaagcctccgtgccatcacgcaatagcacaagcaaggaaggtatcatgcggcactcgtgtagcccccatttccccacacctccccctgcatgcagcagccccagcgtcttgacgggagcattggcaccacatgataacctacagaggcatggaagc

SEQ ID NO: 496269 - DNA, 756 bp, Homo sapiens
  misc_feature (338)..(338): n is a, c, g, or t
  misc_feature (341)..(341): n is a, c, g, or t
gtccccaaccaagctgagtgccagcaggggggactccaccatcccacaaggcagccggctcaataacatcgttaacaggtccatgacgggctctccccgcagcagcagctagaccactcaccactctacatgctcccccactgccataaaacattaagaaaatcatattgcttcttctcctatgtgtaaggtgaaccatgtcagcatgcagagatgtgcctccacaccgctggccccacgttccctgaggagatgggagagacccagtctgagtactcagattctagctgtgagaacggggccttcttctgcaatgagtgtgactgccgcttctctgnggnggcctcactcaagaggcacacgctgcagacccacagtgacaaaccctacaagtgtgaccgctgccaggcctccttccgcgtacaagggcaacctcgccagccagcaagaccgtccatacacggtgagaaacccgtatcgattgcaacatctagtggggctccagttacaaccaggccagctcaaccgtgaaaacccaacacctcgaattgcactctggagtagaagccactacaaagtgcgaaacctgtcggagcctagatttgatacaggtggcccacactccgtgcccatgtgctgatccacactggtgagaagccctatccactgtgaaatctgtggcacccgtttccggcaccttcagactctgaagagccacctgcgaatccccacagagagagcgtcggggatcctcaa

SEQ ID NO: 496270 - DNA, 340 bp, Homo sapiens
cgccacagcttctcatgagacaaaggaggaagcaggcaccgtgaagagggtgatgtgccaagcagtgtcagacagcagtagtcgcacattgggagtgccacatgctctccatcccttgagaggacgagaaacctgaaagacttgggtttattcctgatgtgtgtcttcttgatttgtacactagtattgtttctatttggataggactgagcccaagattaatctttcagattcttaagtattttccacccatggcgttagctagcttttgtatcctataacagagttctttataaatcatgtagactaagcttaattcatagctcatagagactttcct

SEQ ID NO: 496271 - DNA, 141 bp, Homo sapiens
tggtcgatgcactatattacccacaaaaaaagacaagcagacgggaacttgttaacgatgtgtgctggtgatctcctttaaaggacgagcgagtgtttctgtccacattttcagaataggctccgtatgacataaccgcgg

SEQ ID NO: 496272 - DNA, 180 bp, Homo sapiens
tttttcagattggaattagttttctgtttaaggatttaatggtactgatttatgaaacgataagtaaaagaaaaaatattttgtggtgggagaagtaagttaaaaaatgatatgcttaaacaagcttttgttacattgaatttgcttttattaaaataaaaaattaaacaaaaaaaaaaa

SEQ ID NO: 496273 - DNA, 106 bp, Homo sapiens
tctctctctgtcactctctcacctgcctgccaccatgtaagacatgcctgcttccccttctgccatgattgtaagtttcctgaggcctctccagccacactggatc

SEQ ID NO: 496274 - DNA, 739 bp, Homo sapiens
  misc_feature (44)..(44): n is a, c, g, or t
  misc_feature (155)..(155): n is a, c, g, or t
  misc_feature (181)..(181): n is a, c, g, or t
  misc_feature (205)..(205): n is a, c, g, or t
  misc_feature (267)..(267): n is a, c, g, or t
  misc_feature (285)..(285): n is a, c, g, or t
  misc_feature (294)..(294): n is a, c, g, or t
  misc_feature (300)..(300): n is a, c, g, or t
  misc_feature (308)..(308): n is a, c, g, or t
  misc_feature (311)..(311): n is a, c, g, or t
  misc_feature (329)..(329): n is a, c, g, or t
  misc_feature (333)..(337): n is a, c, g, or t
  misc_feature (343)..(343): n is a, c, g, or t
  misc_feature (348)..(348): n is a, c, g, or t
  misc_feature (356)..(356): n is a, c, g, or t
  misc_feature (358)..(358): n is a, c, g, or t
  misc_feature (360)..(360): n is a, c, g, or t
  misc_feature (364)..(364): n is a, c, g, or t
  misc_feature (367)..(367): n is a, c, g, or t
  misc_feature (369)..(369): n is a, c, g, or t
  misc_feature (373)..(373): n is a, c, g, or t
  misc_feature (375)..(375): n is a, c, g, or t
  misc_feature (380)..(381): n is a, c, g, or t
  misc_feature (383)..(383): n is a, c, g, or t
  misc_feature (387)..(388): n is a, c, g, or t
  misc_feature (390)..(391): n is a, c, g, or t
  misc_feature (394)..(394): n is a, c, g, or t
  misc_feature (397)..(397): n is a, c, g, or t
  misc_feature (409)..(409): n is a, c, g, or t
  misc_feature (412)..(412): n is a, c, g, or t
  misc_feature (429)..(429): n is a, c, g, or t
  misc_feature (460)..(460): n is a, c, g, or t
  misc_feature (465)..(466): n is a, c, g, or t
  misc_feature (474)..(474): n is a, c, g, or t
  misc_feature (477)..(477): n is a, c, g, or t
  misc_feature (485)..(486): n is a, c, g, or t
  misc_feature (489)..(489): n is a, c, g, or t
  misc_feature (506)..(506): n is a, c, g, or t
  misc_feature (516)..(517): n is a, c, g, or t
  misc_feature (519)..(519): n is a, c, g, or t
  misc_feature (524)..(524): n is a, c, g, or t
  misc_feature (543)..(543): n is a, c, g, or t
  misc_feature (550)..(553): n is a, c, g, or t
  misc_feature (563)..(563): n is a, c, g, or t
  misc_feature (572)..(573): n is a, c, g, or t
  misc_feature (583)..(583): n is a, c, g, or t
  misc_feature (589)..(589): n is a, c, g, or t
  misc_feature (612)..(612): n is a, c, g, or t
  misc_feature (614)..(614): n is a, c, g, or t
  misc_feature (628)..(628): n is a, c, g, or t
  misc_feature (632)..(632): n is a, c, g, or t
  misc_feature (638)..(638): n is a, c, g, or t
  misc_feature (646)..(646): n is a, c, g, or t
  misc_feature (673)..(673): n is a, c, g, or t
  misc_feature (686)..(686): n is a, c, g, or t
ttttacaaaattaaaaacataaaccacgggggtacaagcatctnaaataccagcttataatacttgacattttctaatcatttcaaattgagtctcccataagcattttataaatgcaagaccattcattcacttgagtcagtcaccagtctttnctttccaccaatccaaagtgggtttntggtttttgaaattgtccatactnttgttattcaaaaaaatacaatatgcttttgaaatgactagctttaaagaaaaaagttctgngcttcctaccccagtggngggttattnctcctnaacaactnatntacccaaattatctttcngccnnnnntaaggngaccncgcgaccntntntaanacncnggcngnggacnnanaggnngnntgngcnctcaccgggcangtntgcgggtgggaaaaggngggaaagaagggggtggggaggggggggagnccagnngcccatcngtncttcccanntcngaaaatacttcagacangtcccaaaanncngttcngacgagtggccttctgggnctttttnnnngttttttttnttcaaaaanngaaaatgagntaagangaagaagaggggaaagaaaaaangnagggaaaaaggggnaaangtaggnaagaggangaagggggaaaaagaaggagggggganaaggaggaggggnggaagagaaggaaagggggggagggaagggaagagagggagaaagggagaaag

SEQ ID NO: 496275 - DNA, 154 bp, Homo sapiens
  misc_feature (60)..(60): n is a, c, g, or t
ataattatcaagttaatatggatcatcattggaagcgggtcgacttgccaacgaagccgntgtgcttgttggtggctgaattaaagcaggctccgagcgcagttgcattgcatcgctaagtgacagaatatataaaagccatgaaacttttcag

SEQ ID NO: 496276 - DNA, 442 bp, Homo sapiens
acccggcgctccattaaatagccgtagacggaacttcgcctttctctcggccttagcgccatttttttggaaacctctgcgccatgagagccaagtggaggaagaagcgaatgcgcaggctgaagcgcaaaagaagaaagatgaggcagaggtccaagtaaaccgctagcttgttgcaccgtggaggccacaggagcagaaacatggaatgccagacgctggggatgctggtacaagttgtgggactgcatgctactgtctagagcttgtctcaatggatctagaacttcatcgccctctgatcgccgatcacctctgagacccaccttgctcataaacaaaatgcccatgttggtcctctgccctggacctgtgacattctggactatttctgtgtttattcatggcactacgtacaacactggcacaacgtacacacggg

SEQ ID NO: 496277 - DNA, 466 bp, Homo sapiens
acccggcgctccattaaatagccgtagacggaacttcgcctttctctcggccttagcgccatttttttggaaacctctgcgccatgagagccaagtggaggaagaagcgaatgcgcaggctgaagcgcaaaagaagaaagatgaggcagaggtccaagtaaaccgctagcttgttgcaccgtggaggccacaggagcagaaacatggaatgccagacgctggggatgctggtacaagttgtgggactgcatgctactgtctagagcttgtctcaatggatctagaacttcatcgccctctgatcgccgatcacctctgagacccaccttgctcataaacaaaatgcccatgttggtcctctgccctggacctgtgacattctggactatttctgtgtttatttgtggccgagtgtaacaaccatataataaatcacctcttccgctgttttagctgaagaattaaa

SEQ ID NO: 496278 - DNA, 1049 bp, Homo sapiens
acccggcgctccattaaatagccgtagacggaacttcgcctttctctcggccttagcgccatttttttggaaacctctgcgccatgagagccaagtggaggaagaagcgaatgcgcaggctgaagcgcaaaagaagaaagatgaggcagaggtccaagtaaaccgctagcttgttgcaccgtggaggccacaggagcagaaacatggaatgccagacgctggggatgctggtacaagttgtgggactgcatgctactgtctagagcttgtctcaatggatctagaacttcatcgccctctgatcgccgatcacctctgagacccaccttgctcataaacaaaatgcccatgttggtcctctgccctggacctgtgacattctggactatttctgtgtttatttgtggccgagtgtaacaaccatataataaatcacctcttccgctgttttagctgaagaattaaaaaaaaaaaaaaaaaaaaaaaaaaaaaaaaaaaaaaaaaaaaaaaaaaaaaaaaaaaaaaaaaaaaaaaaaaggaagggaggggaacacaaaaaaaaaaacaccggaggggaaaccaaggcccagacggacacacagtaaaatcaacaaacgaggggcacaaaagagaggaaggaaataaatgagcgacgccagggcgacgccgacgcggctctactagacgaagcggccggaggacggaggcagaaaagacgtgaagctggatgggaaatcgagagagcgcagcgccacctatccactgatgagagaggggaggaccaacaaaataggcgcgcggcgaagcgcttcacacactagcagcgagagtgctggaacgccaaaacggtggagggtaaacgggcgagaacagcctctttcttgttgtctgtctcgtgttaagcaaggggaggaacaaacacacagacggacgtgggtgaaagatacgaggagcgagtgcgtgagtcggtatgggataggggacgattaagccgaaagattgaacgagacaaggacatcgcagcgagtgagcgcgagacagacaaacct

SEQ ID NO: 496279 - DNA, 508 bp, Homo sapiens
acccggcgctccattaaatagccgtagacggaacttcgcctttctctcggccttagcgccatttttttggaaacctctgcgccatgagagccaagtggaggaagaagcgaatgcgcaggctgaagcgcaaaagaagaaagatgaggcagaggtccaagtaaaccgctagcttgttgcaccgtggaggccacaggagcagaaacatggaatgccagacgctggggatgctggtacaagttgtgggactgcatgctactgtctagagcttgtctcaatggatctagaacttcatcgccctctgatcgccgatcacctctgagacccaccttgctcataaacaaaatgcccatgttggtcctctgccctggacctgtgacattctggactatttctgtgtttatttgtggccgagtgtaacaaccatataataaatcacctcttccgctgttttagctgaagaattaaagtcgagcggccgcgaatttagtagtagtagtcgtcgcggccg

SEQ ID NO: 496280 - DNA, 190 bp, Homo sapiens
tggatccatgaccatccttttccttatccagtccaccactgatgtgtacctaggttgattccatgcacttgtctgctcattgcagcattattcacaaagacatggaatcaacctaggtacacatcagtggtggactggataagaaaatgtggtatatatacacatatggaatactatgctgcataaaaaa

SEQ ID NO: 496281 - DNA, 489 bp, Homo sapiens
acccggcgctccattaaatagccgtagacggaacttcgcctttctctcggccttagcgccatttttttggaaacctctgcgccatgagagccaagtggaggaagaagcgaatgcgcaggctgaagcgcaaaagaagaaagatgaggcagaggtccaagtaaaccgctagcttgttgcaccgtggaggccacaggagcagaaacatggaatgccagacgctggggatgctggtacaagttgtgggactgcatgctactgtctagagcttgtctcaatggatctagaacttcatcgccctctgatcgccgatcacctctgagacccaccttgctcataaacaaaatgcccatgttggtcctctgccctggacctgtgacattctggactatttctgtgtttatttccggcgcagggtgccggccccatgataattcccttttcccgctgttttaccttaagcatttaaacttctggtctttataaattaaa

SEQ ID NO: 496282 - DNA, 150 bp, Homo sapiens
gaggtttcaccgcttattcgctaagcacgattcccattgttgctggctttagcatgcatactaagctgcggacagtgggaactctccttcactgccattcatgcgctcaacttacttctatatcacgcactctggctacctttacgagat

SEQ ID NO: 496283 - DNA, 412 bp, Homo sapiens
agccgggatcattcccatgagcgcatgtccttcaaatacctcccagaagtttctttgcatcgtctgtgtcctcaggggtaagtcaagcagctgggttatcacacaatgcaagcgcttggtgcccttaaggttagaggtccagatctcaaaaccagtagattatgcagttcattgatatcgcgatagaacccgatgagtgtggcttggaaagttgtgaatgaatgaacaccattggtatatcggtgctcagttatagcatgtcctggtcctttattcggtaaagcctcaggcggcggcacaggtcgtccatgtccgggaacaagagcgcctgcatgttcgacagatcagagatcaacagagcgcgtgtgtccttcaacaaagaagtcagatgtgcccagagtcacggtgtgct

SEQ ID NO: 496284 - DNA, 1142 bp, Homo sapiens
  misc_feature (679)..(679): n is a, c, g, or t
  misc_feature (691)..(691): n is a, c, g, or t
  misc_feature (702)..(702): n is a, c, g, or t
  misc_feature (712)..(712): n is a, c, g, or t
  misc_feature (717)..(719): n is a, c, g, or t
  misc_feature (721)..(721): n is a, c, g, or t
  misc_feature (730)..(730): n is a, c, g, or t
  misc_feature (735)..(735): n is a, c, g, or t
  misc_feature (749)..(750): n is a, c, g, or t
  misc_feature (756)..(757): n is a, c, g, or t
  misc_feature (768)..(770): n is a, c, g, or t
  misc_feature (791)..(792): n is a, c, g, or t
  misc_feature (794)..(794): n is a, c, g, or t
  misc_feature (798)..(798): n is a, c, g, or t
  misc_feature (809)..(809): n is a, c, g, or t
  misc_feature (816)..(816): n is a, c, g, or t
  misc_feature (820)..(822): n is a, c, g, or t
  misc_feature (824)..(826): n is a, c, g, or t
  misc_feature (831)..(831): n is a, c, g, or t
  misc_feature (842)..(843): n is a, c, g, or t
  misc_feature (848)..(848): n is a, c, g, or t
  misc_feature (852)..(852): n is a, c, g, or t
  misc_feature (856)..(856): n is a, c, g, or t
  misc_feature (860)..(860): n is a, c, g, or t
  misc_feature (879)..(879): n is a, c, g, or t
  misc_feature (887)..(887): n is a, c, g, or t
  misc_feature (895)..(895): n is a, c, g, or t
  misc_feature (897)..(898): n is a, c, g, or t
  misc_feature (900)..(901): n is a, c, g, or t
  misc_feature (910)..(910): n is a, c, g, or t
  misc_feature (912)..(912): n is a, c, g, or t
  misc_feature (917)..(918): n is a, c, g, or t
  misc_feature (920)..(920): n is a, c, g, or t
  misc_feature (922)..(922): n is a, c, g, or t
  misc_feature (924)..(924): n is a, c, g, or t
  misc_feature (932)..(932): n is a, c, g, or t
  misc_feature (934)..(934): n is a, c, g, or t
  misc_feature (937)..(937): n is a, c, g, or t
  misc_feature (949)..(949): n is a, c, g, or t
  misc_feature (954)..(954): n is a, c, g, or t
  misc_feature (973)..(973): n is a, c, g, or t
  misc_feature (975)..(976): n is a, c, g, or t
  misc_feature (980)..(981): n is a, c, g, or t
acccggcgctccattaaatagccgtagacggaacttcgcctttctctcggccttagcgccatttttttggaaacctctgcgccatgagagccaagtggaggaagaagcgaatgcgcaggctgaagcgcaaaagaagaaagatgaggcagaggtccaagtaaaccgctagcttgttgcaccgtggaggccacaggagcagaaacatggaatgccagacgctggggatgctggtacaagttgtgggactgcatgctactgtctagagcttgtctcaatggatctagaacttcatcgccctctgatcgccgatcacctctgagacccaccttgctcataaacaaaatgcccatgttggtcctctgccctggacctgtgacattctggactatttctgtgtttatttgtggccgagtgtaacaaccatataataaatcacctcttccgctgttttagctgaagaattaaaaaaaaaaaaaaaaaaaaaaaaaaaaaaaaaaaaaaaaaaaaaaaaaaaaaaaaaaaaaaaaaaaaaaaaaaaaaaaaaaaaaaaaaaaaaaaaaaaaaaaaaaaaaaaaaaaaaaaaaaaaaaaaaaaaaaaaacttttggccccccttgccccaacccatttaaaactcaaaaaattttttccaggggccccaaattggggcccattgggcnaattcccctaanggggggggttnaaaaataaangggcnnngntttaaaaanggggnaatgggaaaaaccnnggggtnnccaaattaaannncttggaaaaaatccccttttnncnagtngggaaaaaacnaaaaagncccnnncnnntcccntttccaaaaanntgccnaccntaangggnaaaggaaaattgtacggtnaaattttngtaaaaancnngnnaaaattttngnaaaannancntntttttaancnaangggcaaaagggnaaaanccttttaaaaaaaaaaaananncccnnaaagggtagaggttttcccaatgtgaaaaaagaggccccttttaaaaaagggggccccaacctcaagggcgaaaaaaccctttttataggggaggccccctattggaaaccattcccctaaacaaagtttgtggggtccaagggcccacctttggcccccg

SEQ ID NO: 496285 - DNA, 809 bp, Homo sapiens
  misc_feature (3)..(3): n is a, c, g, or t
  misc_feature (64)..(64): n is a, c, g, or t
  misc_feature (70)..(70): n is a, c, g, or t
  misc_feature (77)..(77): n is a, c, g, or t
  misc_feature (142)..(142): n is a, c, g, or t
  misc_feature (154)..(154): n is a, c, g, or t
aanaatgtgatgttggagggggatggggatgagggtgtgttgatttgtggaggaaaggagaaanctagtntccgaangaacctggtccctggtggaatcagtttatggagagaagagagtctcgatttcggaaggagatganaaaattgagtancggaggcctggaaccccttccgctccaagctagccagcatgcaatcctgggtggtgtggaccagatccacatcaaaaccgggggctaaggttctcttacctcggggctgcctcgggcacccacggtctcccatgtctctgacatcgttggtccggatggtctagtctatgcagtcgagttctcccacccgctctggccgtgacctcattaacttggccaagaagaggaccaacatcattcctgtgatcgaggatgctcgacaccccacacaaattccgcatgctcatcgcaatggtggatgtgatctttgctgatgtggcccagccagaccagacccggattgtggccctgaatgcccacaccttcctgcgtaatggaggacactttgtgatttccattaaggccaactgcattgactccacagcctcagccgaggccgtgtttgcctccgaagtgaaaaagatgcaacaggagaacatgaagccgcaggagcagttgacccttgagccatatgaaagagaccatgccgtggtcgtgggagtgtacaggcccccccccaaggtgaagaactgaagttcagcgctgtcaggattgcgagagatgtgtgttgatactgttgcacgtgtgtttttctattaaaagactcatccgtcca

SEQ ID NO: 496286 - DNA, 1108 bp, Homo sapiens
acccggcgctccattaaatagccgtagacggaacttcgcctttctctcggccttagcgccatttttttggaaacctctgcgccatgagagccaagtggaggaagaagcgaatgcgcaggctgaagcgcaaaagaagaaagatgaggcagaggtccaagtaaaccgctagcttgttgcaccgtggaggccacaggagcagaaacatggaatgccagacgctggggatgctggtacaagttgtgggactgcatgctactgtctagagcttgtctcaatggatctagaacttcatcgccctctgatcgccgatcacctctgagacccaccttgctcataaacaaaatgcccatgttggtcctctgccctggacctgtgacattctggactatttctgtgtttatttgtggccgagtgtaacaaccatataataaatcacctcttccgctgttttagctgaagaattaaaaaaaaaaaaaaaaaaaaaaaaaaaaaaaaaaaaaaaaaagaaaaaaaaaaaagaaaaaaaaaaaaaaaaaaaaaaaaaaaaaaaaaaaaaaggcccctttttgccccgggggggtgtgcccccctttcggggggcccccccgggggggccccccggggcccccttttcccggcccttccccggggggcgcctttttcgcccccggtttcccgggccccctgaggggccccccctttgccttttttttgggggcccctttttgggggggggttttccccccgggggtgggggggggttcccccttttttttctcttcccgggggggttttggcccccccggggcccctccccccgctggtcccgggccccgtgcaccccaggggccgccccgggcttgccccctcttggggggcccgagctcggccccggccttgggggggcccccttttcgccccggtgggggacttgggcccccgttttccccccttgccccttgacacccccctgggtttttccttggggcccccgctggagggttcccccccccccacccttggggggcctcttggaggggccccccgttttggtgcgccggggctctctgtttttcggcccggggtgaccgcggccgctccgcctgct

SEQ ID NO: 496287 - DNA, 167 bp, Homo sapiens
ttaatgtgctgacagacgatgccactacaggacctgtctggacctggtgtctgagatggagataatagaagatgatcgggaaacaaaaacatcatcaacctgctgtgcgcctgcacgcagggcggccccttatacgtgctggtggagtacgcggccaaggttaacct

SEQ ID NO: 496288 - DNA, 687 bp, Homo sapiens
acccggcgctccattaaatagccgtagacggaacttcgcctttctctcggccttagcgccatttttttggaaacctctgcgccatgagagccaagtggaggaagaagcgaatgcgcaggctgaagcgcaaaagaagaaagatgaggcagaggtccaagtaaaccgctagcttgttgcaccgtggaggccacaggagcagaaacatggaatgccagacgctggggatgctggtacaagttgtgggactgcatgctactgtctagagcttgtctcaatggatctagaacttcatcgccctctgatcgccgatcacctctgagacccaccttgctcataaacaaaatgcccatgttggtcctctgccctggacctgtgacattctggactatttctgtgtttatttgtggccgagtgtaacaaccatataataaatcacctcttccgctgttttagctgaagaattaaaaaaaaaaaaaaaaaaaaaaaaaaaaaaaaaaaaaaaaaagaaaaaaaaaaaaaaaaaaaaaaaaaaaaaacatatacaaacaaacataatatcaaacttaatttgccaatcccttcctcccaacctcgggcggtcccaacttaatccgccttaaactcaaccccctttcgattgcagtcctcatgccgttaggccccaatcggtcgtcctcccaactccca

SEQ ID NO: 496289 - DNA, 565 bp, Homo sapiens
gttgtaccgatcacggtatcagccccagcagcagaccggctcgcccgagcggaccgcaggccagcgcgccagcccttggcagccccggagcagtcgggctccgggaggaaactccttgggagcgccctgtaccggggtgccctctgacgctctgcagatgtctttctttctgcctgggaggaggaggaggaggcggaagaggaggaggaggaggaggaggaggaggaggaagaggaggagagagagagagaggacgtctgcaaacaccagatagggaggaacggagccagcggacagcagacagacacgaacgacgacacagacacgaccaggacaaagaatgaccgcagcgaagacggacgagacgacgaggaagacggaagagagagaagaacagaagtagagagggaaaccaccagaaagaagaatcagacaaagcacaagaaaacagacaaagccgacaccacaaaaaagcacaacaaatacgaacaaaaggagatgaaaagccgagaccagcaagataacccagacagatacgccacactaaaataaccccaacagcaac

SEQ ID NO: 496290 - DNA, 832 bp, Homo sapiens
acccggcgctccattaaatagccgtagacggaacttcgcctttctctcggccttagcgccatttttttggaaacctctgcgccatgagagccaagtggaggaagaagcgaatgcgcaggctgaagcgcaaaagaagaaagatgaggcagaggtccaagtaaaccgctagcttgttgcaccgtggaggccacaggagcagaaacatggaatgccagacgctggggatgctggtacaagttgtgggactgcatgctactgtctagagcttgtctcaatggatctagaacttcatcgccctctgatcgccgatcacctctgagacccaccttgctcataaacaaaatgcccatgttggtcctctgccctggacctgtgacattctggactatttctgtgtttatttgtggccgagtgtaacaaccatataataaatcacctcttccgctgttttagctgaagaattaaaaaaaaaaaacaaaaaaaaaaaaaaaaaaaaaaaaaaaaaaaaaaaaaaaaaaaaaaaaaaaaaaaaaaaaaaaaaaaaaaaaaaaaaaaaaaaaaaaaaaaaaaaaaaaaaaaaaaaaaaaaaaaaaaaaaaaaaaaaaaaaaaaaaaaaaaaattattgcaccctaatacccaaactccttataaaaaatacaaaatttttttaaatcccccatatcaacacaatatttgcccaaattcgcctataaaaggattcataaaaaaaaactgggctcaattaaaaaacgtagggtgaggaaaaaacacggggttccccaaaaagggcctgtaaaaaagacctttttcccagtggaatatgtccccccc

SEQ ID NO: 496291 - DNA, 494 bp, Homo sapiens
  misc_feature (467)..(473): n is a, c, g, or t
acccggcgctccattaaatagccgtagacggaacttcgcctttctctcggccttagcgccatttttttggaaacctctgcgccatgagagccaagtggaggaagaagcgaatgcgcaggctgaagcgcaaaagaagaaagatgaggcagaggtccaagtaaaccgctagcttgttgcaccgtggaggccacaggagcagaaacatggaatgccagacgctggggatgctggtacaagttgtgggactgcatgctactgtctagagcttgtctcaatggatctagaacttcatcgccctctgatcgccgatcacctctgagacccaccttgctcataaacaaaatgcccatgttggtcctctgccctggacctgtgacattctggactatttctgtgtttatttgtggccgagtgtaacaaccatataataaatcacctcttccgctgttttagctgaagaattaaannnnnnngtcgacgcggccgcgaattta

SEQ ID NO: 496292 - DNA, 526 bp, Homo sapiens
catttgtttttgctgttctaaaattccttagttgctggctttgaccttttatgttgctgagttttacacatctattttctcaactgccatatcctagggggcttggagtacccataatacagtgagcccaccttccggtccccagacatttcagaaggtcgggaaatttttaaacccaggcagcttcctgcagtgccatttggagcatcaaagtggtaaataaaattgcatttacattcatatatcatttctgtctgatttgttttgccctactggatgttaagaattaaatctttcttttctagattgagcttccaagaaacactttttaaatctaaaaattttaatgtaaagaaataatatgcttgcatttaaaaatcaagtatacatttttaatacctctttttatggttaattccttttgttgtgattactactgtttttatgagggagaagtccttgacatgtagaccaaaaggtaattaaggaccttttcattcatgatatcataaaaccttgttgctta

SEQ ID NO: 496293 - DNA, 882 bp, Homo sapiens
  misc_feature (388)..(388): n is a, c, g, or t
  misc_feature (568)..(568): n is a, c, g, or t
  misc_feature (753)..(753): n is a, c, g, or t
tggaccccaaaattaccctttatgggttttccaaaaaaaatggggtgaaaaaaattgggatttaaataccctttttttccattttgcaacagataaatgttccccaaaaaacccctttcaagattgacactctccaaagccttctgtggggcacgagagtgggcccccaccgagcaaaattacaaaaattccaccgctctatgactctccggggttgcggatggagagaacacgcgttaggccctcccgagcagataataatgagaaggcacgcaagattattgacattaacactccctttggaggggcttaaacatttcttcacaggaggaagattcgccacattctataggggagaacagactctcctcggagaacacactcctcngggagaacccccctccctgtgcggtctccccataggagatggatagagggtgcatctcccgggagacagtttgctgttgagaactatgaccagagctctcccgggggggttcccccaaggcacggaaaagcgcagaaagcacccacaggccatctctctgtgggagatgtgtgcgccgcnagcgagggggccgccacgtgtgttggcgcacgaaagatagcgcggcaagggcgcgcgaggacccaaacgccccgcgtggtgccacacgaagaagcctagttctcccacaaagagcgcgcggagaggtacaccacaggggggtatagccgcctgatagagggaggttccccccggggtccataganagggccccggggtaggggtcccccgctgaggaagcaaggagcctcttattggccccccgcgcaagggtgattgcccctgggggaacacctacacgaaccggggggccctcccaagttattaccccggca

SEQ ID NO: 496294 - DNA, 153 bp, Homo sapiens
tcaggattagctgcagacttcgcgtgagtgtacaggtcttagcggctcgtctggagtcttcgtactctggtgcgttgtgtctcactggttacaggagtgaactgcagaacttcacagtgagtgtacagctcataagctcggtgtggacccgtg

SEQ ID NO: 496295 - DNA, 152 bp, Homo sapiens
  misc_feature (34)..(34): n is a, c, g, or t
  misc_feature (40)..(40): n is a, c, g, or t
  misc_feature (45)..(45): n is a, c, g, or t
  misc_feature (47)..(47): n is a, c, g, or t
  misc_feature (51)..(51): n is a, c, g, or t
  misc_feature (87)..(87): n is a, c, g, or t
  misc_feature (94)..(94): n is a, c, g, or t
  misc_feature (109)..(109): n is a, c, g, or t
gatctcgctctgtacgacaatgaaggtctgtatntttgcncagtnanggtnagctaagctaaattgaatttgatggtcatagccttnacggcantgccatattcagatngtttagaagtgtcgagttcgttaacaaaaatgttccacctaga

SEQ ID NO: 496296 - DNA, 1525 bp, Homo sapiens
gttacaaacactcctgacatagttctgcctttcacactcaaggagaagacgctgggtactatgcgtgataattaggataaggactagaaaagatattacgtgcaagaaatgtgcttagcatagagcgtagtgtaagtggtgacttcaatggggagtatcatatattcttataatacgagcgtgataggaaacactgagtgtgagaactagtggctattgatggtcttggtgatcagaactgttattttactgatgggctattagtgagctcttagaactgttgaacatattaaaggcgttttagtaggaaacctaagtactaggtaagtaatgcaagaatgcagagatgccatattaggaaatactcccaagaatgcatgctcaattggcttctggatattgttgtatcgaaggaatgattaagtctctatgaaacgcgtaattaggacgaaattctgctccagtccctgtaataccggactgatttcaaataacatacgagctagttaatgacgtaggggttaactgtgccattctttagcagtacaacaggacttcaccgaaataagcacttaagggaagtgtgcctatgcatatttccaaataacctttaatttcacttcaccaatagtgaatgatcccgcacagttaatcgcaatgtgcattatgggcacagttaaaaattcgaatgaataggagaaagatcttgggtactatggcacattaatgttagtctaggggaaaacttaaaggaacatagggttcagctaatgtggcgttgtttgaaaaggaagtttcgggtaagagaggaagacggtatatagagagtcccattgcggttggatcagtccataggtatgtcgaagttgagaagcggttaaaagggatggcataactggattaggttgtgtaagatattggtataatacacccagtgtgagagtaggccattgggataaggggtgacggacgttcacacgttccaactactcatattggaccccggtgagtgtaaacaacagagacgtgtctataggccaagtttatgttggaccccggcttggacaaacgtccctacgttcggataatacacacagatgcgggatcacgtccaaaattggtgcaagacaaagacaacagtgagcgcactttaagaacaaagttatatcaggcaaagtttccaaaggtccgagaacgcaaatttacccacagataacaggtgtaacgacagagaggccccccaggtggttgtggacataacagagcctgtttccaaaactttttatcacccggggatggggccacagatttgtcccccctagctgaaggggcgcatatcacgtgtgtaactgttttcgcggaccttccaattctgattcatggcaaaatggctacacacggcatcaggtgcggcatatactacggggccgggaaccaatcgtcgctgtgccgcgttaatgaaaggggtgatggccagaatatgggatgacacattgtgctagtatatgctctccatccaataaaa

SEQ ID NO: 496297 - DNA, 949 bp, Homo sapiens
tttttttgacgaagacgaaaaaacataaataaaggggaagacaaaagaaaaagtagcacttagcattcttctcgctgcctgagtacgccgttcccttctcggtattctctacgcactttctctgaccccccccttttgttattccccgcccaatcaccatggttatcgcctgccgccaatagctcttactaacagcgtggtgcccgtgtaacaaacctgtcttcagtaggacaaatcggttctgtgaagcctcaaatcttccgttctgtcgtcattcatagcgcctcaccattcgtcgtccgtagacttgtgccccacgggcctggccatactgttgaaattccggcccgttttcaaaggtctctcatgcaaccaaagttgtcaccgtgtccacattggggcctcccccaagtgcgggccctaagcgtaatacaaaaatcccgggggcacacaaaacacgtgggcgccacgacacatgttttcaccacccgcgggggtgacacaacgatttcttgcacacacttgggcgagacaacgggattcttcgtccccctgtctgggaacctccctgacccgagggtgagaattttttctaagggagcccctgttctctaacccaccgaggtggcctgctcattgccatgatgtttgtgccacgcaacttgcttgtttgggagactatctcccgtcggcgttaatatattatgaggaaaacaaagcggggcgccatccccaccgttgtacccctagactgggtaccctcccgcgtctttttctggtgggctcccagagtcgtggagacctgcatccacctgtttgtctggcgccgccaatccctcgccggaggtaattttgcgtgtctccccggctgccccgccggtctggggaagactgctatattggccccggacgttcaaaaaatttcccggggggcagccaaaacaaaaca

SEQ ID NO: 496298 - DNA, 99 bp, Homo sapiens
tgcagcgtcttcaaagacccgtgatcaccacgtgtgggcacacgttctgtaggagatgcgccttgaagtcagagaagtgtcccgtggacaacgtcaaac

SEQ ID NO: 496299 - DNA, 492 bp, Homo sapiens
taggaagtgaacactgagatccctgcgaattggacgatgcccggcgatcggatggcactactcgaaactctgcttcgatgggttcgctcttcggaggtgccagcggtggaggaacctctcagtcgagcgtaaagccagttggacgccttggctgatcctcttaagacgccattgcagcgcggaatcgcagcactgcgaaataccctaggtcaggatgcagccgatgcattgcttcagcccgcacccatgcgggctgacgaagcggcgtgctttcacttccccttgcccatcgattacacggggcaggagcggcgactgcgtatgggtttcccctccaagtttccccgtgggctcttgcggctgaacgtcgaaccttctccatggctggttcggccgcatgccactacgtcggggcttagccttcatggctttcagggaacgccccatatatgggctctccggaggccgtggaacaggacagccttgctcggt

SEQ ID NO: 496300 - DNA, 101 bp, Homo sapiens
atgcccaactaatattgggaatatcatataagtggattccagaggggtgacagcaaaacgtggtgaccatccatgttgcaggaaaacaagcttacacacgc

SEQ ID NO: 496301 - DNA, 303 bp, Homo sapiens
atcttagggagctacagatagcgttatacttatctggtagggctgccataatagaatactgggtggattaaacaacagaaattaattttctcccagttctgcagcctggaagcccaagagatcaaggtattaacaggtttagttactcctggtacctctctccttggcttgtagatggccgtcttctcattgtgtcctcacacggcctttcctttgtgttcacgcatctctggtttctctttctctccttcttcttccttcttccttctttctcctttctccctaagaccctactccctaaga

SEQ ID NO: 496302 - DNA, 369 bp, Homo sapiens
  misc_feature (2)..(2): n is a, c, g, or t
  misc_feature (5)..(5): n is a, c, g, or t
gncgnagtgcaatggctggagcaatccttctgctcagcttcctgagtggctgggactacaggcatgaaccactacattcggctagttttaattttttttgtagagacagggtcttgttctattgtccaagctggtcttgaattcctgacctcaagcaatcctcctgcctctgcctcccaaagcactgggattattacaggtatgagccattgcactccggccaatctttgtatttttagtagagatggggtttcgccatgttggccaggctggtctcaaactcctaacttcaagtgatccacccccctcggtcttccaaagtgatgggattacggacgtgagccaccgtgcccagccattgcactccgg

SEQ ID NO: 496303 - DNA, 300 bp, Homo sapiens
tggactgtcccatggcttgtgagcaccggagcgcttggttgcctaccaaggacgtgcaattgcctaaaaacagaaagaacaacgccatggacccaatgattcaagaaaggaatttccaaaggataatatttttttaataaatgcggctgcaacctcctgtgcatttaaataaatcggccaaatttatgctgcttaggtcatcatcaagggtgttacttgagctgtgtgcccagagatcatgcatttagatgtatattcttgccagaaaacacaaggttataataaaactaagatcttcca

SEQ ID NO: 496304 - DNA, 734 bp, Homo sapiens
ccacagcgtcgcccacgcgtcagcagccactatctcaagcgtctctgccggtcccctggcgctgagggctgcaccgcctgcgtcaccaggtagccctggaaatggtcgtcatagaaatacaggtgcacgctggacggcaagcccctggcgctcaaagctaaggtgccagcagggcagaacagggagactgccatacagtcacaacctgtatttggcctggagtcccagggatggtggctctggggagatcccatccaccaggcacttccatttccccagatctcaccacccacagcaccatgcatgcctggcctctagccgtcctttatatcggtattctgcattctatttccctgctattcaagaactgagggccatatgaattagtggagcacggggaccgtacacttctcatgcgcttaggcccttccacaccataggggcgacacaacaagcccacaacggcgcccttgcgtgctaattgctccagcacacggtggagatctcaaccctgccacgaagtgtgcgagttgccccacttgcgcgggcgtgcaagacacgtggcgcatgggccacatcggatggcaaggggccttgcagggccgctggactgaaacgggcctcgctggttcaaggccacgactgcacgcaactgcagaattcaacttggacgcccacacatgcggtcgccctattcaacccaggcgtctgataccgttgtaacatcccaagta

SEQ ID NO: 496305 - DNA, 389 bp, Homo sapiens
cgtgtctatagacgggcgtagctaggactacaatggcgcactttaactctagcctcatggaccaagaagcatgaagactaagatcctaaatgacctataactctagtgtgtgctcattgaaaatagacagaacaaagattactgattgtaagtccactctaaggaaagtcgcctgaaaacaattggccacgaaaagccacaccaaaaccgctcattttaccagtttcatgaaataggctaatatctacaactacaatacccacgctctcatatagattcacagctatcataagtctacccaattgctcacatggaagctcacatatcaacacagttcttaagaacatcgtgctgtcccgacccgaggatcataacgcactctctgtgct

SEQ ID NO: 496306 - DNA, 262 bp, Homo sapiens
  misc_feature (43)..(44): n is a, c, g, or t
  misc_feature (51)..(51): n is a, c, g, or t
  misc_feature (103)..(103): n is a, c, g, or t
taatagttctatgtgaaattcggaaagttttatcagtatattnntcttttngtttgttggtttgttttagacagattctcactctgtcacccagactggagtncggtggcttaatctttgctcgctgcggcctctacctcccggattcaggctgaggcaggagaatcgcttgaaccagggaaatggagtttgcagtgagctgagatcatgccactggactccagcctgggcgacagagcaagactctgtctcaaaaaaaaca

SEQ ID NO: 496307 - DNA, 322 bp, Homo sapiens
tggggagctcgtcatccactgtaaaagtttcatgatggccgagggtcactggaatgctcgagccccagtgcatggcccagcttcgtgcacatgcgagcaggcagatgtcatttccattcagatcctcattcctgacagtccaaggctcgaaagagtcaaagtgggtagtctcctccaatgttggggcctgagaagtaggcatgggccaggaagccgacctcaccatcgaagtggcgtgctgtcgccatggaagccctcggaaaaagaagatcatgatgtcggcctgcttctcatggccctcaggaatttaggcttagggcac

SEQ ID NO: 496308 - DNA, 456 bp, Homo sapiens
  misc_feature (188)..(188): n is a, c, g, or t
acaataataataatttaaacaataatattaataataatttaaataataataataataatgaaaatgaaaataaatttaaagaagatggtgatgatgaaattttacaaaatttaaatagattaaattatatattattaagggattttgaatttggaccaaatgatattacaactaaacttcgataatcncatataaatctatttgatagattattacttatagaggataatttagaggcattggataagatattaaagaatttcactcaaaaaggttgtacattatcaagggatttggttggtgatcgtaatctattggttttagtggcaattctagattcaacttcaaaagagaaactatcattattgaacaagtattggccattacctgaaaaaacgaaaaagtttgctattccattaattttctttgcaatatctgaagaatgtttaaaaatgt

SEQ ID NO: 496309 - DNA, 111 bp, Homo sapiens
gcagacccccagtgaacttctacgcagaaggtctgcagcctcctctgcagatccctgaatactacttgctgtataacagagagagtaggtgtctgtttgagggcggaatag

SEQ ID NO: 496310 - DNA, 238 bp, Homo sapiens
ttaggcacagaaagaatcatttactatgcatgtttgcaacccttttcccctgccgtgacccccctccagcaagctttccaacaaagaaaccccaaccccagccccgggacactccttctagcctgtggtctcaagagggaggcccagcaacagggagttggtttctgtaggccctagactttggacaggacgctgaacggcttgtcccctccttgtatcttccatcctcccacctaaa

SEQ ID NO: 496311 - DNA, 445 bp, Homo sapiens
acccggcgctccattaaatagccgtagacggaacttcgcctttctctcggccttagcgccatttttttggaaacctctgcgccatgagagccaagtggaggaagaagcgaatgcgcaggctgaagcgcaaaagaagaaagatgaggcagaggtccaagtaaaccgctagcttgttgcaccgtggaggccacaggagcagaaacatggaatgccagacgctggggatgctggtacaagttgtgggactgcatgctactgtctagagcttgtctcaatggatctagaacttcatcgccctctgatcgccgatcacctctgagacccaccttgctcataaacaaaatgcccatgttggtcctctgccctggacctgtgacattctggactatttctgtgtttatttgtggccgagtgtaacacggggatccttagagtgaccagacgt

SEQ ID NO: 496312 - DNA, 466 bp, Homo sapiens; identical to SEQ ID NO: 496243
  misc_feature (448)..(450): n is a, c, g, or t
  misc_feature (452)..(452): n is a, c, g, or t
  misc_feature (455)..(455): n is a, c, g, or t
  misc_feature (458)..(459): n is a, c, g, or t
  misc_feature (461)..(461): n is a, c, g, or t

SEQ ID NO: 496313 - DNA, 546 bp, Homo sapiens
  misc_feature (526)..(526): n is a, c, g, or t
  misc_feature (529)..(529): n is a, c, g, or t
  misc_feature (531)..(531): n is a, c, g, or t
actagttctagatcgcgagcggcgccatttttttggaaacctctgcgccatgagagccaagtggaggaagaagcgaatgcgcaggctgaagcgcaaaagaagaaagatgaggcagaggtccaagtaaaccgctagcttgttgcaccgtggaggccacaggagcagaaacatggaatgccagacgctggggatgctggtacaagttgtgggactgcatgctactgtctagagcttgtctcaatggatctagaacttcatcgccctctgatcgccgatcacctctgagacccaccttgctcataaacaaaatgcccatgttggtcctctgccctggacctgtgacattctggactatttctgtgtttatttgtggccgagtgtaacaaccatataataaatcacctcttccgctgttttagctgaagaattaaaaaaaaaaaaaaaaaaaaaaaaaaaaaaaaaaaaaaaaaagaaaaaaaaaaaagaaaaaaaaaaaaaaaaaaaaaaaaaaaaaaaaaaaaaaacnaananaaaaaaaaaaaaaat

SEQ ID NO: 496314 - DNA, 378 bp, Homo sapiens
actagtaatattactagtgaattcactagtaatattactagtgaattcactagtaatgcagaggtccaagtaaaccgctagcttgttgcaccgtggaggccacaggagcagaaacatggaatgccagacgctggggatgctggtacaagttgtgggactgcatgctactgtctagagcttgtctcaatggatctagaacttcatcgccctctgatcgccgatcacctctgagacccaccttgctcataaacaaaatgcccatgttggtcctctgccctggacctgtgacattctggactatttctgtgtttatttgtggccgagtgtaacaaccatataataaatcacctcttccgctgttttagctgaagaattaaa

SEQ ID NO: 496315 - DNA, 730 bp, Homo sapiens
ctggcggtaccatcggcgacgcctggccgacgcgttgggctcacggatgcctttgcccaggtctcccgtcggggagaacgcgtgcccacttcccacggagatgatggcgaacctgggggttgcctgatggccagaccccctgggggaacacatgggagaggtttcgtttgtgggagcaatctcgcaagaacgtgtggccgatgagtgggaaccctatgagtcgtgggacttcttgccccggcccagccacacgacaggcacagagggcgaggggagagtattttgacaccccggttccgcacggcacgagggctccgaccatgaggctgggaaccccggccgaggggacactgctgtcctcctgagacccgcccccaccccgccttctctgtcccctccccgcaagctctgcacgcatggttgctgcatctgctgtcaccagcccttcctttttgctcttgaaatgccctcccagcccggctttggctgctccacggccccttggagaccgctcctgtccaggcccccggtgtaaacactgaggctggttcccgaggcccggcctctgtcctgatcctcttgggtcttctcagaggatatcggcactacgggccacggttcctggatcaagccgcgtatcccagcgctttgggaggcccaggtgggcagatcaattgagggcaagagttcaagattacctgggcaacatagcgagacctcgtctctacca

SEQ ID NO: 496316 - DNA, 499 bp, Homo sapiens
  misc_feature (406)..(406): n is a, c, g, or t
  misc_feature (411)..(411): n is a, c, g, or t
  misc_feature (437)..(437): n is a, c, g, or t
  misc_feature (463)..(464): n is a, c, g, or t
acccggcgctccattaaatagccgtagacggaacttcgcctttctctcggccttagcgccatttttttggaaacctctgcgccatgagagccaagtggaggaagaagcgaatgcgcaggctgaagcgcaaaagaagaaagatgaggcagaggtccaagtaaaccgctagcttgttgcaccgtggaggccacaggagcagaaacatggaatgccagacgctggggatgctggtacaagttgtgggactgcatgctactgtctagagcttgtctcaatggatctagaacttcatcgccctctgatcgccgatcacctctgagacccaccttgctcataaacaaaatgccatgttgggtccctctgccccctggggacctggtgaacattcctgggaacctaattttcnggttnttttttattctggttgggcccgaaantggttaatcaacccaattattaaatnnaaaatcaaccttcctttccccggcttggtttttta

SEQ ID NO: 496317 - DNA, 403 bp, Homo sapiens
tactagaggatccgagtagggctaccttttcatacaggtataaatgagttatagaatatacatacttctcccattcagagtgttgtttaggtaagagtacattggtgtttacacggtaccttttgggttcattgcatgtttattccttggctcttctgaactggttggttcctttcggctctttttagaacgtttaacttttggcctcctcttatgtttcctccttctgcttctctcatgttcaagttcactttctgaagatgattctgaagaagaggaggaatcggaagaggaatccgagccttctgaatgagttggtttcttccttttttttctcaaaaacatcttttattgattttgtggcaagtactccacagtcaataactcgcacatctgcatatgg

SEQ ID NO: 496318 - DNA, 308 bp, Homo sapiens
ctagacgatccccggtacgcttgacatagtcccaggagcagaaacatggaatgccagacgctggggatgctggtacaagttgtgggactgcatgctactgtctagagcttgtctcaatggatctagaacttcatcgccctctgatcgccgatcacctctgagacccaccttgctcataaacaaaatgcccatgttggtcctctgccctggacctgtgacattctggactatttctgtgtttatttgtggccgagtgtaacaaccatataataaatcacctcttccgctgttttagctgaagaattaaa

SEQ ID NO: 496319 - DNA, 814 bp, Homo sapiens
ggaggcggcggggggcgcacagagtggcgagtagtggaaacgtggcttctgaggggagcccaatgatgaccggttctatacgaggttcaagggctgatagccagtccactccgagttgatggcaatctgccttcgcgtgagacgttcagccccaggcatcctcccagttcctggttgtctcctcctgggactgcgtccgtgtgtctctacgatgtgccggtgacttccatgcggctctagtgccagctcaccgggcgccgtcctggagtgcgccttctacgtatccaaggcatgtctggagtggagtgactcgatcatcaattgaaaatgcttgatttgaacactgatcaggaaggatcttgttgtggacccatgatgtcctcctatcagatgtgtcgaatactggtccagaatgtgaatgtgagtggtcactggtaagtgggatcagacagtgtcaagctgtgggatcccaggaactccttgtaactggctgggagcttctctcagcgctgagaacggtatataccctctcagtgtctgcagaccggctgctgtgtggggaacagcggtccgccgagtgtttggtggtgggacttgcgggcaacatggttcccgtgcgggttccgctggtcgttccagctgatatagctggatcggtgattgcgagcgttgccaaagaagcgggttaatgtttaagctctattgaagggcgagtgggagtgagtctttgggccccgcctgagtgtatgacgagggaggttgcttccatgtcccgccagacacagatttttggcgtttcccgcagcgttcttta

SEQ ID NO: 496320 - DNA, 335 bp, Homo sapiens
  misc_feature (16)..(17): n is a, c, g, or t
aattcttcagctaaannagcggaagaggtgatttattatatggttgttacactcggccacaggagcagaaacatggaatgccagacgctggggatgctggtacaagttgtgggactgcatgctactgtctagagcttgtctcaatggatctagaacttcatcgccctctgatcgccgatcacctctgagacccaccttgctcataaacaaaatgcccatgttggtcctctgccctggacctgtgacattctggactatttctgtgtttatttgtggccgagtgtaacaaccatataataaatcacctcttccgctgttttagctgaagaattaaa

SEQ ID NO: 496321 - DNA, 293 bp, Homo sapiens
atggggtagaatgctgatgttttaatacatgtactcaatgtgtaatgatcaaatcagggtaatttgcataatgatttttctgtagggagagaattcaaaatctactcttctggctattttcaaatatataatatgttattgttaactatactcatcctactatgcaataggacaccagaacttattctgggttctacatccgttaaggcaaccaaggattggatatattggaaacaaatttgcgtctgtacctgaacatgtccagctttttcttgtcctattcctacacattt

SEQ ID NO: 496322 - DNA, 671 bp, Homo sapiens
  misc_feature (1)..(1): n is a, c, g, or t
  misc_feature (121)..(122): n is a, c, g, or t
  misc_feature (127)..(127): n is a, c, g, or t
  misc_feature (136)..(137): n is a, c, g, or t
  misc_feature (160)..(160): n is a, c, g, or t
  misc_feature (169)..(170): n is a, c, g, or t
  misc_feature (187)..(187): n is a, c, g, or t
  misc_feature (215)..(215): n is a, c, g, or t
  misc_feature (225)..(225): n is a, c, g, or t
  misc_feature (230)..(230): n is a, c, g, or t
  misc_feature (235)..(235): n is a, c, g, or t
  misc_feature (246)..(246): n is a, c, g, or t
  misc_feature (259)..(259): n is a, c, g, or t
  misc_feature (319)..(319): n is a, c, g, or t
  misc_feature (335)..(336): n is a, c, g, or t
  misc_feature (340)..(340): n is a, c, g, or t
  misc_feature (369)..(369): n is a, c, g, or t
  misc_feature (396)..(397): n is a, c, g, or t
  misc_feature (446)..(446): n is a, c, g, or t
  misc_feature (451)..(451): n is a, c, g, or t
  misc_feature (471)..(471): n is a, c, g, or t
  misc_feature (490)..(490): n is a, c, g, or t
  misc_feature (511)..(511): n is a, c, g, or t
  misc_feature (518)..(518): n is a, c, g, or t
  misc_feature (531)..(531): n is a, c, g, or t
  misc_feature (536)..(536): n is a, c, g, or t
  misc_feature (595)..(595): n is a, c, g, or t
  misc_feature (610)..(610): n is a, c, g, or t
  misc_feature (668)..(668): n is a, c, g, or t
ntgaagacgccacccctggcatggggtccgtggcccttgctgtcacatctcgccttggttgatctcgatgggaggttgatctctctcagggagaactgtggcggtggggatttagcctttnnagggnccttcaggnngtaggggtggggggttggggagngtggtaganncagaaagttctgggggngtgagggataggtgtactaatatttggnggcagtgggngatgntggcnccaaggttgangtatcgagttagngcagaagcgatagtgtgcgacctagtatgctggtttttcctttgggtttaggtgtaagtnaactattattattggnntggngaactggagagaaagggttgtcactgtgnagcagcgtacacagcgtgcaggcagcnnagatggtacacattcccagaaagactacaatagcgtagacactgtggcntgtanaccccatgcacacacacacnaatcacagcatacctgtanggcatgtgtgtaaacacccanatgcacncacacccacatgnctggnagtacacagaactgtatgcatccatttgtgccaggctggggccttgagtgataggaaangggtctgtgatgggnagatagtgtggttggagacacggatttcttcctgaacaaagtccctcccctacatggngga

SEQ ID NO: 496323 - DNA, 856 bp, Homo sapiens
gcggccgcctactactactaaattcgcggccgcgtcgaccgaatgcgcaggctgaagcgcaaaagaagaaagatgaggcagaggtccaagtaaaccgctagcttgttgcaccgtggaggccacaggagcagaaacatggaatgccagacgctggggatgctggtacaagttgtgggactgcatgctactgtctagagcttgtctcaatggatctagaacttcatcgccctctgatcgccgatcacctctgagacccaccttgctcataaacaaaatgcccatgttggtcctctgccctggacctgtgacattctggactatttctgtgtttatttgtggccgagtgtaacaaccatataataaatcacctcttccgctgttttagctgaagaattaaaaaaaaaaaacaaaaaaaaaaaaaaaaaaaaaaaagggggggcgcggcataaaaagacccaaaagggggcaaagtcagagggagaccaaaggttccggagaaaaggggcgcccaataaggggagccgcatattaaaaccaaaggaccgggggcgcagaatataaacaaaggcgagaaggggacaacaaggcgaacacctgggacacatggggaagggcaccatcaacaaaggagggaggggacaaaaaaatgggagaacacaatcgccccagaggaatctatcaaaggcccccaccggggccacatatatccaacagtttctacgacgccgcgtcaatcggtgtggataaacacacagcgggggaaagaacacgcgagagacgtcacagcactttcggcccaacaggagaaaagacaatctcgcagacatttcttcacccggggaggtatcacagctaa

SEQ ID NO: 496324 - DNA, 606 bp, Homo sapiens
ggaagcggccgcgactgtccttttgtgtgcgtacaagcagccggcgtggtgccgccgagtgaggggacgcggcgcggtggggcggcgcggcccgaggaggcggcggaggaggggccgcccgcgtgcccccgtgctcactcctggcactccgtggcctgctcggtgcccccatgcctgccctgacgcgcgctgcctggagccccagtgtgaccatgctgccatgtccagccaggtggtgggcattgagcctctctacatcaaggcatgatgcctggccagccctgacagtccaaatgggttcctcggagacagagaccgagacctcctgtggccctggcccctggtccagctcccactcgctgcctcccaggccacaaggaagaggaggatgggcgagggggctgggcctggtgagcaggggcgtgtggaaaagcatggatgcaattaggcataagttgcacgcaataattctcctctgaccatggctcatagctcggtgacgattggcttccagcgttaaccacatacatactcgatgagcactaccacagctgacggccatgtccacgccattcttcaagaggcccatccatgcagacaagagac

SEQ ID NO: 496325 - DNA, 1071 bp, Homo sapiens
  misc_feature (34)..(34): n is a, c, g, or t
  misc_feature (49)..(49): n is a, c, g, or t
  misc_feature (608)..(608): n is a, c, g, or t
  misc_feature (620)..(620): n is a, c, g, or t
  misc_feature (631)..(631): n is a, c, g, or t
  misc_feature (641)..(641): n is a, c, g, or t
  misc_feature (646)..(648): n is a, c, g, or t
  misc_feature (650)..(650): n is a, c, g, or t
  misc_feature (659)..(659): n is a, c, g, or t
  misc_feature (664)..(664): n is a, c, g, or t
  misc_feature (678)..(679): n is a, c, g, or t
  misc_feature (685)..(686): n is a, c, g, or t
  misc_feature (697)..(699): n is a, c, g, or t
  misc_feature (720)..(721): n is a, c, g, or t
  misc_feature (723)..(723): n is a, c, g, or t
  misc_feature (727)..(727): n is a, c, g, or t
  misc_feature (738)..(738): n is a, c, g, or t
  misc_feature (745)..(745): n is a, c, g, or t
  misc_feature (749)..(751): n is a, c, g, or t
  misc_feature (753)..(755): n is a, c, g, or t
  misc_feature (760)..(760): n is a, c, g, or t
  misc_feature (771)..(772): n is a, c, g, or t
  misc_feature (777)..(777): n is a, c, g, or t
  misc_feature (781)..(781): n is a, c, g, or t
  misc_feature (785)..(785): n is a, c, g, or t
  misc_feature (789)..(789): n is a, c, g, or t
  misc_feature (808)..(808): n is a, c, g, or t
  misc_feature (816)..(816): n is a, c, g, or t
  misc_feature (824)..(824): n is a, c, g, or t
  misc_feature (826)..(827): n is a, c, g, or t
  misc_feature (829)..(830): n is a, c, g, or t
  misc_feature (839)..(839): n is a, c, g, or t
  misc_feature (841)..(841): n is a, c, g, or t
  misc_feature (846)..(847): n is a, c, g, or t
  misc_feature (849)..(849): n is a, c, g, or t
  misc_feature (851)..(851): n is a, c, g, or t
  misc_feature (853)..(853): n is a, c, g, or t
  misc_feature (861)..(861): n is a, c, g, or t
  misc_feature (863)..(863): n is a, c, g, or t
  misc_feature (866)..(866): n is a, c, g, or t
  misc_feature (878)..(878): n is a, c, g, or t
  misc_feature (883)..(883): n is a, c, g, or t
  misc_feature (902)..(902): n is a, c, g, or t
  misc_feature (904)..(905): n is a, c, g, or t
  misc_feature (909)..(910): n is a, c, g, or t
tttataataagtacgaggtaaaaatcatcccccntttcctcctcatggnagcagagcgaatgcgcaggctgaagcgcaaaagaagaaagatgaggcagaggtccaagtaaaccgctagcttgttgcaccgtggaggccacaggagcagaaacatggaatgccagacgctggggatgctggtacaagttgtgggactgcatgctactgtctagagcttgtctcaatggatctagaacttcatcgccctctgatcgccgatcacctctgagacccaccttgctcataaacaaaatgcccatgttggtcctctgccctggacctgtgacattctggactatttctgtgtttatttgtggccgagtgtaacaaccatataataaatcacctcttccgctgttttagctgaagaattaaaaaaaaaaaaaaaaaaaaaaaaaaaaaaaaaaaaaaaaaaaaaaaaaaaaaaaaaaaaaaaaaaaaaaaaaaaaaaaaaaaaaaaaaaaaaaacaaaaaaaaaaaaaaaaaaacttttgggggcggtttgggccaagggatttttaaattggaaaaggtttatcattgcggccgaatttagagttaattgggcnaattcccctaanggggggggttnaaaaataaangggcnnngntttaaaaanggggnaatgggaaaaaccnnggggtnnccaaattaaannncttggaaaaaatccccttttnncnagtngggaaaaaacnaaaaagncccnnncnnntcccntttccaaaaanntgccnaccntaangggnaaaggaaaattgtacggtnaaattttngtaaaaancnngnnaaaattttngnaaaannancntntttttaancnaangggcaaaagggnaaaanccttttaaaaaaaaaaaananncccnnaaagggtagaggttttcccaatgtgaaaaaagaggccccttttaaaaaagggggccccaacctcaagggcgaaaaaaccctttttataggggaggccccctattggaaaccattcccctaaacaaagtttgtggggtccaagggcccacctttggcccccg

SEQ ID NO: 496326 - DNA, 412 bp, Homo sapiens
acccggcgctccattaaatagccgtagacggaacttcgcctttctctcggccttagcgccatttttttggaaacctctgcgccatgagagccaagtggaggaagaagcgaatgcgcaggctgaagcgcaaaagaagaaagatgaggcagaggtccaagtaaaccgctagcttgttgcaccgtggaggccacaggagcagaaacatggaatgccagacgctggggatgctggtacaagttgtgggactgcatgctactgtctagagcttgtctcaatggatctagaacttcatcgccctctgatcgccgatcacctctgagacccaccttgctcataaacgtgtttatttgtggccgagtgtaacaaccatataataaatcacctcttccgctgttttagctgaagaattaaa

SEQ ID NO: 496327 - DNA, 407 bp, Homo sapiens
  misc_feature (303)..(303): n is a, c, g, or t
tgatccaattaagtttcgatttggcttatatgatctcaaatcttcagtgtttacaaaacatatcttgagccaccacccagctctgtcacccaggcgggagtgcagtggcaccatctcagctcactgcagcctccgcctccgaggtttaagcgattctcatgcctcagcctcctgagtaacttggactacaggtgctcaccaccacgcagggattctttttctatttttttgtagagacatggtttcaccatgttggccaggctgctctcgaactcctgacctcatgatcctgcccacctcggnctcccaaagtgctgggattacaggcgtgagccactgcactgagcctacagctcatttcttaccacataaagcttttgagctcttcacaaaactggcatgtggag

SEQ ID NO: 496328 - DNA, 150 bp, Homo sapiens
  misc_feature (150)..(150): n is a, c, g, or t
tcgtacgcgtacagttgcggtagagctctgttgcagggtcagactgcagggcggcatgccctctcggataccgagctgcagcctcgatacaccaggtgtcacagagcattttccgcaactggtacgtcgggcgcaactggtacggcgggn

SEQ ID NO: 496329 - DNA, 161 bp, Homo sapiens
acccacttccacctttacttaccagacaacctttagccaaaccattttacccaaattaaagttattaggcgattagaaatttgaaaccttggcgcaattagatattaggttaccgcaagggaaagattgaaaaatttattaaccaagcattaattattagc

SEQ ID NO: 496330 - DNA, 306 bp, Homo sapiens
ccgagatcgcgccactgcactccagcctgggtgacagagcgatacttggtctcaaaaaaaaaaaatgaaaaaaaaaaacttggaaataattggggggagtttaaagggggtttaagaaaaattttggggcaatttttatccgagatttttgcccttcatatcagtggagcggggaaaataaggctttgcgcgtaaaagtaggtagttttttttttcctaaacaatctctaggagtgtaaaataattttcgctggacaaaggttgtcgggaaaccaagtggtctttctaaagtggaaaatcctttcc

SEQ ID NO: 496331 - DNA, 911 bp, Homo sapiens
  misc_feature (1)..(1): n is a, c, g, or t
ntaacagggggaccacagctatgtgggcccccttttgggccctaatttttagaggggcaccaccttattgtgggacccaaaggtgtttgggtacaccaaaaaaaaccccacgacatctggggtaacacacgggttccccgcgaaattttcctccccgcggggataaaaaatgattgtttataggtgaacactttgttatagggttttagatttgtggatagttgtttttaaaacacgccgggggtgaacagagacgctgttacacatatatattaaggaaacaaaaaatagcgttctcagcgatccacagatggggtgaccacatatcccccacagattctcacatcgccagtttgagcgtttattgtgagaaacaaatggtgtttgtgcgttttatagaggagaatctccaacagcgttctcgttaagcacacatttcaaagaacattggcttgatagtgtcaccaacatttgggcgccacgccagagacgcccatcgtgagacgcccacccgaggcgcaggggcctgcgtgtgtagattatcccgcgcgcatatatcgctgtgtacacaccagggaagcgttctcgcccagcgtttgtctcgccaatggcgcgcccatttccttaagtgagacgttatctcttaagaaagtattttaattttgagccccacctttttcaagaagggaattgtggtgggtgtggtcgtaagagacacctagtaaataggggtgaaacctttatggggcccggggaaccctggcagagggtggagatgggggatagaagccttcagactcctccgccccagcccctttgcacctggggcctttcagactgtttaaatgaaaaacccattattttttgtaaatgaggggaaaaaagaaggaataaaagtgtttattatgtta

SEQ ID NO: 496332 - DNA, 110 bp, Homo sapiens
gcggcgcgtggtctacgccgagtgcaagagacgtttcaggctgtgttctaaggatgaccgagtggagacagacaagaaccaaccggtgcaaaggacccccacgcacataa

SEQ ID NO: 496333 - DNA, 914 bp, Homo sapiens
  misc_feature (261)..(261): n is a, c, g, or t
  misc_feature (771)..(771): n is a, c, g, or t
agcggagtgcacaaaagggcgccctacaggctactggtgactcgtgctgcagaaagctcatgggtgtgcggcagtaccgagtgatggcgcgtcagatcctgtgcgcaatcgggccagagggtggcgatgaggtccactattgagcccaactgagatacattccgatgatgacctgctagagaagaacattaacattgttcggaaaggactgaaccggacggtgaccctctcggagaagactggtggtatggagcacctggnagtgagccccgagcgcaggcgcaggaaaagtcgaggcgagtgcaagctcagttcctggcggattgcgagcgcggaacgcgctggtgggccaaatggcaggaatggcgagcgggcccagtacgtgggcaagtcatccaggtatgcatcaggcagacggcgctggtccatagaggtggcttgtgccattccagccaatccagctggtgatctcactcgtgaatggaacgcaccaggggttggcgggcgatgaaaaggaaccgtgcgtaccagggccagagaggaacatgtcaaaccaggggaacgtgtagtgaagtgtatgcgctgggcgagacgtggcgagggtggcgcgaagagtagtgggcgtttgaggcgtctctggagagccgtggggatcgtgggagatcaatgtacgaggcgacgattgattactgggcaagaactcatggcggtaccactgaggggttcttcctgatttggccacatgaactctacatactcaccctaaatggntggacggacattgcggggcaatactgcgattggagttggggggttgccagaatggctgtggactgtctatgggattggggataccgctgggggagctgaacgtggcacccaaggattgattggaggtgaaagacttgaagggg

SEQ ID NO: 496334 - DNA, 773 bp, Homo sapiens
caaccctaacataaccattcttaatttgaacatatttagtattatcctaagctacgtaccgcattcctacatactcaacttaaactccagcaccacagaccctactactatctcgcacctgaaacaagctaacatgactaacacccttaattccatcgcaaccgtcctctccctaggaggcctgcccccgcctaaccggcttttagctccaaatgggccatttatcgtacctaattcacaaatacacacaagtagcctcagtcagtccccaccatcatagcgcaccagtcaccctcctataacctctacttctagcctacgcctaatctactccacctcaatcacacttaatccccatatcttaacaacgtaacaatataaacatgacacgtgttgaacagtacgaaaacccaccccatatacctcccgcacacatcatcgcccttgaccacgctagctcctacctatgtccacctgttaatacgtaagtaatcctatactcagacagcaagaatcttccaccgaaggcagaaagactattcgtctcgccagcccgggaccccggctaccaatcttagcagactcagggaagacacagagaagaggcatccgggctggcctacggcgacagcacaaacagtcgacagggccggaacccgacgccctccctactaaggatacacggggccacgaacctaaggggtccaagatgaaccgggcccataggaacacacacgctcggcaggacaagccaggcgtccccggaacaatac

SEQ ID NO: 496335 - DNA, 186 bp, Homo sapiens
  misc_feature (84)..(84): n is a, c, g, or t
  misc_feature (135)..(135): n is a, c, g, or t
gaggacgtaggctcagtgatctcaaaagatcaatgtactaggcatgaacaggctttaggaatcactagacgagaacactcccanggaccctaagatggtaggatttgacctccttgtgcccagggctcctccctnaccagatgtgtcacttacagcttactttgaagtcaccagacccgaagagag

SEQ ID NO: 496336 - DNA, 420 bp, Homo sapiens
gtgctcgggaactataccatccatcatccaaggaccgttgtgtactccgtatccatatagtgagggttccactagaggtgtggaatcatgcaagtgaggaatcgaatcattttaagcagacaatctacagagagaatcagatttcaccactcagtaacaaagcatggatctatctgagggagaaagacaagtgtcctcttggcagggctatcatcccatttctcccctgaccttggattaatggaaggcagcaccgcaagggcacaagatacttttcactgttgagtgaagtgtacttttggtcttaataatagactgtctgtagtactttcgaaaactgtgtctctaccagaagattagtatcctaggatgcttgtcatgaggaaagggcgttcctctcaggtggccccgggggcgatg

SEQ ID NO: 496337 - DNA, 640 bp, Homo sapiens
aggtctatacccgcccgtgaaaacgccctctcggtgcaggagagacacactggcatcctccctctggtgcccctgaggaaccctccttctgtatgccgctgctgctgctgctacctgcttacgcgccgtgctaggctagtaccccctggcagcgaggtggctgcccaacaagggaggagacccctgcgactgagtagtcccgactacaggcctgtactaccaccggtacctaccagtgaggtcatcgcatgtcctggcagcacgtgatgggccataatcccgccaccaccaagcctagcccggctgcccacatgccggcaggcaccatcctcatccagacgggcacctgcctgcagcccgcagcaggctgcgcactctctggtccaggccccgtccccctacttcttcgcgtgccctacccccacacgccgttcgggcatcgcacccttcccccggccgcccccagtgcccggggctggtccccccgcgccctcgccccgccatcgccctcggcgtccgcccgggcctcccgcagtcattgctgccgtgcccggctgccccggcatccctctagttgctcccgcgcgctcggcatcccaccctgcccgtcgcccccttggccctcaccaggccaccgcca

SEQ ID NO: 496338 - DNA, 157 bp, Homo sapiens
ggatataacccttatcaaagttccctggccccttccccccttttttcttttcttccaatccactgctttttattttccctttaaccaattttttttaatttttacttcttccctttttaatttttttccttttgaattaaaatttcattttccttta

SEQ ID NO: 496339 - DNA, 156 bp, Homo sapiens
cttatggtccttcactgtatcgtgtcggtccttctcgactgcctcttgtatcactcttcgcgtttcttgttgtctgcttccgttcaacatcacctcttctcctgcgtctctcttctctcctcgttcttcatttcttataatgttcccgttacttct

SEQ ID NO: 496340 - DNA, 364 bp, Homo sapiens
  misc_feature (155)..(155): n is a, c, g, or t
  misc_feature (234)..(234): n is a, c, g, or t
  misc_feature (304)..(304): n is a, c, g, or t
agctgcggcgggagccgccgggatcctcctgtggttcctgcaggagcagaaccgggcctacagctcccaggatgtgttcggttttttacagcgggaacacggactgggcttggcggtggtggcgaagacgctggagcagttggcgcaacaaggcntgatcaaagagaagatgttcggcacgcagaagatctattttgcggatcaggaccagtttgacatggtgagtgatgctgncctttaagtcctagatggcaatatcgcggcccttactgctcaggtgcagagcttgcagcaaagctgccgntccatggaggctgagctcaaggaattatcttgtgccctgtccacaccagcgatgcagaag

SEQ ID NO: 496341 - DNA, 1669 bp, Homo sapiens
attgtgagcacgcacaaaatagtttttgcatatccctgaatgtgttgtagaacaggaatattctctaaaaatctcagcaggactttgattggatgcacacatgcattgtccagctctaacattggaatgttctgttatttttttatggttctaatatgtcctcgtccatttgtaatgcagtgtgttgtacttttggatgataaaatgagaattaatatttttaaacactattttaccaggaatgaatgactaaacatttacatgaaggcataaacattttagtgaaaccaaacaaaatctatgaggttattccatggcaaacaaaaatcaattatacaatatatattctaatcagagcctttaaaatatttaatttttgttttatgtttacctttcagataacataggtttgagaagtgaactatgtgttcactactcatttctggactttttattataacttaatcttaacaggtggttgtcttcatctttttatgccttcattcatttatttctgatattgatgtaaaatgataactaatttgttctcttattttagggctaccagagaccaagtcattacattgcaacccaaggtaaaactttgccttgttaaatgttatagaaaaaacaaacttgcttattcatctatgtggtggtttttattattttttaaattttatcttagtaacaaaaaaatcagcccttctgattaacactgctccttactcatttgtatagtacaaatttattgtgtgtgtaaagcttatataaatttaagcttgatttacttttaattaaaagtgaaagaaaagctggtagtggttattatgatttgatccttgttacacagataggtcagagcactagtcaatagtgccagtcagaggaattactcatttttgaggaaaggaaaaagaagtctcatataagaggcctgtcttcttgcagcaagtttgttagtagtacccaagaccaatattgttataatgagctgttatactgagcaattttttgacgagtcaagactgagacaaaacaaagagatggaatttagtcaagttaattcttcatggaatataataagacagtagagagatcttgttatagtggtacactggggagtaaaagtatccaaataccaccaccaaaaaaagcatctgtagtatctctctaaattgactactggccctcagaagagaaacctgtacatctttttttatataaaaggaaagtaaaacaaaagctaggtttactcttttaacaggggtcatttttctgtgttttcacatatctttggagtaattgagttcagttgtgtactctttaaagttagaaagatcgaccatagtggtgaacaatattcagttttatggtattcggtagagaacagcccagcacatgcttttgcagtttggagatattatgataagattaggatatgtccttacgtgtaaggatatgtttttattgatccctaaacatgcactatttataaatagtgggcacttatttaattggtaatatatgctgtctggttgatggtggtataagagttctattttttacacatatttgaagatgcattaaagtgacttagtgacaaatataaatacccaagaaactagtgatagtttcttctaaattgggaagtgtagagggcaaattg

SEQ ID NO: 496342 - DNA, 159 bp, Homo sapiens
catgtcgacttctagaggattccccaccagatttgtgtaatgccattaaatgcagtgccatgggggaaatttgtagcactaaattgtctattgcagttggaatcctacaatcttactagtgcagttacactcccaatgaaacccgatcataatggttga

SEQ ID NO: 496343 - DNA, 119 bp, Homo sapiens
atacaatcgagctcgcaccccctaggatatgtcgtgctatgcatctccagacaaaatatttagaaaataaaatcatcatggagggccgggcgcggtggctcacacctataatcccagca

SEQ ID NO: 496344 - DNA, 137 bp, Homo sapiens
atgatataggtgaagctggtgctgagggggcccactcactcgaaatgacacctggaggcctgtgcctcccttaccactccctatccccagaccgaataattggcctactgcacaaccagacacctcaaactctgtca

SEQ ID NO: 496345 - DNA, 1032 bp, Homo sapiens
agcgggagtgatccgtgggagccatggacaatgtgtttggcggccgcagcgctgaatggggtggaaccgacgttccctgcagcgtacagtcaagggtggttctagaaatgctggagagggccaagatggagggcggtggactggcatagccctgtagctgcaccaaatggcttgcatgggaggtccttgccctgggatggacgtccccagactaatacgaacagcacgccgtgtatttcgcggtcctgcgattcagcgtttctcaccgtgtgagacgaggagaacgagatgaccgcccattccgtatagtgcttccttctaggaacagatggcatgaatgcgagtggtactatactttgcaacgtgcagctgtgggcaacatatcgattcatctggtgccagaggcaacggtagtgggcacatccatgtcgtattcgttcatcacagacggcgagtcgaatctgcccatgtgcttggcacgtagggcaatgcgtcggagaataacgacagaggaaacgacatcgccgttgggtcccttggaggcagcatagtcataagtatcagagcatgcttccagaggcatcccatgtcctgctgagaagcatctctaaggacctcgtacagtagaagtatatccgaggggacctattcgtgtcaccttgtagggctcccgttgatttatgccgactaaagactccatgtggtcacgcaggttgagtctggacaaacgcgtagaacctggtctttcccctgttgtgattgttgaccatcagtgccaatcacccattccccttattttacggtacgcagaattgaagcccactggtattgatgtctcttaaagtaggccaaatccctttaaattccctggttttaagtgcttgactgtgttcaccgcttccgggaaactggagctttgtcccctttcactgcataattgtaagggtggtagggttctatttgaaaacagtctaactctgtaaccaggcttgaaatgcagggcttacacgcggtcattgcaagtggcccccg

SEQ ID NO: 496346 - DNA, 178 bp, Homo sapiens
atcagaggatcccgacgcctctctggcggggtgcaattgagtctctgtggtgggaatgggatctgtcagtctggcctttggctgggtctttttggcagctgccttgcagcaaaagcccactatggcagcaggacagcagccccagccacagccagctgcagccccacagagagagcgt

SEQ ID NO: 496347 - DNA, 144 bp, Homo sapiens
cggatgcttattactgcttcggatggacacaccagatgttacaagatttacctgcctagccagaggacatagcccaaggaaaaacgcactccagcacctagagcctgagccttgtagaggcgtccgagctgccagcaaagagat

SEQ ID NO: 496348 - DNA, 241 bp, Homo sapiens
  misc_feature (131)..(132): n is a, c, g, or t
  misc_feature (236)..(236): n is a, c, g, or t
ttaagttgaatgtccgggcggagtaggtatcgatgggcagatgaggggcgcatatgatctaggctataatatccggataacgtagccggtatgtaacaccggtactctagaatatagtagcatgcgaaatnnaaagcgtgataatcgatcgcgcgcagatctgtcatgatgatcattgcaattggatccatatatagggccggggtaataaattaacctcaggtcgacgtcccatngccat

SEQ ID NO: 496349 - DNA, 100 bp, Homo sapiens
taccacttcgagctcggcacccttgaacatcaggtcttatttcctctaagtgtatgtttgtatcaattagtactctcttcaccaccatcccccaacctat

SEQ ID NO: 496350 - DNA, 462 bp, Homo sapiens
tggtaccgtacttttcacagggcgggggaaggagcagttttcgggtttaagtaccccttttgaggctcctataagttacctcttgtctggatgaaggatttggttcctggctaattaaaggctgaggtgaattggtgccctatgcagaggaaggggtggcccatgcttggccaatcaggacactctctctttccatctgagatgtgctggaagcgggagggctgtagggagatttgatcctttgctgctcggcgtggggagatgggatttccccttctggtttagttttaggaagttcgtgttaattggccttaggttccctacccccagacccaggtgtcctccttttgatccagctttgagaagtcagcaccaattggcccccagaccctggtgtttttcctcgattcagcacaaattggccttaagttccagaccctgtaaagtaccctgtgaaaagta

SEQ ID NO: 496351 - DNA, 547 bp, Homo sapiens
cacgagggggaaagtcccctggacactggctctctttttaccttctctattccatatattggttggttgaagtttgttcaaagtattttgctacaaggatccctaaaacttatagtctctaagttcttgtatgtttcaatatgtccgtgagtgactttatatgtaaacagttgtttggctgggaataaaaatctctggatcttactttctttcccccaggactttgaaaatgttgatctctctgtcttacagcattaaatctgctttggaaagaatgagggcacagatgagccttaattttttcataataagctcttaatactcttttcttatgtgcccgtaagtatttatatgtaaatccaggtaaatatcctagatattatctcagtattgattattctttattgagaatgcatatcctttctaaacaaaagtttagcaagaaagaagatggagctccaataaattatttgagagatgttctcaccggaacttttcatttcttacccaaggtttagttcaagggagctgcattaaggaaagtggg

SEQ ID NO: 496352 - DNA, 308 bp, Homo sapiens
ccttttaatttcccatagtccgtgaaagttggggctgaagtccctaagtgtgaatgtctctcctgttaaactgagggtagaaatctgaatttttaaaagagctgtacctagttgtaagtgcttaggaagaacctttgccaccctttaatgaggatcccctgttcctttttaaaattccttccccctgtaatttaatgtgttttatattcttttgtagtaaacccccctaactccgatttttcccggggcccgtggttttttttggattgttttctgtaataggtttccataaagctggatggccttta

SEQ ID NO: 496353 - DNA, 383 bp, Homo sapiens
acccggcgctccattaaatagccgtagacggaacttcgcctttctctcggccttagcgccatttttttggaaacctctgcgccatgagagccaagtggaggaagaagcgaatgcgcaggctgaagcgcaaaagaagaaagatgaggcagaggtccaagtaaaccgctagcttgttgcaccgtggaggccacaggagcagaaacatggaatgccagacgctggggatgctggtacaagttgtgggactgcatgctactgtctagagcttgtctcaatggatctagaacttcatcgccctctgatcgccgatcacctctgagacccacacacaaagagccacgcgaagggccacactaagggccacacaatgcgccacacaagag

SEQ ID NO: 496354 - DNA, 380 bp, Homo sapiens
acccggcgctccattaaatagccgtagacggaacttcgcctttctctcggccttagcgccatttttttggaaacctctgcgccatgagagccaagtggaggaagaagcgaatgcgcaggctgaagcgcaaaagaagaaagatgaggcagaggtccaagtaaaccgctagcttgttgcaccgtggaggccacaggagcagaaacatggaatgccagacgctggggatgctggtacaagttgtgggactgcatgctactgtctagagcttgtctcaatggatctagaacttcatcgccctctgatcgccgatcacctctgagacccaccacgtgcacacgatgagccacccaaagagccacccaaagagccacccgatgagt

SEQ ID NO: 496355 - DNA, 546 bp, Homo sapiens
  misc_feature (13)..(13): n is a, c, g, or t
  misc_feature (16)..(16): n is a, c, g, or t
  misc_feature (24)..(24): n is a, c, g, or t
tacagctggtcgnccncggagtangatatcgtcgatccacgcgctccgctgggattacaggcatgagccaccgtgcctggccaattgctgtagctttttagtgagttttgaaatcaggaagtgtgagaccttcagtctttcaagactgtttaagctatgtggtgtcccttgatatggatttttctatttctttagaaaatgtcattgggattttgttaggcattgcattgaatctgtagatcactttgggtagtactgacaccttatcaatattaaatcttctaatccatgaacatggaatgtctttccatttattggtgtcatctttaatttcaccaatatcttgtagtttttagcatacaatatttaacctttgttaagtttattcctcggtactttattctttttgatgctattgtacaatggaattattttcttaatttcctttttggattgtttattgttagttgtagaaatgtaaccgatttttgtgtgttcattttgtatccttcaactttgctgaatttattagttctaattgccctg

SEQ ID NO: 496356 - DNA, 849 bp, Homo sapiens
atggagaggagacgcatcacctccgctgatcgccgctcctacgtctcctcagagagagatgatggtggggggcctggctcctggaccggcgtctggagtcctggcacccgctctccctggctcgaatgccccctcacactcccgatccgggtggatttctccctggactggggacactcaatgctggcttcaaggcagacccggttgccagtgacgcggtcagacgtctgctggagctcactgaccgcttatgccagctacatcgagaagaggttcgctgtcctggatacagctagaacaaggcgctggctgctgagctgatagcagtctgcgggccatggagcccaccaagctggcagacgtctaccaggctgagctggcgagagctgcgggtgcggctcgatcaagtcaccgcacacagcgcccggctggaggtcgagagggacaatctggcacaggagctggacactgtgaggcagaagctccaggatgaaaccaaatctgaggcctggcagccgagaacaactggtgcctatagacacggaagcagatgaagccaccctggcccgtctggatctggcgacggaagacttgagatcgcgtggacggacggacgatcccggttcctttgaaggaacgatccacgaaggagagtccgggaaactccaaggaggcaagtgggaccgacaagacggtacatggtggagcattgaacggagcgcaaggccagaactcaccggagccctggaaggacgatcagcaacgccaggatgcaagaatggcggtccgaacatgactggagcgaaaatagagaccgacccagtgtgaagcctaacgagcgctgccgca

SEQ ID NO: 496357 - DNA, 277 bp, Homo sapiens
ctgaaactccagtttttatatgtgctactgcgggggtgctggtacaagttgtgggactgcatgctactgtctagagcttgtctcaatggatctagaacttcatcgccctctgatcgccgatcacctctgagacccaccttgctcataaacaaaatgcccatgttggtcctctgccctggacctgtgacattctggactatttctgtgtttatttgtggccgagtgtaacaaccatataataaatcacctcttccgctgttttagctgaagaattaaa

SEQ ID NO: 496358 - DNA, 305 bp, Homo sapiens
tgaccccccacttaatgcgttggatatgatttttcaaagaatgcttcatgcccaaaataccagatgctggtacaagttgtgggactgcatgctactgtctagagcttgtctcaatggatctagaacttcatcgccctctgatcgccgatcacctctgagacccaccttgctcataaacaaaatgcccatgttggtcctctgccctggacctgtgacattctggactatttctgtgtttatttgtggccgagtgtaacaaccatataataaatcacctcttccgctgttttagctgaagaattaaa

SEQ ID NO: 496359 - DNA, 498 bp, Homo sapiens
  misc_feature (370)..(370): n is a, c, g, or t
acccggcgctccattaaatagccgtagacggaacttcgcctttctctcggccttagcgccatttttttggaaacctctgcgccatgagagccaagtggaggaagaagcgaatgcgcaggctgaagcgcaaaagaagaaagatgaggcagaggtccaagtaaaccgctagcttgttgcaccgtggaggccacaggagcagaaacatggaatgccagacgctggggatgctggtacaagttgtgggactgcatgctactgtctagagcttgtctcaatggatctagtacgtactgccatgaggcattttatttgtcaatatatgtattacatccctagaacaagaatcccagggatttccctcctgtgtgtnttcgtctggcttcttcatgatccatgatgccagctgaggttgtcagtacaatgaaagcaaactggcgggatggacgcagattattctgccatttctccaggtctttgagttgcacgttccatctgggg

SEQ ID NO: 496360 - DNA, 371 bp, Homo sapiens
acccggcgctccattaaatagccgtagacggaacttcgcctttctctcggccttagcgccatttttttggaaacctctgcgccatgagagccaagtggaggaagaagcgaatgcgcaggctgaagcgcaaaagaagaaagatgaggcagaggtccaagtaaaccgctagcttgttgcaccgtggaggccacaggagcagaaacatggaatgccagacgctggggatgctggtacaagttgtgggactgcatgctactgtctagagcttgtctcaatggatctagtaccccatgcgcccaaggagccatcccaatgcgccacacaagcgccccaccatgagccacacgaagagccaccaagcggggatcctc

SEQ ID NO: 496361 - DNA, 137 bp, Homo sapiens
gcggccgcctactactactactactgctcgaattcaagcttctaacgatgtacggggacatggtgcccgtgcctctgtgctgtgtatgtgaaccacccacgtgagggaataaacctggcactaggtaaaaaaaaaaa

SEQ ID NO: 496362 - DNA, 952 bp, Homo sapiens
accaccgccaatgaatccctaatcctgcgccatgggttttttctggcggaaaaccaaccgccccgctagcttgatgcaccgcctaggccatttcaggagcagaaacatggaatgccagacgctggggatgctggtacaagttgtgggactgcatgctactgtctagagcttgtctcaatggatctagaacttcatcgccctctgatcgccgatcacctctgagacccaccttgctcataaacaaaatgcccatgttggtcctctgccctggacctgtgacattctggactatttctgtgtttatttgtggccgagtgtaacaaccatataataaatcacctcttccgctgttttagctgaagaattaaaaaaaaaaaaaaaaaaaaaaaaaaaaaaaaaaaaaaaaaaaaaaaaaaaaaaaaaaaaaaaaaaaaaaaaaaggaagggaggggaacacaaaaaaaaaaacaccggaggggaaaccaaggcccagacggacacacagtaaaatcaacaaacgaggggcacaaaagagaggaaggaaataaatgagcgacgccagggcgacgccgacgcggctctactagacgaagcggccggaggacggaggcagaaaagacgtgaagctggatgggaaatcgagagagcgcagcgccacctatccactgatgagagaggggaggaccaacaaaataggcgcgcggcgaagcgcttcacacactagcagcgagagtgctggaacgccaaaacggtggagggtaaacgggcgagaacagcctctttcttgttgtctgtctcgtgttaagcaaggggaggaacaaacacacagacggacgtgggtgaaagatacgaggagcgagtgcgtgagtcggtatgggataggggacgattaagccgaaagattgaacgagacaaggacatcgcagcgagtgagcgcgagacagacaaacct

SEQ ID NO: 496363 - DNA, 408 bp, Homo sapiens
  misc_feature (8)..(8): n is a, c, g, or t
  misc_feature (43)..(43): n is a, c, g, or t
  misc_feature (79)..(79): n is a, c, g, or t
  misc_feature (176)..(176): n is a, c, g, or t
  misc_feature (248)..(248): n is a, c, g, or t
  misc_feature (317)..(317): n is a, c, g, or t
  misc_feature (354)..(354): n is a, c, g, or t
gattcggnacgagaggcgcccaccaccacgcccggctaatttnttatatttttagtagagacagggtttcaccatgtangccacaagggtctcgatctcctgaccttgtgatctgcccacctcggcctcccaaagtgctgggattacaggcgtgaaccaccacgcctagccaaatnttagtttcttacacagactttcaattcattcccacatttttaaccttaaggggtcataaatgtatgtttttntctttctggcaaaatgggtgataatgagacaggcaaattcagagggttggacatcagtagaaagtgagnctctttggcttctagtgtctaaagatgtggggaggtntgtgtacattaaaaatgtaaggcagtagttccgtgtgaatttgattgatatgtt

SEQ ID NO: 496364 - DNA, 528 bp, Homo sapiens
gcggccgcctactactactactgctcgaattcaagcttctaacgatgtacggggacatgttggtcctctgccctggacctgtgacattctggactatttctgtgtttatttgtggccgagtgtaacaaccatataataaatcacctcttccgctgttttagctgaagaattaaaaaaaaaaaaaaaaaaaaaaaaaaaaaaaaaaaaaaaaaaaaaaaaaaaaaaaaaaaaaaaaaaaaaaaaaaaaaaaaaaaaaaaaaaaaaaaaaaaaaaaaaaaaaaaaaaaaaaggaggacggaaagagaccatgggggtttgaattgggccaaaggttattttaaggggggcaaatttagggttagggggcaaattgggccttatggggggatttttcccattaggggggcggttttaaaaaaagggggggcggggaaaaaccggggggtcgggaaaaaaatggggtttgccaaaattaaccttttggcagaagggccccttttcaaaagggggggcggacgtgtccggggg

SEQ ID NO: 496365 - DNA, 564 bp, Homo sapiens
gtggggttgaaatgcattttgaggggatgaagcgcgcaatcttaccccactgatggggggtttatgcttcttattctatcatgttggtcctctgccctggacctgtgacattctggactatttctgtgtttatttgtggccgagtgtaacaaccatataataaatcacctcttccgctgttttagctgaagaattaaaaaaaaaaaacaaaaaaaaaaaaaaaaaaaaaaaaaaaaaaaaaaaaaaaaaaaaaaaaaaaaaaaaaaaaaaaaaaaaaaaaaaaaaaaaaaaaaaaaaaaaaaaaaaaaaaaaaaaaaaaaaaaaaaaaaaaaaaaaaaaaaaaaaaaaaaaattattgcaccctaatacccaaactccttataaaaaatacaaaatttttttaaatcccccatatcaacacaatatttgcccaaattcgcctataaaaggattcataaaaaaaaactgggctcaattaaaaaacgtagggtgaggaaaaaacacggggttccccaaaaagggcctgtaaaaaagacctttttcccagtggaatatgtccccccc

SEQ ID NO: 496366 - DNA, 398 bp, Homo sapiens
  misc_feature (192)..(192): n is a, c, g, or t
  misc_feature (200)..(201): n is a, c, g, or t
  misc_feature (235)..(235): n is a, c, g, or t
aaaaaaaaaaaaaaaaaaaaaaaaaaaaaaaaaaaaaaaaaaaaaaaaaaaaaaaaaaaaaagggccccgctcgcgatttagaaccgccatttttttggaaacctctgcgccatgagagccaagtggaggaagaagcgaatgcgcaggctgaagcgcaaaagaagaaagatgaggcagaggtcccagaaccngctagctnngtgcacggggaggcccacaggacagaaacatggnatgccaaaccttggggatgtgggacaagttgggggatggatggttactggtaaaggttggtcaaaggggtttaaaatttttcggcctctggggcgggcacctttggaaccacctgtgtaaaaaaaaaaccaccagggggccccccccggcccggaaaaaagga

SEQ ID NO: 496367 - DNA, 904 bp, Homo sapiens
gttcgaaggcctcgagagcgggagggagtctggcggccgataggactagttgttcccagcgtgcctgcgccttagcccggcgctcgcagcttctcgctctcgcctgctgcccgtcccttgcttgtcgcgctttcgctcgcctctcctcgaggatcgaggggaagtctgaccaaaggtctgtggctcgggaaggggagaacagaagggcggcgtgggatcaggtgaaacgaggctgcagtggtggtagtaggaagatgtcggcgaggacgagcaacaggagcaaagtatcgctgaggacctggtcgtgaccaaagtataagatggggggcgacatcgccaacaggggtacttcggtccttggtggaagcaatctagctcaggtgtgtcgggtactgcggcctgtgtgagaaaaggtgatgccatgattatggaagaaaccagggaacaatctcccagaaagaacaacggacacatgacgcaaggtattgctttccccacccagcatttcggtacataaactgtgtatgtcacttctccccttggaagagggaccgaggataatatctcaaggaaggtgaccttggtaaaacattgaccttgggggtcccatggtgggagtagcttcatcgcataagtgtagctcacacctctttgtggttgatggtcgctcaggggaccccaagtacacagggaggacaagcacgaactgttcttcacgggcggttcaccctttgtgctgaaagcttggccctacggctggtcaaacctggcaatgagaaccaacccggggacggaggcctgaacacgttgccactctttaaatgcaagccatagaggtatgtgtacacacattggcgcgcctgttcgaggagaagacctttcagatccacagacaggagagggc

SEQ ID NO: 496368 - DNA, 534 bp, Homo sapiens
ctgtaatcccagctctcagggaggctaagaggcgggaggatagcttgagcccaggagttcgagacctgcctgggcaatatagcgagaccccgttctccataaacaaaacaaaaaacaaaaaaaaaaaacaacaaacacatgtgtgtgggcgcgcgcgcctcgggccctccggaagaacacgttttttaagaacacaatccggttggcggcgcgcgcggggcgccacaaggtggggtcagtgcggacactggggccaaaaacgcgggggcccataaaggagaagacctccgggggcacagagagaacaagaggagcggggaggtttctacacccaaatataaaaaaagcgcgccgggggggggaaaacaccaggggggcggttttgtggaaaaaaatatttcaaagagaggggggattcactagggaggaggaaactaacaggggggagctcatatatccacagaggggaggttacaaaacgagagaagcgtggagaaatattacaaatttatagcgccccggcatggggggtga

SEQ ID NO: 496369 - DNA, 432 bp, Homo sapiens
tatattctggaaagcaaaattatgtccaccagtatgaacattaagataccgttaccagtcatattattattgaatgtccagtcatcctggctggttatttgcagcaccccattattaacaattactgacttgccgatatttttttgtactactgatatcaatacttgccgtgggtaaaatattcaacaaaccactataatcggtattatctcccgtgagatgcgtctcgccactctctgcattaattataccattacctgtgtttttagaaattaaagctgatgaaaaagataattgtcagagttatgtttaaaaatcaactctgccttcccaactccaaaaagaatccctttagattcaatagttccaggcatgtcgctattgatgaataatttcccttttgtgtcatttgccgtagttatattgatgtag

SEQ ID NO: 496370 - DNA, 1202 bp, Homo sapiens
  misc_feature (838)..(838): n is a, c, g, or t
  misc_feature (1059)..(1059): n is a, c, g, or t
  misc_feature (1152)..(1152): n is a, c, g, or t
atgaccccactgacgcaaaatttatcccctaatcacattcagttacgccgctcattgagtcgatctgtgcgctacgcccgatcacaacatgctccgtcatgatgataacttcggctcactccttgggtggcctggcctgatcctccaaaatcaccacaggaactattccctagtccactgccacgtactcaccagcacgccgtcaatccgtgctgtttcattctacagtcgtgcctactattcacttctgagaatggtaacattgatgggcttgaatcatcacgcgtaccttgcactccctagatggcgggcctcagagtatgtcctcttatcgtgcactctttcgctacacatcggggcgagggcctcatagttaccggagtcagtttcatcatagcatgcgagaaaactcgtgatgatcagtgcgtgccaatttagtcgcatccatgctttgcagacctaatagtcgagactatgtccgtctcatcacgcgcgtcatgttgcactccactcggtggagggggctagaaatacttcatctcattgaaggtgagtccgaccgagctcaattctaaccaaaaagcattaccttgaatgcgcggctctatcactcagtaaccaatctgggggggcatggacccatacgttgcagaatcgaaagtcctgacgtgatgggtctaaaattccaaggtcagagcaaggtactccgaagcgcgcttccatcaagcgatataacttctatcgcgtgtctcctaccatttcatgtgcctgtggtctcccggtgttcatctacattagctaggcgctcttcagccgagggaacttccaaacctccgcnttgatctcctgtgactaccaggttatatacgggcaatcaaatacaaaatgctcctctcagagggctactacctttcccctattctccccagtactttaaagagtcataggtcttctcctgagcgccatttagcgtacgaggcaaatcgcgagaaagggaccgcccgccctccgggattataagtcttcatcaatctgctttcattccttcgccgtttaatntggaccagctttatccacctatgttcctccaacccaggagcggtcctttaaggccgaaccctccagacagaattttatactcacgttaaatcnacaaaccccactatttaaaaagagcgcgcccattcccccccaccatcttg

SEQ ID NO: 496371 - DNA, 262 bp, Homo sapiens
gcacacaactgggatagaaatcctgcaactaccatcctcaaatgcaaagttcctttggtacgtatcttctcaaaattctcattcctcaaagctgtctttcctaacggaaactaacatttttcactaagccttctggaattttacccaattgtcaaccaagtctccaatatccttactgatataccataatttgtgattctaatgtctcaaaatgaagtcacttatgtcagtagcgtgagcccacagtaaagctgttcacccc

SEQ ID NO: 496372 - DNA, 267 bp, Homo sapiens
ggggggggggggggttttaaaaaaaaggaatgtttttttctgaggggttcccttggccctggggggccccaactgggccggagggaacccctgtttttaagggcccgccccatttttttgggttgggttgggggttgttttctccccaaccgggggggccctttgggttggaaaggtgggttgttttttaaaaccccccggtggggccttttttttgggattttgaattggccctttttttcctttaaaaagaaggtttttggtcca

SEQ ID NO: 496373 - DNA, 372 bp, Homo sapiens
ttgcggaccaggatggtcgtctcccgctcgttgatgtgttcgtgacgtcttcactagccttcactctgggaggcccgtggcgctggctgttggccgtgcctcttgtctcgtggaggtagacgcatgagtactctccccactgggcgtcggactacaccttgaactccgttatctggactgaggcagttgcgtcctccttcagcaacaagccccccttcagccagcggtgtcctgtgacctctgtggcgctgtcattcaaggagcaggtgaggagtatcttggagccaaggtcttctacggtagtgaagactgtgccggcagccccggaggctccgtgggtgcccagcagcgcgaatcccagcacaagaacca

SEQ ID NO: 496374 - DNA, 278 bp, Homo sapiens
atatccactttaccagagttaagagcagccctggtgaccagggccatggagtaaatggcatgccatttactccatggcggtgaagatgccagtggactccacgaggtactcaagcgccagaatcgccccaagttgattaaggagggatctcgctccctggaagatggtgatgggatttccattgatgacaagcttcccgtcctcagccttgccggtgccctggaatttgccatgaatggaatcatatgggaccatgtaacccatgtagtagaggtcat

SEQ ID NO: 496375 - DNA, 192 bp, Homo sapiens
ggcccttcccccccccttggggtttccccccgggcccgccccccttggaaaatttggcccggggtggatttgtattttggctggggtggtttcccctccctttttaaaaattcttttttttttgcccaataaaggggtttttttttttcccttaggttgggaattaaaattggggaaaaaatttcccttgga

SEQ ID NO: 496376 - DNA, 158 bp, Homo sapiens
  misc_feature (62)..(62): n is a, c, g, or t
catgacaaccgacgttggagtttggaggtgcttgccttagagcaggaacagctctcatcaanggacctaggaggcctctccctcagtggtagggaagacagccaggagcggtttttctgggaacctttgggattgtccccttgggggccccaagaaaa

SEQ ID NO: 496377 - DNA, 424 bp, Homo sapiens
gactgagcccagtggaggaggcacggggcagtgaccagccactgttgctggcacactggtgacgcagcacgtggcagatggacctgagagaaagcaggagggacagcacagtggagccaagaaagggcttagcatggccgggcacggtgactcacacctgtaatcccagcactttgggaggctgaggcgggcggatcacgaggtcaggaattcgagaccagcctggccaagatggtgaaaccccatctctactaaagatacaaaaaaaaattgccgagcatggtggcgtgtgcctgtaatcccagctactcaggagactgaggcaggagaatcacttgaacccaggaggcagaggtttcaatgaacagagatcacaccattgtactccaggctgggtgacagggcaagactccgtctcaaaaaa

SEQ ID NO: 496378 - DNA, 539 bp, Homo sapiens
gctctggcacagccgagagtcaaaagactacagcatccctgagagcagggagaggggccttttcctcgttttgcgttttcccctggagccagcaatgtgtcagtaacttgtctatgaaagaacctgaggtgtagccacatgtccagctgccttctgcgcacgcctggcctccctccaggctaccccttctatgggtgcgcatggtgctgctgttggttctgggcggggcctccactctgatggttccaccctgggaaagctggccttccatcctgccaaaccagatgacctcagtcccaccacctccaggaagcctctgtagatcttcattctgggttcttgtccattaaaaatacccaccatggcctgggcacagtggctcatgcctgtaatcacagcactttgggaggctgaggcaggaagatcacttgaggccaggagttcgagaccagcctggacagcatagcaaaaccttgcttctacagaaaataaagcttaataaataaagatacccagcacggctgacagtgaaaaaaaaa

SEQ ID NO: 496379 - DNA, 227 bp, Homo sapiens
ttttagttactgtgtaaaatcattatcaagaacctagggactacagccaggcatggtggctcatgcctgtaatcccagcattttgggaggccaaggcaggcagatgacttgagcccaggagttcgagaccagtctgggcaacatggcaaaaccccatctttataaaaaaatacaaaaattagctgggtgtggtggcatgcacctctagtcccagctactcaaggagg

SEQ ID NO: 496380 - DNA, 123 bp, Homo sapiens
tagcagatccccacattccagactcaaggccttgtctctcaggtggcatccctaaactcccccttggctggggagaagcgggatgttttcaaaggaaggacacattcctggctgcattcacca

SEQ ID NO: 496381 - DNA, 102 bp, Homo sapiens
tcaagcttctaacgatgtacggggacatggacatttttcctctggggaattaacatctaaattctggtaactattaaaagacagatctggttaatttaaaaa

SEQ ID NO: 496382 - DNA, 621 bp, Homo sapiens
cgccgtacaagaccgaaatttccaattagccccaaccaagccctcatagcgagaaaggggctcataagcaggccaggacactagacctccgaggaaatcaagcagggaagaaggaaacgggaaagcatccaccagggtaacaaagccggccatcagagaaacccagcagcgacaagccacgacagagccgaagagaccccgagaacagaaagcgcaccgccaaatatccgcgctcgaaagcaacccactagatacaccaacagaggagagggcacaagatcgagcaacgcctgagaggatccgcaacaccgcaaacctaacaagaacaccggggaagaacgaaacaagaaaagtagcacagacgacgagaaaaaccccaagaacctctgcaccgaagcagagcaaacagccacagcccaataagcggcagaccacaccgaaggcacgacgcaccaaaggaaacagcaaccacgtcacgcacatgaaaacagccgcaaccgcagcgaaagcacaaaagcacgaaagaaaacgcaaacccaaacgcaccgcagaccggaacccgacacacagatcccagtcatccagcacgcaccagcacaccgtcaccgcgctatgcgcccg

SEQ ID NO: 496383 - DNA, 287 bp, Homo sapiens
caaaaaaaaaaaaaaaaaccaaccaacttctcccggaggggggcggggttgttttttttaaggggacggaagcccctttccggtttcaactttaaaggcaaggatttttaaggaacatttgggtggtcctacaaaaatatggaggccggttatttcccatggggttacacttttacaaagaggggaagcagcaaagggctgaggcggaattgacttgggaaaccggcggcaaggtctttgggccccaacggcccccctaaaggccaattttcctaaagaccaaggcc

SEQ ID NO: 496384 - DNA, 141 bp, Homo sapiens
acatccgtgtcccaaatctaaagttatatatttaaccctcacaatcaggtttgatattgtttgatcttaagtatatatatgtagttaagcaagttatttgaggagggtatttccatacagcctttcatcagaaaataaaat

SEQ ID NO: 496385 - DNA, 1134 bp, Homo sapiens
gattcaagagtggggtggaggaagcagaggtcttcagggctcttatattttggagggagggggtgagtcatcttccatgatcatgagcttctagaaactgtgcctagtgggacgggggagagaagttggcatgaagcacattagaatgcatgggaggagagccatccaaagaatggcattgacatcggagctaaaggtcccatggagggtgcagcatggatactagctagaagtcccaggagcattaagtgtgacgcatcattgccagaacatcagagctatgaggagagggctgaggctaagaaaagaccacatggcaagaaacaaggaggctaccgagacacccaaaggtattccccaaggacctactacacacccaaattcaccatactccagggaaagacgatcgaaccaagtggcactgaaagtgtgcacctccctacagacgagaaggggtattggagcagatcagagccatgtgagcagggacccatgacatgacatcgtggagcagggagcctggagagaccaaggaatactcacagagagccttaacatctggacttccattgggctttgccattgagatgaggggacaggggagagcagggggacaacaacaggaccaacaagagaaggagcaataccaacataaagacaaaagagaaagaagaaaaaagcaaaaaaaacacacaccacaaaaaacaagagcaatcacgacacaaaaaacaatgaaaaaaaatacacaagacacagaaaaggagacacaaaagaagcaagagcacagaaaagaaaaacagcaaaaagaaggacagaacaataaaagcaaaagaaaaggaaataacaaagaaaaaacaagaaagaagagaaaaaaacaaaggaaaaaaggaaaaaacgagaaaaggcaacaacagaaaagaatagaataaacaaaaaaaaaaaaaaaaaaaaaaacacaaaataaaaacaaaacataaaataaaaaaaaaaagaaaaaaaaaaaaaagagggtagaggcaccgggagtaaaagagaagaagagaaaaagaaaataggaaaagataaaagaagaagaaaagaagcaaagaaaaatacacgaaagaacaaaagagtagagaaaagacaaaaaaaagg

SEQ ID NO: 496386 - DNA, 80 bp, Homo sapiens
  misc_feature (8)..(8): n is a, c, g, or t
  misc_feature (64)..(64): n is a, c, g, or t
aggaattnggcacgaggccgagggacggtccatgcccctggttaagagttgcaggtagcggtangttgggccactctggt

SEQ ID NO: 496387 - DNA, 173 bp, Homo sapiens
aaatgaatgttgctgatagggataaatttttaggctgagggcgggtgggacaaatgtgtatgggaaacccccacccctatatattgtaaataaatggggtgggctaaacattgttgccgtttcatacttctaccaactcagcttttacccaatcaagctcttctgtttttgga

SEQ ID NO: 496388 - DNA, 379 bp, Homo sapiens
  misc_feature (30)..(30): n is a, c, g, or t
gagagcctacagaataaaaggttaagatancccccacaggtagcctactgtatgttcacccttaccttatgtaaagtgcccagcttactgagcataagccaatgcatacttgactattcccctacctgctcattttgtcttggaacatctgaatgacaagttcctctttcccctccagcccacttttcccctttagatactgaagccctcaaagtcatcttgggagaaaggcacagacaatagactgtttctgtgattctgtgttttttttttttctcccaggcattgtccttagcctggcaaaataaatttctaagttgattaaaacctgtcatagatactttttggtttccaaatattataaatggtggttctattt

SEQ ID NO: 496389 - DNA, 348 bp, Homo sapiens
gttcgggagctcactctctctatactggtaccttctacatctcactacaagtatgtaagagttggtgtcgatctcaagtcttctgaatatcttcccctatccacagaaatctactctgggggccaaaaaatagaacaaattcttgccgtcctgaccattgaacaagagactaattagacaatggggctagaacaacctcaacgtacactggaaggaggcatgcatccccagctgataccttcggttatggctgtagttttcatcttacttctcagtgtctgttttattgcaagttgtttggtgacttatcacaacttttcacgctgtaagagaggcacagattggagt

SEQ ID NO: 496390 - DNA, 110 bp, Homo sapiens
gaattatattacttactagagtggcacaagattacactgtaacatattagctacaaaaaaggcactgctaagacattcaagcaaatagctattacacactactgcagatt

SEQ ID NO: 496391 - DNA, 288 bp, Homo sapiens
  misc_feature (66)..(66): n is a, c, g, or t
  misc_feature (102)..(102): n is a, c, g, or t
atacattctagcatccactatctggtgcccaaggaccacaatccataaacagctgaagcgattttncaaacgctagctcccaggaacagctaacataatgantttagagcccctcacactctgataacaaatctgagctacttacttaacagccaaagcaccagttctctttcatcttagctgagaatctgaaaatattctggctgagactatggtgctctatggagcatttatattctttaattaacatccagataaagactagtaatagatccagccagaaagggg

SEQ ID NO: 496392 - DNA, 1603 bp, Homo sapiens
  misc_feature (14)..(14): n is a, c, g, or t
  misc_feature (60)..(60): n is a, c, g, or t
  misc_feature (500)..(500): n is a, c, g, or t
  misc_feature (525)..(525): n is a, c, g, or t
  misc_feature (550)..(550): n is a, c, g, or t
  misc_feature (557)..(557): n is a, c, g, or t
  misc_feature (570)..(570): n is a, c, g, or t
  misc_feature (584)..(584): n is a, c, g, or t
  misc_feature (587)..(587): n is a, c, g, or t
  misc_feature (1603)..(1603): n is a, c, g, or t
cctcaggccgctgnagtcgcgtcgccggctgctcgggccccagccccggccgctgtggtnactccgccgcgcctcgccgtcgcccccgtcccgcccgccgccccagccgccagggacatgtctaacctcggaggccgtagggacgggcctgtcgaagtgcgcctgacagggacatgccacccccgttttaggaggacttgtatttggtttgagaaggaattggaatcacggcgttatcctaccttcaccatttacccctgataaattgtccacgtttatatttgggaatcatattgacaggtcatgaaaatgagaccaaaagatctctggaagcgattaatgataaaatttcatggagaagaaggccttgactacggaggggttgccagggtgatgcaactccgtgagggtggagattataccaacaaggaaataaattagtggcagagtaagggtgacttgagatctcttggaagcgaggatcctttaaaaatcctggnatatacactgcagtaaaagaacaangcatacctcagccttaaacgactgnagaagantgtcaagtggggnagtggctttggttntcngtttgtgggttctgaatccacacaaagacaggattgctttctgaaaacctgaattaattattgtccttacctcaataagacaaaaaattagaatcaaaatcgttagtattacagtcacagatatcaccaagattagtttgttgttatagccatatcctggaacttctttcgtgagctaaaaaaaaaaaaaaaagaaaaaaggaaagaacaattaaaaaaagagtgaaagctaacttttcaaaaccccagtattctaggttgaggtagcttacaggttctttgttttttttttttggagcacagggttctcgcttcttgttcccccaggctgtggagttgcaggggttgtgatcacagtctcacgtgcggactcgaccctcccgggggctcgggttgactcctcccaccttcagcctctagagtagtgtggaatttatgggcacaggttcaccacacccaattaattgttcggtatttttggttgaaaaatagggttccacttattttgggtcaagctgggtctcaaaactcctctggatttcaagtggatctacccacctgggcttccccaaagtggctgggggttacacggcgtgagttaccatgcccagcctcacagttcactcctgtcgcactattcttgtttcactctctatttggaccaagtgggagatccactgtccatgggccaaatgttcttggcaaggacaaaatattggcgtgggaatcccaaggtcccctgggtggaccgtcccggatatcctcaatgatgggaaaccgcggccacagttcatcgggggcccaccacaccaagtctggctttcggacccgggagcttggggcacaaatataacgcttaatccccaggcgtcccagtcgctggagcaatatattagcgtcagagaacccagaagctgccgaaaaatgacagaatgtaagtcgaacgttagaggaaaaaagcaccctgcagacagcgagacaaaccgcacacatctgagcatgccacttaacaagtn

SEQ ID NO: 496393 - DNA, 252 bp, Homo sapiens
  misc_feature (110)..(111): n is a, c, g, or t
  misc_feature (150)..(150): n is a, c, g, or t
gggccaaaaaaacaaaaaaaaaaaacccccggggcttttttggggcccaatttttggcccccagggcccctgggttggggccaagggggcccaagcccccccgggggttnnttttgtggttttgggcccacccccaatttttgggggggncccccccaattcccttttttttggcccccccgggggggggttaaaaaaaagggggccccccccgtgggggccccccaaaaggaaaccttttttcccttttta

SEQ ID NO: 496394 - DNA, 233 bp, Homo sapiens
gatgtaggatgtgaaaagatgaaggtgtttgctttaagatagtcaggtggaaataggttagagaagtgatttgaacccagtggcttttcctctctacaaatgtgtaactaaaatgatttgaccaggtgagagacattctctcgggaatattttccaagaaatatcactgtctatgattaatcactgtctaactcatatgagtggtagcctggcattgttagcagatgcattcg

SEQ ID NO: 496395 - DNA, 1645 bp, Homo sapiens
  misc_feature (14)..(14): n is a, c, g, or t
  misc_feature (60)..(60): n is a, c, g, or t
  misc_feature (429)..(429): n is a, c, g, or t
  misc_feature (439)..(439): n is a, c, g, or t
  misc_feature (448)..(448): n is a, c, g, or t
  misc_feature (451)..(451): n is a, c, g, or t
  misc_feature (456)..(456): n is a, c, g, or t
  misc_feature (542)..(542): n is a, c, g, or t
  misc_feature (567)..(567): n is a, c, g, or t
  misc_feature (592)..(592): n is a, c, g, or t
  misc_feature (599)..(599): n is a, c, g, or t
  misc_feature (612)..(612): n is a, c, g, or t
  misc_feature (626)..(626): n is a, c, g, or t
  misc_feature (629)..(629): n is a, c, g, or t
  misc_feature (1645)..(1645): n is a, c, g, or t
cctcaggccgctgnagtcgcgtcgccggctgctcgggccccagccccggccgctgtggtnactccgccgcgcctcgccgtcgcccccgtcccgcccgccgccccagccgccagggacatgtctaacctcggaggccgtagggacgggcctgtcgaagtgcgcctgacagggacatgccacccccgttttaggaggacttgtatttggtttgagaaggaattggaatcacggcgttatcctaccttcaccatttacccctgataaattgtccacgtttatatttgggaatcatattgacaggtcatgaaaatgagaccaaaagatctctggaagcgattaatgataaaatttcatggagaagaaggccttgactacggaggggttgccagggtgatgcaactccgtgagggtggagattatacattctcncccaaatttnccccacttnttntttcncccaaagccaacaaggaaataaattagtggcagagtaagggtgacttgagatctcttggaagcgaggatcctttaaaaatcctggnatatacactgcagtaaaagaacaangcatacctcagccttaaacgactgnagaagantgtcaagtggggnagtggctttggttntcngtttgtgggttctgaatccacacaaagacaggattgctttctgaaaacctgaattaattattgtccttacctcaataagacaaaaaattagaatcaaaatcgttagtattacagtcacagatatcaccaagattagtttgttgttatagccatatcctggaacttctttcgtgagctaaaaaaaaaaaaaaaagaaaaaaggaaagaacaattaaaaaaagagtgaaagctaacttttcaaaaccccagtattctaggttgaggtagcttacaggttctttgttttttttttttggagcacagggttctcgcttcttgttcccccaggctgtggagttgcaggggttgtgatcacagtctcacgtgcggactcgaccctcccgggggctcgggttgactcctcccaccttcagcctctagagtagtgtggaatttatgggcacaggttcaccacacccaattaattgttcggtatttttggttgaaaaatagggttccacttattttgggtcaagctgggtctcaaaactcctctggatttcaagtggatctacccacctgggcttccccaaagtggctgggggttacacggcgtgagttaccatgcccagcctcacagttcactcctgtcgcactattcttgtttcactctctatttggaccaagtgggagatccactgtccatgggccaaatgttcttggcaaggacaaaatattggcgtgggaatcccaaggtcccctgggtggaccgtcccggatatcctcaatgatgggaaaccgcggccacagttcatcgggggcccaccacaccaagtctggctttcggacccgggagcttggggcacaaatataacgcttaatccccaggcgtcccagtcgctggagcaatatattagcgtcagagaacccagaagctgccgaaaaatgacagaatgtaagtcgaacgttagaggaaaaaagcaccctgcagacagcgagacaaaccgcacacatctgagcatgccacttaacaagtn

SEQ ID NO: 496396 - DNA, 422 bp, Homo sapiens
  misc_feature (167)..(167): n is a, c, g, or t
  misc_feature (204)..(204): n is a, c, g, or t
agcttctttaaaatctcacttactctccttctctacttcatttaccctgagaataaagaagaataaaggggtgggaaaggcctatcctcattcctcttgctctttccacagaggacaatgaggcaggactgagcagtgtcttcatccctcacggaattccaaggtgnacgccatctgtgaagcgacttcgtgttggcctgaacntgctaggagcttttagccactcatttggttgtaatccaacacatgacgtaatagtcggccgtctggattaatcagtcccagctgttggacgctctgctctgtgtgggggttcaagcctctccatctgttcctggggcctctccacttatcccttctctgcttgagcctccagccatgacagatggctctttctcagtattacagataatttttctctg

SEQ ID NO: 496397 - DNA, 635 bp, Homo sapiens
cgcagttccagagggcgcaccggggcccaaacagaggaccacgatgcgtgagagccgcccagaggcccaccactttgggggcaaagacaaggggtgggcacatgcgccagcttcgagcatccgggcccgctggagaaaagtccccgggtggatcgcacgacagcaccagaccctggggaaaccacccacgcgatttgtggctccgttttcacggccccttcaaggagactaagcacagcctggccgaagggggactccaggcatcgggggatatctcgtcccccatttcactattggtatgggacccaccaagtgcgaagccgaaacaggggtttcgaacacaccgtttgtgctggggccaaccaccagtttggttaacgtgtgcggacgacaccgagacacccaatcatcttgtcgtggagagttgtcaccatcaaagatcttctgagaaacctggttcggggtgttctacctaggggcattttctggtgaacaccagggagtctctccccaagaaccactacaactgtccatttttttttttgtggggaggggggtcaccccccccggggaaggggccctttggtcccacatcccccaaataaaacaaaatttttttggaatgcacccaaata

SEQ ID NO: 496398 - DNA, 148 bp, Homo sapiens
ggaattgaatggccgtatacctggtagcgtaaatcaataactaataaccttctataatagaaagcaccaggcttagatgggttcactgatgagtgatcaaacatttaagaaataaatcttggacccagaaatatttcctgtaaaattt

SEQ ID NO: 496399 - DNA, 831 bp, Homo sapiens
cctcatcgttcagccgatgtcaccaccagcccttatgctgacacacagaatagctatgggtgtgctacttctaccccttactccacgtctcggctgatgtgttaaatatgccaggcagctacctcagactctgagttccccatcggaacaacgggtggttactggacccaccaaaagtcatatctcttggggagccccatctatggtgtgtggtatgaccactcctcgcaacttctcctggaaatgtcccaacctggaatcctggtcaccacccttaaaccaggtaaacgcctttgggtaacaacttggcgggtgtgcacaaggggaattccttcggggaaccccaagaaacactctctctcttccagccccactctgctcattcggatgactactgtgcacatttcactcccccaggcacagtcacaccccccaggaaggtgcgatccagctcgtctgctatccctctgcccaggcaaagtgattcacttgtaagcctcacctgcgaagcctaattatgccagatagaattctgacctaacaagtgcacatgggcttcgactccagacctactctgaaaagtggacttacacaagcatgctctcaaaggtgtgaatctgccgaaccctgggctggtcccaaaaccactgcctcggcaggaaactctcgggagggaacccaggacgggtccaacccacgtcccatgaatgcaacagtcgtactctgggaacagagaaccacacaccagcgcccaagggcgcgagacagggacaaacaggaccacacgaacaagaccccagggcgaacaccgccgcacccccccaacaccgg

SEQ ID NO: 496400 - DNA, 515 bp, Homo sapiens
  misc_feature (357)..(357): n is a, c, g, or t
gccacaggcactttacagtgccccctaagtacccgaacactccaaggggggccatccccgcttgtgtatataacgtttccggtattactctgcaacacgacgcctttttacttttggggttttgtttttgttctgaactttcctgtacccttttcagggctgacgtcacatgtaggtggggtgtataagtgaaaacgggcctggtttttggggattgaagggcaggggtccttttcccctggggtcccagggtgttttgcctgttcagccaggcctttcttgggagccactcgcccaaaaattaagtttggccaacttggggggttgtgtccacccagcccgcccgtcctgttgggnggcaaagctccccttgttccctcctgccccggttcaaaagccgagtttgtgggcactttttcccttcaggcccctgtcctttttaacacgtccccttcaactgtaatcccaacatcctgaccccgtcatttaataaaaaaggaacatcaggcatgcta

SEQ ID NO: 496401 - DNA, 949 bp, Homo sapiens
gcacgcctgtaatcccagcactttgagagaccgaggcgggcggatcacgaggtcaggagatcgagaccatcctggctaacacggtgaaaccccatctctactaaaaatacaaaaaattagctgggcgtggtggcaggcgcctgtggtcccagctactcgggaggctgaggcaggagaatagtgtgaacccaggaggcggagcttgcagtgagccaagatagtgccactgcacttcagcctgggtgacagagtgagactctgtctcaaaaaaaaaaaaaaattcctgggaaaagccagaaacaatttacaaacaagtttgtgggagggcagattggttttattccaagaggttggttggagtggtggtgtttggcctaagcctccttataggcctatttttctactggctggagagagtaatattaacgggaacaggtggagggatgtggaaggacgagccttagttagagcgtcccattgcgggccttggggggtttggaactgtgcgggagatgatactctcatcactctgaaggcccatctgtgcaaatgtgggactctgtggttgtccatgagcaccagggagacctgtagctgagcagactgggtatggatgagcatatggggcaaggaacctcaagaacaaaggacaggttcaggtacaattcagtttggcagaatccccattggattggttatggatcctgggagaacaagacgttaaacatgattgagacccaaagtgtgaaggttgggaaacgctcagtgataaaaggactaataggaaataagggtattgaaatcacactgagatctgtggaagcctgaaatggttggaatgaataacgggtgaagtgcgagttaaagtatggctgcgaaatgagacttgttgaaggcaagtaaaatatgggagaaaggtcgtgtaataggagtaatgattataaaaagg

SEQ ID NO: 496402 - DNA, 285 bp, Homo sapiens
aaaagggaaaggggggaggggggccgaagcccccccccccccctttttttttttgggaccccaaagcccccccaaaaaattttgggggggggttcccctttccggtttcccaataaaaaaaaaaatgttggaggccccccgtttttttttttgggggggtcccaaacccccccggggggggggggaaccggccccttttagggggggtggggggggccccctttaattggttttgggggggccaaagcccgggtgggcccaaattaaaattcctttgggggggga

SEQ ID NO: 496403 - DNA, 253 bp, Homo sapiens
atgactcgttggctgttgacttcttccttttcttcttttattccaggtagctaccctagacttcagtgtagactaagttctgttaagcatgtttgcactttttttttctgactttttttttttttcccttaagggggaaaacgggaccttgctatattgcccaactccggggctaaagttatcctcccatttttgcctccttaagagcgggaattacgggggggagccaccatgcctggccataagcttgttt

SEQ ID NO: 496404 - DNA, 1062 bp, Homo sapiens
  misc_feature (805)..(805): n is a, c, g, or t
actcctaggtgaaggacgaactactataattaagttcctgagatgagttagtctgtctaaagctgactcttcaaaagtcagacgcctaagcattgaagggtcccatgccatataatacgcggcagagcaagggtacccttagtccaataaggtactatcttgatgctgggatataggcatgtggtgtattaatccgtgtcatagaaatggggactgccatatatataagacctgaggcaatgaaggaacacgtatgaaaaggatagctagaagagtgcaataatgtaagttgatggtgaattcctcgtattaatatcatgtcgatacatttctgaggtgactagatatcatgtgttcgtaaatgtagctaatttactataatcaaggattttataatctggaaatggcaagaaaatatataggtatataactatatattggtgggtgtcggtaaaaaggatattgttgtctgagggacacaaaaacatttcgcagttgctcgaagtcttgtgggtgggaaagaggagcggtatgtctacttgaatgtagaataagtgtcttcacaaagcttggatttgagtgccggaggaaaaaccacctgttcccgtacctgaggtcaacagaaggacgtactctccgtcgtagggttctcgccagaggaggaagcgtaatcctcctggcagcgttgtgggaccactaacatttggtgcccaccattgtgcctataaagaggcacttgaggggtattcagacaggccaccaaagactttgaggatctacaaagcgcgggctctaacgtgccgtnttaccatactcttgcagctatgacaagtttagctccccatagatgccgcagtacccttgcggttggggaacctttgaaaccccttagttatatcggggtgaccacaggctgtgtattaaggcgccacctggtgacatttcccagggatttgccactgtcagaatgtgccccgttcaaatagagcggtgggtcccattcttagacggggccaccctgcgaaataactctggccatatcacagataacttccggagaga

SEQ ID NO: 496405 - DNA, 515 bp, Homo sapiens
ctacctacctctaatagactacggattctagaaacagaatcattatagattgctatctctcattcgacttccgagtatagcgttaatttcagcagtcttggtcggacttgagccgccgtctccgctctcttggggccagtattgcgtatgatgagatcttcatcttctacatcactgggctcagtctcttgagcaggtggtgttggcttcgggctcggcctttttgggcgcaacctttgacttttacgctggccgtgggtcatcctcctcctcctcgtcaataacgacaggttccattttgacggcagtctaagcagccatctacttgacagctatgccttctactgtttcggctcacatctggtgtgcgcgtcctatttagatgggggttcttcattcatcacttgcccgtggcctcttctgtgtcttcctttccttgtccgcagtcgcttctttgacggacttgcaggctcccactacgtctttatccgatcgaatggagcatgagatgggat

SEQ ID NO: 496406 - DNA, 442 bp, Homo sapiens
gtaggcgggtgaggtggccagggtaatcctcaggggtcaactcccccgggttgttcaccgggttttttggcccccgcatcggggaccggttcaagggccgggtcccccgggccttcccctggggggtggtggggcccgcggggccggtgggggcccccggttccggggggtttgtggggggggccccttaccccctggtcctggtttgggggccttatttttttcgcaaccccttcacggattgttttggggccggggggtggaaggtccttccccctggggcccgggggagtttcgtcccgccccagcccctggtgggtctgggggagcccccccgttcgggttgcgggtttttaccttttgttaagccgctgggtttttttgtttccgggggccgtttgcctcttttaaccccggaagaaaaaaaccccaataaaaccta

SEQ ID NO: 496407 - DNA, 194 bp, Homo sapiens
agctggacggctagcggattagtgaacggatacctctgcatcacaatggaaactccatatgatcccatttctctgaaatgtccagaagaggtaaatccacagggacagaacatagattagtagttgtctctggctgaaggtccaggggaaaggaggagtgacttgctaagagtacaggcgttcacttaatgccg

SEQ ID NO: 496408 - DNA, 120 bp, Homo sapiens
acacacttcaaccttagaacactgtggtgttatttcaaagccccaagtgaaaccgttgtctgtacagacattttcaaagttgccagtgttacttataattggactgctggattcaggcca

SEQ ID NO: 496409 - DNA, 124 bp, Homo sapiens
ccaagcacactccctcctgggctttcccgccccggggggtccactcccaagggctgttatgaggactgggttgggcctacttgatttgaaaacacacccaagcaataaaaagcctcttcctgca

SEQ ID NO: 496410 - DNA, 689 bp, Homo sapiens
tcagggagtctgatggagaagatggctgcctggcagtggcagccagctggccagtgtggtgccctgtctggtgccatgcccacctgtgtgtcctggatgtggatggcatgcacaagacatgtgatggactgagagaagaaggagtgacgaggatggaggaggaatgactgatggatgggcagttggcttgtgcatgccctgtggatggggccacccctctgtcctaccccagccctggccctcagcctccaggccccagctggacagccacctttgacccagtgcctacagatgcccctgacagcccccgatgtctccgtgtggatgtgaagatgcttgcacacttgggcctccagccccacatgggtgcccctcatgtgtgccccagggcctccccactcagagcctggccagccctccatgccctgtgactgccctgcaatgctcagtgtctcatgtgacccctaggaccccccctacatgcacctcatgtgaaatgccacatgaatggcagccaaatgtcactggaggccctcagccccttgccatggccttggtaaagcatcggggaccttcaggccaccttccacgggatccagttctgccccagctcctcggacagtgcaccagagaccctctagctctgtcccagctccggggcccacagacgcacacagaacacagaatgg

SEQ ID NO: 496411 - DNA, 200 bp, Homo sapiens
tgtgagtgatcaccaggatcccgtaagactatccagcagcgcgctgaaaaggtaaaccatgatgagtgacctgcgcgaagtccgggtcactcgagcaggacgctgacgtcgtcatcctgatatgcacctgatgaggacgtttacgacaaagagtccccgcgcgccggcacggccgaatatcatcgtcgccaagcaccgca

SEQ ID NO: 496412 - DNA, 412 bp, Homo sapiens
tttgcacgctagaagtagaggatcgcttaggcctgggaaggcgaggttgcagtgtagccaagatgcactgtactctagcctgggcgacagagccagaccttgtctcaaaacaacaacaaaagccccaagaacccacatgcataaagtccttatatacctagcaccattctcagtgcattacacatattggctcattcaatcctcccaggactctctatcaccaaggttcctttatcagaccacaggttacacatatcggaacctgaggtacaaagaggttaagaaatagtagctaggctgggcataatggctcacacctctaatcccagcactttgggaagcccaagcaggaggaatacatgaggcccggagttcaaaaccagcctgggaaacaggcagaacccatctcagc

SEQ ID NO: 496413 - DNA, 100 bp, Homo sapiens
agggttccctggcccccagtagtcaagaaccccccagatcccctctctcccgactctcctcgcacagtaaaatacggccgtgtcctcagatctcaggctg

SEQ ID NO: 496414 - DNA, 812 bp, Homo sapiens
  misc_feature (4)..(4): n is a, c, g, or t
  misc_feature (15)..(15): n is a, c, g, or t
  misc_feature (20)..(20): n is a, c, g, or t
  misc_feature (36)..(36): n is a, c, g, or t
  misc_feature (39)..(39): n is a, c, g, or t
  misc_feature (76)..(76): n is a, c, g, or t
  misc_feature (107)..(107): n is a, c, g, or t
  misc_feature (116)..(116): n is a, c, g, or t
  misc_feature (120)..(120): n is a, c, g, or t
  misc_feature (149)..(149): n is a, c, g, or t
  misc_feature (167)..(167): n is a, c, g, or t
  misc_feature (171)..(171): n is a, c, g, or t
  misc_feature (185)..(185): n is a, c, g, or t
  misc_feature (200)..(200): n is a, c, g, or t
  misc_feature (228)..(228): n is a, c, g, or t
  misc_feature (243)..(243): n is a, c, g, or t
  misc_feature (255)..(255): n is a, c, g, or t
  misc_feature (263)..(263): n is a, c, g, or t
  misc_feature (278)..(278): n is a, c, g, or t
  misc_feature (284)..(284): n is a, c, g, or t
  misc_feature (305)..(305): n is a, c, g, or t
  misc_feature (308)..(308): n is a, c, g, or t
  misc_feature (311)..(311): n is a, c, g, or t
  misc_feature (314)..(314): n is a, c, g, or t
  misc_feature (338)..(338): n is a, c, g, or t
  misc_feature (345)..(345): n is a, c, g, or t
  misc_feature (367)..(367): n is a, c, g, or t
  misc_feature (369)..(369): n is a, c, g, or t
  misc_feature (374)..(374): n is a, c, g, or t
  misc_feature (407)..(407): n is a, c, g, or t
  misc_feature (411)..(411): n is a, c, g, or t
  misc_feature (447)..(447): n is a, c, g, or t
  misc_feature (458)..(458): n is a, c, g, or t
  misc_feature (501)..(501): n is a, c, g, or t
  misc_feature (503)..(503): n is a, c, g, or t
  misc_feature (512)..(512): n is a, c, g, or t
  misc_feature (515)..(515): n is a, c, g, or t
  misc_feature (595)..(595): n is a, c, g, or t
  misc_feature (635)..(635): n is a, c, g, or t
  misc_feature (660)..(660): n is a, c, g, or t
  misc_feature (665)..(665): n is a, c, g, or t
  misc_feature (673)..(673): n is a, c, g, or t
  misc_feature (710)..(710): n is a, c, g, or t
  misc_feature (747)..(747): n is a, c, g, or t
  misc_feature (807)..(807): n is a, c, g, or t
taangctcccaaaangtaangtttattgcaactgancanaaaaaggctgtgcggaccttcctcaatcccgtccaanccccagcccctccccaagcccccgctgcaantacgccggnaggnccgcagagtgttgcttgaaagcgcgtggnggtgcccggagttttaanaaancgccagtttctggngccttcagtaatggnaggggactccagagggcacgcccgcctnttgaagccctaagtncggcttggaggnagcggaanctccggagaggtcanaggtanagcgaggacactgttggaggnggnggngcnggtctggagggtaccaataggggngggattncagcccctgggccgggcaggtnanccgangggcaccggccctgggggtcggcagggagtggntttnttgggggtggggggttggctggcccctgaaaattantgccttgtgcnaacagggccctctgcggaggtcctggccgttcaaagggaacanantgggctgcnctntaatggcaggtgggttccttgaactggaagaattgctggtgcaggcgggcacggtaccagttgctggcaccaagcatcancaggaccaataagaccaggaggctgaggagcagccctgtngtcagggagctggttgctttgagcngagtngtgcagtnagggggtgcccagccctcctcacagtagcagttcctnttgctgttacagaccccatgtccatggcatttgcttngacatttctgtgcccccaggagatccacacgctggcatcgatggtctatacacaccaggncaggg

SEQ ID NO: 496415 - DNA, 181 bp, Homo sapiens
tttttttttaaggggctgaaaaaaaaagaaggttatggatgtccccagtttttatgaaaccggttttgtaaaaaaaattttggaggttaaggattgtcaaacaggggtccaaacccccgcccaaggccccccggtgggtttaaaaaccctttaccttttgttaaaggcccttttttgggga

SEQ ID NO: 496416 - DNA, 111 bp, Homo sapiens
tcttctccccgtacatctgggaatacaacaaatatgcctacatttaccactgtcatatgccatactattggaacatactagcgagagtcatcagtaagagagaaccgaaat

SEQ ID NO: 496417 - DNA, 237 bp, Homo sapiens
tgcgcaaaactgagccgcgcgcgcattacgcattcggggaaaaagaaaagccgcccgcggggcgcttacctatttgccggtcagggcggcgtgcgtcactcgatcgacgcgtacacagcctcgccgagcgggaacgaatcgctgcgcgcaatcggccaccacttgtcgtacagcgtaaagccgcaggtgtttgccgtcgagcagcgcgccgggcttcaggtacttcagcaactgcga

SEQ ID NO: 496418 - DNA, 1394 bp, Homo sapiens
agcataacccacaaatgatcattggacatcgacatatacctaaattattcagtgcgcatcgagctgtgagttcctagtgactaccatgcgccgtaatgccctctcgttattactgcatgcctcagtacgcctggggctcacgccccagggcagagccgtgtcctggcggtaaacagatcctatgactcgtacaacggtatactcagtgacagtccctagtagcacttgagtcacaatagatgcttgcttccatagtaaagtacccatacagtaatctggagggcttgtaggcaacttgactagttccccttacataagcgcgtgcccgcctgatcatggcgtatccccgattcaatacgatgtaagctgctagattctgatctccgttcctcgtccctaactcccgtgcgtgcggcggtcatgcctagtaaggtggcaggggcccgtgtaggcagagtagacagggtttagaaacagggtacgtagccgcttcaccctttacgcccacggggaagcatagcatccctcgaaccacatggggaagacgcctcgcgtgagaacgcataacgcatcgttgcgtcgctttaccacctcgtacgccacgggtggtcgtcccgtccatactctatgtagggggagccactcaaagtttatctaagttcaacaacactagacgtataactctaaaggtatgttagaaatacacagccgctgtggtcccaattaaacctcatagtataacatatatggccctcacttccttttcggaggtcgatggatttcgcggggtccctaaaatttcacaagaacatattcaccgtaacctttgcactcgcgcgtattcgtcggttcgctcgagtcttccggtaagccttgggcatgggacctatttgaccttaattaacatagcattagatcgaatgaaacccgttggaagcacctccaaatggaacacaacgcgttttgcattttctggaccccccggcgcgggggaggggaaagggaaggagagccccccaaattttccgtgaataaaccggaaaccaacgactgatattgctttggagtggtttcacccggggtccacccccccctgaaaagggtttaataacattccttttattcgctaacccagggggcgtttccgcgaagttactcttcccccaataattggctctaccgttgaagctaacttcgcggggaaagatcactataggaacgcccttgtgtggggcataaccaataacggggaatggcgaccctggagcgccatcactggaataagtcacaattggggagccatcccattaaggggggttaagcacgaccggttggattgaaacgcccacagtggcgttgatataatttctaaccatgtgatgagacacattatg

SEQ ID NO: 496419 - DNA, 431 bp, Homo sapiens
tcccaggccaggatggttggccctgatcccaaacctctgggggcaggtggaaattggctgtggtgagccatttcttcatgtcccttcagctgtgaggccttcctggccctagctcagatcatcatctcctcctttgcttttaccccaggagtgaggctgggttaaaggtggctttttattccgtagcagataaattcccttctccctgtcctgtccatcctgcctttacccatcaagcacccgttccttctgaaccaaatctctttactttgttggggaaaaaaagtattttgttttttaatttatttttttatttcaatgccattttatatgtttatctctgcgcttttgtgtgagccttcaaatgtgcatgtgttgggggtttttccctttctggtatttattaataaaaaaatctttcttttgggggg

SEQ ID NO: 496420 - DNA, 891 bp, Homo sapiens
  misc_feature (1)..(1): n is a, c, g, or t
  misc_feature (12)..(12): n is a, c, g, or t
  misc_feature (16)..(16): n is a, c, g, or t
  misc_feature (28)..(28): n is a, c, g, or t
  misc_feature (30)..(30): n is a, c, g, or t
  misc_feature (59)..(59): n is a, c, g, or t
  misc_feature (75)..(75): n is a, c, g, or t
  misc_feature (682)..(682): n is a, c, g, or t
  misc_feature (772)..(772): n is a, c, g, or t
  misc_feature (775)..(775): n is a, c, g, or t
ntgtcgattttncttncctgtgttaagnanagaagcttgctattacttcaagttttttngaagaaacacctgggnaaattcatcgcaaaaagacatcacctaggcacatcgtcgtcaggttatccaaagttaagatgaaggaaagaatcttaagagctgtgagacagaagcaccacgtaacctataaaggaaaacctatcatattaacagcagatttctcagcagaaaccctacatgccagaagggattggagccctatcttcagcctccgtaaacaaaacaattatcagccaagaattttgtatccagcaaaactaaacctcatatatggtgcttagctatttattttgttatctattgttgttgctcaaactgttcaagctttggccattgggagctctttcacattggctcttgtgtacttttggcatgccctcatccactttgtttggagcacttcctctttctggcaccacaggatgctccaggctcatcttgtgttttcttctctgcattggccctagacttagtcatttctcctaggagccctggttcttttttttttttttttttttgatgaatggccttagaaaccaagatcttgggatggggtgtgctcattgctactgtgatgacactgcttctacacattctaaatgaacagaactaggaaatattggtnatgtgtactaccacatgtatatacatatccataaattatggttcctatatgcatatatattaaactaaacatttagttcactgacattanaanatgtatgaggagtattgggatggaaaaaattaaaatcatgcctttatcttcccaatcttctataattggtttaatttataacaaaaacaaatgttctttttataaaacgaaataaa

SEQ ID NO: 496421 - DNA, 796 bp, Homo sapiens
  misc_feature (303)..(303): n is a, c, g, or t
gtgataggcgcaggtggtagcgacgggggctaagcaagctcgggaatgggtgaaagaatcagcatgattcttcagagagctctctcaggattctccgtcatgtcatccggtcagccgtctccacctccgatttgccggaggaacactccgtctgttcacaggaagaggcgacttatgaatataggatagcgtttgaatccgtgaatagcccatgatagactcgtatccgctggtagcaaatgaatccaagatgacatgacacacattcttatagtcgcatgagagcgatcgtgcgcagtgacncatgttcgtaggtgcttcaggtatcgaggagttagtcccagcgaacgtaggcttggcgtagtacgggaattgacttgccaacgtcatcaaggcacaaatgtataggtagatgtcaggaccatgatagtatcagtgggtccacgaccatttcgacaagttaggaacgaatgcccaaaatatgcgaaaggatcgagtcggataggaactcccgaggacgctgcaagcaacactaacaggatcaaaacatgcgaagtcgtggctcacaatttgctcagcggactctagtccgttacaacctagctaagagacgtcttcaggactaagacatgctattctcactaaatctgtcaagagtgcttctttgtaattcctgagttccagcactaacaactccatttcgcgtgactcgtttgcccaatacaactcgtatgatacctcatacccctacaggtagggtgcgagctttggtgagcgcgcccagcacgcgagctca

SEQ ID NO: 496422 - DNA, 358 bp, Homo sapiens
ctgagccttcctgctgcacttgtacagtacttgcctggatgctgacactgaggttggagaaagttactgctgtgcatgtactgttgtctgttgagcaggtgtgtgagatgttgctaccatagacaactgctgcatcttagatgaaagatgctgtatgtattgaccaactacctgtggcattggacatttcctgtctacttatcaaaccaaagtagacaaggatctacagtctttggatgacatcttacatcaagtacgaaaacataacatcataagtcaaacagctgatgcaatccaactgacttataatactgatgaatcatctgaacctatgattgacgctgatactttggttcgg

SEQ ID NO: 496423 - DNA, 125 bp, Homo sapiens
gcacttaatgctagtgtggttcatgtgtctgagataaacatacctagtgacaccccatgtttcttgtgttatccttagatactgatgagtgtggagagattccagtcacagagagacgtgcttgt

SEQ ID NO: 496424 - DNA, 1129 bp, Homo sapiens
  misc_feature (20)..(20): n is a, c, g, or t
  misc_feature (285)..(285): n is a, c, g, or t
  misc_feature (293)..(293): n is a, c, g, or t
  misc_feature (300)..(300): n is a, c, g, or t
  misc_feature (716)..(716): n is a, c, g, or t
  misc_feature (842)..(842): n is a, c, g, or t
  misc_feature (848)..(848): n is a, c, g, or t
  misc_feature (860)..(862): n is a, c, g, or t
  misc_feature (867)..(868): n is a, c, g, or t
  misc_feature (873)..(873): n is a, c, g, or t
  misc_feature (886)..(886): n is a, c, g, or t
  misc_feature (893)..(893): n is a, c, g, or t
  misc_feature (902)..(902): n is a, c, g, or t
  misc_feature (911)..(911): n is a, c, g, or t
  misc_feature (914)..(915): n is a, c, g, or t
  misc_feature (920)..(920): n is a, c, g, or t
  misc_feature (925)..(926): n is a, c, g, or t
  misc_feature (931)..(931): n is a, c, g, or t
ggccccctgcccctcgccgnccgccgcctgcctgggccgggccgaggatgcggcgcagcgcctcggcggccaggcttgctcccctccggcacgcctgctaacttcccccgctacgtccccgttctgcccgccgggccgccccgtctccccgcgccctccgggtcgggtcctccaggagcgccaggcgctgccgccgtgtgccctccgccgctcgcccgcgcgcccgcgctccccgcctgcgcccagcgccccgcgcccgcgcccatgtcctcgggcggtcatgcntgcccctnctgcctncgtggccgcccttgcttgcttggcctgcctgggcccgggccgagcctgggcgacgaagccatccactgcccgccctgctccgaggagaagctggcgcgctgccgcccccccgtgggctgcgaggagctggtgcgagagccgggctgcggctgttgcgccacttgcgccctgggcttggggatgccctgcggggtgtacaccccccgttgcggctcgggcctgcgctgctacccgccccgaggggttggagaagcccctgcacacactgatgcacgggcaaggcgtgtgcaatggagctggcggagatcgaggccatccaggaaagccttgcagccctctgacagggacgagggtgaccaccccaaaaaaagcttcagcccctgtagcgcccatgaccgcaggtgcctgcaggaagncacttcgccaaaaattcgagaccggagcaccagtgggggcaagatgaaggtcaatgggggcgccccgggaggatgccggcctgtgccccagggctcctgccagaagcgagctgcaccgggcgctgnagcgcntggccgcttcannnagagnncgaanccacgaggacctnctaattnatcccgatncccaattgnganncgaanggaannttcancccaagcaagtgtcacccacgcttctggtattgggcagcgtggccatgtgcctggtgttttggaccggacaaacgggggcttaacgccttccggggggcctggagcccaaggggggacccggctggccaccaggtggtctacgggtttcaggatggggcctgccaccaggcagggaccccggtccgcgggaaccgtgc

SEQ ID NO: 496425 - DNA, 431 bp, Homo sapiens
tagaacatctgcagagatggacgatgtatcttgctaccctgcgacattttgatgcttgctgaagtggatcagatgtagagattaggtatcgctgaacaagttgaagatattatacatgaatcctacaaaactgattctgaagacaatcctcagactttagcttattactgcaactcggccacaggtgggttaatacaaagttggcaaaaaatacatgaacatcccatgatatgaacaggttgacctatgtggaaaaatgactcaaaaggctgcaactactgtggaacatttggccatccagtgtcattggcctcagaggccagcgagttatcggagatgtccttcaagtctacaggggggtctgaagggagggctattatttgctgtgagaccaagacgaatgtaacttaaatggccatgaatccacacat

SEQ ID NO: 496426 - DNA, 1135 bp, Homo sapiens
  misc_feature (20)..(20): n is a, c, g, or t
  misc_feature (251)..(251): n is a, c, g, or t
  misc_feature (271)..(271): n is a, c, g, or t
  misc_feature (280)..(280): n is a, c, g, or t
  misc_feature (284)..(284): n is a, c, g, or t
  misc_feature (287)..(287): n is a, c, g, or t
  misc_feature (290)..(290): n is a, c, g, or t
  misc_feature (294)..(294): n is a, c, g, or t
  misc_feature (296)..(296): n is a, c, g, or t
  misc_feature (299)..(299): n is a, c, g, or t
  misc_feature (301)..(301): n is a, c, g, or t
  misc_feature (312)..(312): n is a, c, g, or t
  misc_feature (318)..(319): n is a, c, g, or t
  misc_feature (722)..(722): n is a, c, g, or t
  misc_feature (848)..(848): n is a, c, g, or t
  misc_feature (854)..(854): n is a, c, g, or t
  misc_feature (866)..(868): n is a, c, g, or t
  misc_feature (873)..(874): n is a, c, g, or t
  misc_feature (879)..(879): n is a, c, g, or t
  misc_feature (892)..(892): n is a, c, g, or t
  misc_feature (899)..(899): n is a, c, g, or t
  misc_feature (908)..(908): n is a, c, g, or t
  misc_feature (917)..(917): n is a, c, g, or t
  misc_feature (920)..(921): n is a, c, g, or t
  misc_feature (926)..(926): n is a, c, g, or t
  misc_feature (931)..(932): n is a, c, g, or t
  misc_feature (937)..(937): n is a, c, g, or t
ggccccctgcccctcgccgnccgccgcctgcctgggccgggccgaggatgcggcgcagcgcctcggcggccaggcttgctcccctccggcacgcctgctaacttcccccgctacgtccccgttctgcccgccgggccgccccgtctccccgcgccctccgggtcgggtcctccaggagcgccaggcgctgccgccgtgtgccctccgccgctcgcccgcgcgcccgcgctccccgcctgcgcccagcgggngggggcgcgggggggggagncggtcgggnggtnatnttntttntnttntnttttcttgtgnttgttnntgctgcttggcctgcctgggcccgggccgagcctgggcgacgaagccatccactgcccgccctgctccgaggagaagctggcgcgctgccgcccccccgtgggctgcgaggagctggtgcgagagccgggctgcggctgttgcgccacttgcgccctgggcttggggatgccctgcggggtgtacaccccccgttgcggctcgggcctgcgctgctacccgccccgaggggttggagaagcccctgcacacactgatgcacgggcaaggcgtgtgcaatggagctggcggagatcgaggccatccaggaaagccttgcagccctctgacagggacgagggtgaccaccccaaaaaaagcttcagcccctgtagcgcccatgaccgcaggtgcctgcaggaagncacttcgccaaaaattcgagaccggagcaccagtgggggcaagatgaaggtcaatgggggcgccccgggaggatgccggcctgtgccccagggctcctgccagaagcgagctgcaccgggcgctgnagcgcntggccgcttcannnagagnncgaanccacgaggacctnctaattnatcccgatncccaattgnganncgaanggaannttcancccaagcaagtgtcacccacgcttctggtattgggcagcgtggccatgtgcctggtgttttggaccggacaaacgggggcttaacgccttccggggggcctggagcccaaggggggacccggctggccaccaggtggtctacgggtttcaggatggggcctgccaccaggcagggaccccggtccgcgggaaccgtgc

SEQ ID NO: 496427 - DNA, 159 bp, Homo sapiens
gaacgctacatgggataaggaacgtactgggatgaggaacgtactggcgatgaggaacgtcactgggatgagcgaacgctactgggactgaggccaagaaaggctgtataactctagcgctaccaaagaagaaatctgtattcaacttctctggccctg

SEQ ID NO: 496428 - DNA, 536 bp, Homo sapiens
tggtcagtgaaatgcttcaattttaaaggaatattttcaaaacacccatataatagaacacataaaagacagccaacaaggaataaaaatttctacaaaatttttgaaagaaaatttaaattttggagaaattagtttacttaattcactacttacagaaaactataaaataaaagtaactttagattctgagaaaaaatttcagtgacctgatgaaattgaaaaattacacacgggaatttatatagccaactttttatcaacaaaagattcagaaaagtaccacggaattttaaaaatagactttaaaaaaccttcaattgcagaactaattttgtttgatttacttcaaattgaaggaactcttttaggttttgttgaaatagtaaaagaaattcgattagtaattcaatcaaagaataatgaattgacaaattctgacataaaaacagccaaagaatatcatttagaacaactaagatcgcttaaaaaaaacttcaaattaacaaatataatttataatttattgcactatg

SEQ ID NO: 496429 - DNA, 511 bp, Homo sapiens
ataaccatagaggatgtttaactattctgctttgaatacattattcatgatgtgtaaatgtattctatagccctgcatgatagcagacagcctaatgattttcaaaagtgttaagtggctctattttctcttagtaaatgtgagtgctgattgaagcaagctgttgggaggtgaaatatggctgatatccatttggtttctggagatgttctgagtggttttctggattagagcttataatactatgagaattaaatgctcttattttatatgatactaattaggtatacaagttagtcctttagttactggtgtgagtagttggctcctttgggctaatgtgactgtgggatcaataaacttagtcccaggtactgagtcctaagtgaaaggttttttagcattgattaagcataagaggattggacttcttcaaaatagccatcctttagaaaaagaatcctttcatatactttaagttatctatgaggtttttggttgtccagagtta

SEQ ID NO: 496430 - DNA, 289 bp, Homo sapiens
gcggcgcccttttttatgggtgtatagggaaatagagaaacatttctgtgtaacataaactagaaaaagtcatagatacaaagttatattgcattatagaacctataccgagttaaaaatgcaattaaaagaacctatacgagtaaagaacgcaattacaggctacatgcatataatcccagcactatcgggaggctgaggcaggagaataggtgtgaaaccaggaggagatcgcgccactgcactccagcaactctaacctgggttgacagagccagactccatctca

SEQ ID NO: 496431 - DNA, 163 bp, Homo sapiens
ccactgtgttgggacatttcctgggaattggggctctgatctggtccctgtgcgctcagccccgagttgccatcgatgcctgcacgatctgccagtgccagctgtgctgttatgcaagctgtcctttgtatgaggattaccgtcgtggcatgaacgagctagg

SEQ ID NO: 496432 - DNA, 428 bp, Homo sapiens
cctaggagtgtttccctccgcttagtatatcgcttattatatagcaagaggataacattaaacaattggaagcttcaattgtggcactgaataatctacacagggcatcttcaaggctacaattaaggatcccacctttaaaaaacttttttccaaggcaatacaagcccgattgagatcttcatggtcccactttttttgggcttttggaccattcatgttttatgccttgaaatttctttttaattgcatccttggagcttgcataagatcattttacttttcagaggtgctagttctggtgcccacaagaaaaaacatcaactcttcttttctggattctttggtttcaaagcttgcatcatacaaagcatagcgacaatcctttttcaggaagcattcccaacaaaatgcttaacgcggatcag

SEQ ID NO: 496433 - DNA, 225 bp, Homo sapiens
tgatggaacactttcgatgctggatcagaggcagagacttgagcctggaggatgtgcccggggcagagcgggactatggctgcagacgtggaggattacgacgcggagaatgacgtgcagctctccaagacgctggagctgcgcgtggcaaatctggaccccctggagctcagcgaggggaaggtgctttccgttacctcgtaaacaggcagtgcaggtcagtga

SEQ ID NO: 496434 - DNA, 120 bp, Homo sapiens
tagtaattctccccccaccactttattatatgactgcaaaagatgagaaggagataatagatacttagcgctgaatttggcatccagagttaacatttctcccctcactcccttgctggt

SEQ ID NO: 496435 - DNA, 110 bp, Homo sapiens
tggagtctgatcttatttatttgttacttaaaaaatcttatttttgactggattcatacttagaagtagaagctcgcatagaggaaagtctgcgtctctttgcaatttgt

SEQ ID NO: 496436 - DNA, 228 bp, Homo sapiens
  misc_feature (206)..(206): n is a, c, g, or t
agtacaagatcctcttctccgaaaggcacatcatctggtccaacctacaagtatcgcgcaatgacaccatccctgaggacttccaagagtttcaaacccagaaatttcgaccgcttcgataattaaaccaaggaagcaatctagtaactagctttatcggaacactaaaaaccatatatatatttaactatcaattattctttagncatttaccaacccacaatatat

SEQ ID NO: 496437 - DNA, 544 bp, Homo sapiens
  misc_feature (425)..(425): n is a, c, g, or t
atgtgggaggaacgcttgttcttacttatttacataatgtattacaatctggctgggaagattaggggaatgtcgttggagatagataactctgagctgctgcatatgttagagtcttttgagtttcttggttttaaggtggatgaagttgtagtagttctataggcttattatgttaagaaagaagttgttcagaaggtgggtgctgttgctgctgctatttcttagataaggaaaaattgatttaaaagttaaataattctttatggaatttaacttaaggtttgaagacttttagcttgtttctatggactttaatattaaggattataaattgtaaatttaataggttattttgtattaaaaggttaattatgaagtacttagaattttttaattatacgaatatgttctttgggttctgntgtggcccagacagtgttaactttttttttattgtgggttttgattttttcccccagaagttggttttatttgatgtacccaagtcttacgtttcccaataaagaaaaaaaatctccat

SEQ ID NO: 496438 - DNA, 193 bp, Homo sapiens
tgcctagatcgggcggtgatgcgagtgatgtctgctgtatccagatttggaggtggatatagatggtgagtaggagtcagacagctggcacatgggaaacttgtatataaaaatacaaaattagtcggtgtggtggtgacactgtaatccagctattgggaggtgagattggagaatggttgaacccaagagg

SEQ ID NO: 496439 - DNA, 304 bp, Homo sapiens
gccaaagtacaagaaggcggttcaggcttctcagctggggaaaagcagttgattagttttgcccgaacgattgttaaagatccaaaaattttgattttagatgaagcgaccgccaatgttggacacagagaacggaagtatttgattcaacaatcactccggaaaatgcgccagaatcggacaacaattgcgattgcgcaccgcttgttcgaccatcaaggatgctgacttaattctcgtgttagataaaggcgaagtggtcgagcgggggacgcatgatggcttactggcgcaacgccgcttt

SEQ ID NO: 496440 - DNA, 136 bp, Homo sapiens
  misc_feature (74)..(74): n is a, c, g, or t
  misc_feature (76)..(76): n is a, c, g, or t
tacatgtgaggctttaaggggcctatgttctctgtcaccactactcccatctgctggtgttacacaaaagcagncnaacaaagtatattaattaatatctatgttctattgtttataaaagctggcaagaggcttc

SEQ ID NO: 496441 - DNA, 279 bp, Homo sapiens
  misc_feature (10)..(10): n is a, c, g, or t
agacgttgantgagcaagatcatgccactatactccagctgggtgactgagcaagaccctgtctaaaacaacaacaacaacaacaacaaaaaaagcaccaaacctatcatttaagactcttttgactctttcaccttattttcatcatttataaaatatggaaagtaatagcagcttaccagagggttaccaggagaattatgtgaatgtgcatgaagcttaatgcctgatatatgataaacactaaggaaacgccatgcattgcaacacggtctctca

SEQ ID NO: 496442 - DNA, 188 bp, Homo sapiens
cagtcttctcccatcagaatacagaatgagagaggacacacacaacacgttatctgtaacagacgtttactatggtcaccactagatggcacccttgtattagtaaggagatttttctcagaaattatagggcttcgggatgacttctaataaaaatagatagtaattaatcaatagctgaaactgcg

SEQ ID NO: 496443 - DNA, 208 bp, Homo sapiens
  misc_feature (43)..(43): n is a, c, g, or t
  misc_feature (45)..(45): n is a, c, g, or t
  misc_feature (57)..(57): n is a, c, g, or t
  misc_feature (86)..(86): n is a, c, g, or t
  misc_feature (172)..(172): n is a, c, g, or t
  misc_feature (186)..(186): n is a, c, g, or t
  misc_feature (195)..(195): n is a, c, g, or t
ctaagtgtgtcacggtgcgccgtctgatgtggtcccggctgcngnttcggcaggcgnccatcagtctgtggcactcacttgcggcnatggctgcaggctcccggccgtccctgctcctggcttttgccctgctctgcctgccctggcttctagcggctggtgccgtcctaancgttccgttacccngctttttgncccgcttagctcc

SEQ ID NO: 496444 - DNA, 605 bp, Homo sapiens
  misc_feature (499)..(499): n is a, c, g, or t
ctaattttatttaaaacatttttcagagacagggtcttgctacattgcccaggctggtctctaactcctgacctcaaggtatcctcccactttggcctcccaaagtgttggtgattacaggcatgagctactgtgccagtctatcatacactattttttttttttttgagacggagtcttgctctgtcaccaggctggagtgcagtggtgcgatcttggctcactgcagcctctgcctcccaggttcaagtggtgtccctgccccagcctccggagtagctggaactacaggcgcgtgccaccgtgcccggctaattttttgtattttagtagagatggggtttcaccatgttggtcaggatggactcgatctcctgacctcatgatctgcccgcttaggcctcctgggataaagtgctgggattacaggtgtgagccaccacacccagccccatatgctattcttaacaataaaaaggttttaaaaatttgtctttgngaggctgaggtgcgtggatcacctgaggtcaggagttcgagaccagcctggccaacgtggggaaatcccgtctataccataccaacctccatacatacgccgcccg

SEQ ID NO: 496445 - DNA, 504 bp, Homo sapiens
tactcttagaaccatatctcttcaacctgcagaaggcaaaaaaggcggaagagagagaacaaaagtgatatgcagaactatagcaaaataaataacaacatggtagatataaatccttccatatcaataattatattacatataagtgaattagaaactcaatacagagcagagatagccagactgccttacaagcaggatccaactatatatggtctctaagagtcacctactagattcaaagacatagttgccagtcaaatgatggaaaaagatgacatgcaaacagtaataagaacgctagagtgactgtactaaaatcagacaaaattggctgggtgcagtggctcacacctgtaatcccagcattttgggaggctgaggcagacagatcactcgaggtcaggagttcacgaccagtctggtcaacatggtgaaacctctgtctctactacaaattagctgggtatggtggcaaatgcctgtagtcccagctacttggga

SEQ ID NO: 496446 - DNA, 959 bp, Homo sapiens
tctggcatgatggtacacacctgtagtccagctactggtggacttagatggaaaattgcttggagccgggagtcaaagttgcagtaagccaagattggcaccactacactccagcctgtgtgacaaagtgagaccctgtctcatgtttttacttaataggaaaagattacaatggcaattggattgatctgtttataaggctttagtaaaattagctttagcatttataatacactggcacaaagttagaatttggatttctcttttgaacaagatttttgtatacattaataagaaatagtaaaagatttttgtttaccttttgagtaaactgcaaaaaatattagtaataagaggagagaatttccctaatgctgtttttattatgtcttttgattgtttggaaaactgaatctcccctctgtcaaagagtaaaatttttgctttttgaaatttttgaattatcagtttggctaaatgaataactattatcttacagtgacctgtaatcttattttgatcaagtgttttaaacctttgatatttgacaaactttccaaaatcaaatgtaaaattctaacttaaatgttttcgacctcaagctaacttttgggcattaaagcccttggaagtccaaatagggcccctggaagtccaaaagaaacatattaggctaatttggtatattaaaatcatacaggaagctgatcaaataaaaaatgttgtttaattttctttgagttgtatttgtataaatctgttattaatatgcatcccaaaattgtatcatattgctaaaatgttgatagatcttgttatatgttattggtaataattgttatcctgttaaattattgtataccacagaaataatgaaatttctttgtcaattgcatctagtaatcatggctcttctaagtcttttgtcattcacagataattattgtttacttgattct

SEQ ID NO: 496447 - DNA, 378 bp, Homo sapiens
gggtgtttaagttgttgatgttagactggagttgaccttcgtttcgttttgattgttagtgtgattacgctttactatcgggggcatggtaaatataatggattcgagtattgtggacaaggatccttttaccgttaagggagagtgttagcttttcgccgatactgatatctacatagttaagcacgatttcctttcgaagttttcgctcgcccttcacgactaagtaatcctttcgaggacttctaataacggctacgtccctaatgcggagcccgacgatctctaggatgtagcgtctaagggaggattttcggacggtatccatagaccgacctagccctatccctatcgtggcctatccgacggatggcctac

SEQ ID NO: 496448 - DNA, 115 bp, Homo sapiens
tctagatcgaggcttaccgacaggccagcatgtcgcagatgtttcagtgcttatgggcatgtaactacccattcccaatgttgcattttatacagaaaaccgagcaggaccattg

SEQ ID NO: 496449 - DNA, 1099 bp, Homo sapiens
  misc_feature (1081)..(1081): n is a, c, g, or t
ccacctggcgtatcttccccggctcaacccccctgctcatccggaccctttgcccgtagtggccggattcggcgtgggcttctgggcccatcggctgggagtggtcccttcttcctgccccttattatccagacagggggcgcctgccgcccagtcgtttcgcgtgggagttgcccttccctgggccccgctggtctaactgcccttcctgtcgcctggtcgcggtgcccgggcccctggcactgtccggagcggttttctccaggtcacctgctctttgcttcctggtacctctaatgctgtataccagcgtccccacgcccctttgcgcctggagccgatgccttggttgtataccctcgtatcccctgtggtgtatggtcatccatctgttttcgtacgtcggtgttgtcaggcctctggcctaccattcgtacgctcggtctgtgcatgcgcagtatacgttctctacgtagtgtttcgggcatagccaggtgtgaccgccttgggatctctcatgcccgttggttagcctggttgagtaatccgggcggtaacggtgcttcaaccgcagcgctgcatcccaggaatagtccaccgccatgtgatcctctctgagatcaatggaagccgtctgctgcccttgccacccggatcgttgaccacgcagtctgtgatggcgctttgatcctgtgcctccttcggacactaatcctatctcctatcgttcagtgcctagagagggctacagtccctatcagccactggaaacacacattgctctcttcttccggtctactggctctgccaacactatacacgatgcgagcggcgtgagaggcccgaggaagggagtggtctgcggggctctgataccgcaaccagggtcctgtaacaggatgtatgctggactgtgcgcggacatgatggctcaacgttccacctctaactgacctggaggcgccgcatcgaggacgacgactgagggggagcgggagtgggactgagcgtccgcagaggtgaccgataaagccgtatgatgatgttcccgatttctctgttggtcaggagtcggccagtntacccggaggcagcagag

SEQ ID NO: 496450 - DNA, 104 bp, Homo sapiens
  misc_feature (5)..(5): n is a, c, g, or t
ggtantgttagatggtcatattcacctgccacaatctgctggaatcccttgatggtctccttcaggagtaccagcttccccatataacctgtgaaggacctcag

SEQ ID NO: 496451 - DNA, 240 bp, Homo sapiens
aagaaaaaaagtaaatccactttatgggggacttcagctatggacaaatttgggatcagggttctcccgtctgaacataatcttctgttacctgggagagagtggtcaggtactgccagctcagggcagccacaaacatgacgaactacaggttgatgggggagtagtggcttcgcgaaatcagctgaatgttgggaagaccctgagctcggatggtggagatgatctgcctcgaggtgc

SEQ ID NO: 496452 - DNA, 846 bp, Homo sapiens
agtgcccgcgaatgtgagcacccgcgcagtgtcagcagacgcgtggtgggctcccgacacgggcacgggttcacgcatagatgggggtaacacccagcgggtggggtgagcccacaaatggccccagggcccaaggcatctccgcgcatggagacacaaccctctgtcgaaggcggggaacatacgggagcttgtggcgcaccagcagagagaatggggcggcatcaagtccggcgggacgccgacggtcgtgcgcccagaagtgtgatgcgtcgattgcggcccggagaggcggtgtattcccccgggtgtctccgtgaaagggggggtgttccccccgacgtattatggcgagagattggggcacccaccactgttggtgagagcactggtggcgtcctccctgtggtccctaccatgctattcccagggagtacttcaagaatgtttgcgccgacaagattgagaaatccacgtggagtgcccctccctggcctcaaatcgaacttcccttttgaaatttgccaggggcggggcatctcccccctcctgcgaagttgtcgtgccagaaaatgtcccccccacaaggagaagcccataccgggccgcccctggtgccacaacgcagtaccactgggcatcaccgaatggaatgaaacaccggggctgattcgcagctgctggcggccaacacgcgggaggaatgttccatcggcgtacgctccacccccaccagggggtagaccccggtcagtcattacagggcggggccgcaaactggcgtggtggcaaaaaacacaaaacccccctgtagtcgttaataggaaaagtcttcgcacacatgac

SEQ ID NO: 496453 - DNA, 82 bp, Homo sapiens
ggcggagggaggaggcccgcagccgggaccaggaattctacatcccctaccggcccaaggactttgacagcgaaccgggccc

SEQ ID NO: 496454 - DNA, 272 bp, Homo sapiens
  misc_feature (6)..(6): n is a, c, g, or t
  misc_feature (10)..(10): n is a, c, g, or t
ctcgtncgcntcgatcagaggttccttttccagtgggtgataaaccatcaaaaagagcttcctgttgatgttacagatgttataacttcacttatcactgtttgatctccccttgcatcctaccctcggggcaggagtctgtcagctcaaagcagagataagggggccacatgtcccagggcttggcagttggagccctgaacccagacctcagtaggaagcatcagcgtgcatccattcccagtagcctctgagcaggagcaggcaaaagt

SEQ ID NO: 496455 - DNA, 298 bp, Homo sapiens
  misc_feature (21)..(21): n is a, c, g, or t
tttccccccccctttcaaaantggtggaggttaggtcaggggcctcccaaccctgcccaaagtatggggcctcaaggtttgggccgaaccttaaacctgcctggggcaacccctggaaacttttgggaactttcctcgaatgtgtggggccaaggccccccccttttttacccccatgtccttgggcctaaaggattgtccccctttttccaaggcccgcccccccagccccagcccccttgggaacagtggccggggtgggggggcctgcctggtccataaacccctgtttctccca

SEQ ID NO: 496456 - DNA, 286 bp, Homo sapiens
ccccctccccgggtaacagtaataagatttcaccacaaaaggcaggttggcattctagcttcagaacttaaaccgggccaggggcagtggctcacacccataatctttgggaggccaaggcagggaggactgcttgagcccaggagttcgagacaggtttgggcaacagagtgagaccttgtctctacaaaaaaaaaatgttttatttagccagccacaggggtgggcacctacagggccagctgtttggaaggctgaggtggaagaatgctttgagccaggaagt

SEQ ID NO: 496457 - DNA, 1006 bp, Homo sapiens
gctctgagcccgcccaagcgcggtcgcacgggctctcggcgagcgatggcagcatgagaggactacgcgtctagtagcaaggaaacaggttaagaagttcttacaagagttctaccaggatgatgaagctcgtggcaagagagcaggttcaaggtatgggtaaccgagttgtgttcgagcgtggcactcatcgagggaaccacggtggcgtcgtgtgatgctggatccgtggacggacggtagccgagggatgacccctgagttggtggacgtcaatttggtgagaatgccagggcggctacgcgaagctcttggctgatgccgtacaagagctgctgcctcgagtacaaggacgagggaagtggtaaataaagatgtcctggaccgttgacagttgagcatcgggcttaatgatggagcagcaggagtcggggacccgtgggatggtccgaaggcccctagaagcagtatcctgcctgaactcatgcgcagactttgagctgtatatgcaaggccctagcaggaacaaggctcgtgtgatccgggaagtcgcgggctagactcatgtgggggaagtggtaacggtgcgtggaatcgtcactcgtgtctctgaagtcaaagccgagatggtggtgcgcagttaacacttgtgaacagtgtggggcagagaactaccagccgatccagtctccccatgtgcatgcctctgatcatggtgcccagccaggagtgcagacaaacgtcaggagggcggtgaatctgcagacgcggggttcaggattcatcaagttcccaggcatgaagatgcaagaactatgggatcagtgcctgggggaaatacccttgtagtactcacgggctggacaaggagagaacacaggattgcagcctgaaacagcgtagcgtaacggaatatactggccaacctgagcagggtcagaagggcacaggtgacccaaacgcacggagcactggtgaaaaatacgggaggaaacactggggaacc

SEQ ID NO: 496458 - DNA, 265 bp, Homo sapiens
gtctagctgggcgacagagcgagactccgtctcataaaaaaaaaaaattacgtaggatatgggctggcatgcaccttgtagtcgcatctactcgggaggctgaggtggggaaaatcacccgagcccaggaaatccaggctgcagtgagctgtgatggtgccaccgcagcccagctggggcaacagagcaagactcgggcttaaaaaataagttatcacaggcggggcgcggtgggtcacaccgtgttaatcccagccactagtgg

SEQ ID NO: 496459 - DNA, 430 bp, Homo sapiens
  misc_feature (404)..(404): n is a, c, g, or t
aactggaagaatttatataataagcacttcagacaatactttaaaacaaaatagtttccttcataatgaataataattcaaactacttctccatttataatttaatgttgatacaatgatctacagtgacatgagaggaagatcattttcagttagtgtctgagagcaagttggcaaatatggaacctacctctgagctgacacttttaagactaaaaagggaccagtcatgacagcttacatgtgtaatcccagcaatttggggaggctgaggcagggagggactgattgtgcccatgagtttgaggaccaacctggggccaacattggcaaggaccccatcttcttaccaaaaattttttttaaacttaggctggggcatgggtgggccacacacctggcantccccagtgccttcagggggatttgg

SEQ ID NO: 496460 - DNA, 147 bp, Homo sapiens
tgagggtatacctgacgctcatgcgtacaacagggttgtatcatgcctggaagtgaccgggaggctctgaccatttagccaccaaatgtaggtgtagttctcactcttaggttcactggcgaggctaggacactggcgaggctagga

SEQ ID NO: 496461 - DNA, 484 bp, Homo sapiens
ggttagagtaggaattgtgttcttatacgtgtttccttggatatattatgagatgacttagatgtggacacaatcatgcctcaggattctggatgagtaagtgaggagggattggtcaccgtccatcactgggtgacgcgacccagctccccgctctgtgtctaggccgtctcacctgcccctccccggctccacatctgtctgtagcctgctgactccacagatctgtcccccgccctcccacctggggagtttgcccctggcggtctttacgtggctattcattaagcagctgagattcatttggtctaaaatggggctccggctgtcttatcccaccagaaatctcttcctttcctgtctcagtagattcccaccaccactcccatctcccaagcccaaaactggctgtcatcctcacttcctcctgcaccgtcccccaagggtccctctgatttaagtatgtctggattccgtactcacc

SEQ ID NO: 496462 - DNA, 227 bp, Homo sapiens
agaaggcagctatattattaaaactggaaagtaaaccgagataatagatgagaaaagaaaatgatgacttccctgtatattaaccagatgaaaatttgagccattatacccataaatttcattttgggaaataatttccctaatttttttatactttaagttttagggtactactgccccatgtagcaggttagttacattattacggggggtaccgagctctcatt

SEQ ID NO: 496463 - DNA, 515 bp, Homo sapiens
agagttggctggtccactgagcatgtactgcaaagggggtattggggttattttctggtaggaatagcatgtcactaaagcaggccttttgatattaaattttttaaaaagcaaaattataggagtttagattttaatccaatttgtaggggttctaggtaatttttacagaattgcttgtttgcttcaactgtctcctacctctgctcttggaggagatggggacagggctggagtccaaacccttgtaattttgtatcttgatgtctttgttaaggctgctgaagaattatttttttttttttataataaggaataaaccccccctttattccttcctttcatctacccttttttggttcttggtgttggctggggcaggcccgctgtggtttttttttgccctgacaactttttattgccctgttcagtatgttcaaagtccaataactcctccttgttaaccaactgtggtactgccccaagccgccctttttaatcagccttacctaaga

SEQ ID NO: 496464 - DNA, 240 bp, Homo sapiens
cccgggcccccccccccccccccccggggggtattttttattttgtccaaaccgttccccaaaaaccaccgtccggtttttttggatggggaaaaagggaccccctttttttttcctaaacccttttgggggagatttacccccggggggtttttccccaacggggttttttttattttccaacccccgggatttccaattaaaaaaggtcccccaaaatttaaatttttttttttttta

SEQ ID NO: 496465 - DNA, 627 bp, Homo sapiens
gtgcggcacagcacgaggcagaccagcatcccggccgcaaaaatggggcactacctccccggagccaaggtacagcgatagctccgctcgtggggccccccgcggatcattgtgcgggcaccatacctgttggccagaacactgaagagcgggcagttaattatcccggaaagaacacctggggaaaatcatgcggcccccgcacagatgaggatgtataaaattgggatctccggacgacgagacgaccctggtaatgaaactttgcgccccacgcatccagaagagaatctttgactagtacgtgttatctcgtattcatttcggcaaatactttgtgcctccgcggattttgtttatgatgagcaaaataggtgccgccaaaggggaagagcttgggtccgccacaaggtggcatactctgagaagggaggactcttctcgacaagcatctgtgcgatccttgatagaccgcgtggatccctggactgatttaccgcaagagaggggcaccggctctcttggtaacaaggacagccgcgaagcaagcaagtatttctattccatttcaagcccccgtctttttcttggcagaaaccagaaaaaaaatacgttcccccatgacga

SEQ ID NO: 496466 - DNA, 281 bp, Homo sapiens
gacagatatgggatgctggaggacatctgggggccacaaatgctccttctcctggagacgcaactcaagttctcatggagttttcattgtctcgtgcaatgccatcgaccttgaatttcagcataggacccatatgaagtgccgctgttaatgctgggagcactccaggaagcagagaaaagttatgacatttcaagaaaaatctgaattgcttgatatgttccacagattgaggtctgtacctatggttgcccactatttcaatagtcagtgtaagcggc

SEQ ID NO: 496467 - DNA, 124 bp, Homo sapiens
agtggtcatccacccagtctcaaagtggtgaaggacgcagtgttgactacagttatctgcaaccaggtcaagatgctatgcccaatatgctcagtattcacaggattatcagcagttttatcaa

SEQ ID NO: 496468 - DNA, 940 bp, Homo sapiens
gggggtgggaaaggtggcgtcgctctaggtggagtcttcaaggcatagcactatgtcaagagactcaggtgtatcccttccttcatatgagggagatcaggggtcaaagttcattcgatgagctaaagaggccccattggtgcccgttgtaatagcgggtgtcgcagcaattgtggcatatgggatcatatagacggtgacagtatcagcgggaaggagtattagaatgtccttttattggatcacagatgcgtgtggatgcccaaggcgtagtggtgaggagcaaggaatggttggtatgggctattgcgcatgtgtcgggaattcgtgggtaagaacctaaagagcttgagaaggaagagatggtgtaagttgggtcttgtaggcggaggctgggtctgagttagatgtccttgttattaatatggttactattatcgtcggagaatatatagtatgtagggtagtgggatgcagagtgggtaagcatgggggttggagaatattgagtatgcatctgttggcagggcttgagtgggcttggtggccgaagggagtagtgactaattaagtaactacgtcatggatgcaagtcagtttaatttaaacatggtccagcttcaaggcacttggatggtgtttgaagtgtcagcttcgtaatgtgcaagatggacttaggtgtaaagtaggtgcagggtcatctgaggtaggcccgaggctgcgaggtcaattgcgggtgaatagaggcccatggccaataatcagaaagcttgcggtttggaatgctggcgtgtaaactggccaaagggggggatatcggaagtccaaggcattttgtggttacgacaatgaagaggtatataacaacggcgaaagggggtgggaatatggggaaaaatagagaaagagaagtttaaaactgtcctgatgcttgattgtt

SEQ ID NO: 496469 - DNA, 90 bp, Homo sapiens
ggatgatgattttttttgtgataacagtattgtgctttttgtggggaaagtgaggttttttttttatatacatatatacctgatatcttt

SEQ ID NO: 496470 - DNA, 124 bp, Homo sapiens
gtactctacggagcttaatgctactccacaaacagtgtatagacaggttggaatgtgtgcaatatgtatgtgtgtgagtatgtatatagtataggtgtataaaggtgtgtgtgtgtatgtatgt

SEQ ID NO: 496471 - DNA, 101 bp, Homo sapiens
taaatggtaggcgtcagtgttcctctccgagcactcgcatgtcgcctgcctcttccatgtgaaatggtggcgtccacggggtcctcctcagcactcgcatg

SEQ ID NO: 496472 - DNA, 133 bp, Homo sapiens
tcagactcctcttatctgcacaggtttattccttacatctctaaaacagcatgtaaatatttactcgagcgtcccctttacttcagttagcatccccaccctcatttgtaagctgtgccctctatcgtataaa

SEQ ID NO: 496473 - DNA, 287 bp, Homo sapiens
cggcaagaggccccaaatgggtttattccttttgttcccgcataccgtatatttaggaatattcttatcatccaaatccaaaacctaggcatcatcttaaaaattcccacatcccactcctacatttctaatcaatcactagttttgcaaattctctctcctcgttagctgttaagtccatctcctcactaccattgccactatgacttaaaattcatctctgcactgggtatggggaaatagctgtcaattgtcacaatctataagaaaaaaaacatttgcggccg

SEQ ID NO: 496474 - DNA, 126 bp, Homo sapiens
caggggcccccttccccggccaaaacgggcagggttgccccttaccttaaactcccgattggggcccccctcccgggcagctcccggccttgccggcccaataagggctttcaaagtgttccctta

SEQ ID NO: 496475 - DNA, 124 bp, Homo sapiens
ctgatcaacatcgaggtcgtacacctattgttgatatatagataggattgcgctgtatccactagggtcactgttccgttggtcaagttattggatcaattgagtatagtagttcgctttgact

SEQ ID NO: 496476 - DNA, 321 bp, Homo sapiens
ctgaatgagggaaaattatggaaaaaaaacagaacggttaaagtgggagataccttgggtcttttccttggagaggataaaaaagcaggaacaaagacagttattcggattttcttgaaaaaagtgtttgaaaagaagactgaaagtgaaaaatacagagtggtggttcggcggtggaaaagtttaaagttgcctaaaaaaagaatgtttaaataaatggattgctttttagccataaagctgctttttagtggtaaaggaaggggtcccctgaaaaataggacctttttattaaaataaagttctcttagcggttgtgga

SEQ ID NO: 496477 - DNA, 135 bp, Homo sapiens
tacccgatagtgagtagaattagaattgtgaagatgataagtgtagagagaaggttaatgtttgatattgttatggtggcgtcttctaattagatgcataattaggtagtctgcaatcgagcgtggaatggtagg

SEQ ID NO: 496478 - DNA, 500 bp, Homo sapiens
  misc_feature (35)..(35): n is a, c, g, or t
  misc_feature (48)..(48): n is a, c, g, or t
  misc_feature (65)..(65): n is a, c, g, or t
  misc_feature (109)..(109): n is a, c, g, or t
  misc_feature (117)..(117): n is a, c, g, or t
  misc_feature (165)..(165): n is a, c, g, or t
aggaccccctggatccacagttgcccccctcaaanaaaaccccccccnggtataacctggggacncctgaacctgaagcccccctagtcccctggaaccccccccttcnccccccantgtgccaccataccagggcctaatagggtaataaaatattcctgtggnccccccattccagataacccccacagtaaagtgaaatacctgcaataaagcaaagtcaccccagaattttttaaatttccccccagtgccatataaaagttatgtttaacacctatactgtagcctattaagtgtgcaatagtattatgttttttaaaagcccaatgtacataccttaatttaaaaattctttattgtgaaaagatgctaacgatcatctgagccttcagcgagtcgtaatctttttgctggtagagggtcctgccttgatgttgatggctgctgactgctcaaggtggtggctactaaaggttggagtgactgtggcaatttct

SEQ ID NO: 496479 - DNA, 258 bp, Homo sapiens
ccggcatctttactaatgaccggcgtctttactgatgaccggcatttttactaactggccggcatctttactgaatgccggcatctttacctacatgacggcatctttactactgtccggcatctttactaatacacccggcatctttactaatgacccggcatctttacataatgagcggcatctttacctacttgggcggcatctttactcatgacccggcatctttactagtagaaccggcatctttaactaatg

SEQ ID NO: 496480 - DNA, 455 bp, Homo sapiens
gaaatgtcatgtaaataaatgtacagcttaaagataggtgttgtaatacaagatggaatgtcttggcaaagacttattgatgggaccagtggaaagcttcagtaaaccaattacatcactgtgcttcaattttaaattatagccaacaagaaatctaatattaaaaacaggagtggccgagtgccgtgtcacgcctataatcccagcactttggaaggctgaggcgggtggatcacctgaggtcaggagttcaagaccagcctggaccaacatggcaaaaccccatctccacaaaaaatacaaaaatttgctgagtgcactgtcaggcacctgtactcccagctactcaggaggctgaggcaggagaatcacttgaacctgagaggcagaggttgcagtgagccgggagcacaccactgcactccagcctgggtgacagagtgagaccccatctc

SEQ ID NO: 496481 - DNA, 179 bp, Homo sapiens
gggggcaaccctctgtggcttgtctcacaccgaccgagtcacagcaggatcccatgcgcgcaggcaccgggtcagatgtcacatgtgctctggctggttgtcaatctctgcacgcatccatcataagccctctgaactcctgctgacatcggccctttgaacatcctctaacccctggg

SEQ ID NO: 496482 - DNA, 144 bp, Homo sapiens
gaagaggcacttttgacgtcaatctctcagttgtacttggtgacctgcctcccagccctgggagaatgttttttagtattgctcagatcataccgggcagagcagtccagaacactgaaggcaccgtggctgagtacactcacg

SEQ ID NO: 496483 - DNA, 235 bp, Homo sapiens
tgtcctggttgtaaacaggatggtgagtgtaaccagcgggctgggtctcatcgctggccgctgagtgtacccggtcgtgcggtcaatgtgcgccccccgagtcctacctggccgcgtgctgtaatcatccgcctgagtcacagcgcccagccaataatcccctatcgtttagctcataccccctgtgctcctttccctcgtgcggggtacctagcacggaatgcagaaatcatgg

SEQ ID NO: 496484 - DNA, 132 bp, Homo sapiens
ctgccagtgtgcatggcatcatttgccagcacattctggctcagccgcacattccagccaccatggctggcctgttcatcagttggcatctgcagctcggtcaccaagcttggtgtcaatccatggtccatc

SEQ ID NO: 496485 - DNA, 789 bp, Homo sapiens
attcggcacgaggtaagtccaatgggatgatggagcatctgcctgggctcagagccttggctcccatgggtccctctcagctgccagctccagcctgctgccctggccccacctggccttgcctgttccaccctacacagtaactgctgctacccagcaccccaggagggcatgggtgcatgccaggtcaggacagggctcacaggcccagacatggcacccgcgttttgccccaagctgacagcacaagggcacatgcagtgggtggctgggcagggggacgagcctctccccgaccctaacccagaggcctcatgtgtcccagttcaaaggttgcagtccccatggggattgtcttctctcccgtgtcggttgggcccatgagacacagagatacctggctcaacctcactcaccccagccagggcatcacacgcccatcctgggctggcagaggtggggagctccttgcacatgctaaattgcagggcgagcctccagatacccgtgggatcctacactcaccgcatgagtattccagtgcccagcaagcatgacattaagtagcaaattaaaatgccttgaccaattgacagaccatagaagaaaggaggaacctttgtattttgagcgcctaggatggcacttttatcttgctctttgaacaaggggctctcatttgcattttgcactgcaaatgatgtggcaggtcctggctccaggaatggggaagctgatcattgcccttatttggcatcaggaaaggcctatcttataagttaaaaaaaa

SEQ ID NO: 496486 - DNA, 968 bp, Homo sapiens
ggaatgtgttgccatccaagagtgtggtcccagagatcccctttgtgcacgtgatggagcagggggagagtggatgattcagaactccgtgcggtacctggctagcaacagataccattcctcgtgaagagagtctcacaccatagctgggacaatatgaaatcctagtaagagatggagatgggcctagagcaagaagaaccatatgcggtgataaatagggacagggacgggatgttcgaagaagtggagggatgggagcgcgtccattcacacgctagtgcccatggagggtatgtccctggaaatcgccccatgagctcttgagacgtgggatggtcagaaatagtagtgtgtgggtatgctgcgcaagggttagggagaacgacgcagacgtgtgatatgtagagctattgaattggatgaggctaggagaggatgaaaggtgtgtgatcagggattgcatgcattgacagagggatgggttatcatggattgatgtgttgctggatgcatgaattatggtaaggcttggctaggggagtgtggagttgagacttttgagaggctaggaatattcgtcagaggaaattggctcgaggaacgcacgtagaaagggatggcgcagtattgtagggctataacgaagaaggttgggaggttgtgtgaaagggaaaactaaaatttggtcgaagtggtttgacacgatagaatatggagagatttgcccaggctttggaagggcaaccccattaacacgggggaagcaataggacgcaattacttgaagcaggagaaaccttggcattaagggggagagtcctccagacaccggtatgtacccatttagggacaccagcttgtgcccgtgcaaggggacttgcagaactaccattttatgcaaggtggaacgctgtacaaatttgtcctagagcgaaaggagaacttgcgttgtgtgacccctgagt

SEQ ID NO: 496487 - DNA, 998 bp, Homo sapiens
tgtaaatgatgctgtggtcaagcatatgcagtgattactgctataaaaagctccgatgtacagtagcatattggcagtggatgttctaggttggaactctgacacccagtgttgcttgcgaaacgatctattcactttctcttggttgacatagctatatcgactactcttctgctcacggaacttacggccactaataggccaattgtgagtactaatttgtctacgacctttaattaataatcatacgtcacacaatttgaagtcattgctcaccattcatgctcacgtatatagggcccgaagtgaacctaggattcaagttcaaagcaatggacttgataagcatgatgttcaagtcacagtgtattaaaatacattctgggcttaaaaagttaagaggtgtacgttatcggcaaaacttgtggaaagttgtgtgagcgccgttttggaaacaaaggttcactatgcatggaggcataagttggtgtaagttcaaggttgattaaccctttttattcgcaatttttaacagactttttcaccgtggaacttaagggcgttagtaggccttagcggaacaccacaaggttcccttggcagtgggggaaactacgttctgggaatacaaattggcatatgttgggccagtttgaaacacagtccctaatatagagattacaaggataatgctgggctgtgacagctaagctttaaacccagttaagctctataacgtcgaagttccggtccgttcatatgtaaatttcgccggtttgcgaaaccgtgttggtatccgggtgagatcatttcccttgcgcaacgtattatagtttgggtgcaacttggtttgtaacggctaaacctaatacccgtattcaaggcgagttgtaagtaattagccttatatcacaggcaagtattacgaggaacgttccttggagtgagcccttaattttgtacccttgtgaccagttttcgtgataaccctaagttgt

SEQ ID NO: 496488 - DNA, 256 bp, Homo sapiens
cacaactagggcagttttgcaggtggtagcatttaccaagatagttgtaggtaagaagggcagatatattagagaaattgtgaaaatatgttgcagtgggcagctcagcagagaaggggctacctgcaaagaggcaagggctggaggaaagttttatagggtcctgctgaagggtgctacgtgtggaatgaggtcattgtgcccgcaggttgtttgtgattagctgtctctaacaattgttcatacaataattgtt

SEQ ID NO: 496489 - DNA, 408 bp, Homo sapiens
  misc_feature (233)..(233): n is a, c, g, or t
  misc_feature (236)..(236): n is a, c, g, or t
  misc_feature (362)..(362): n is a, c, g, or t
  misc_feature (379)..(379): n is a, c, g, or t
ttggataatagctattcctgggctacttactttcatgtcaaagatttattttaattcaaataagggcatttctgccaagaactttattttattctccttattctaaaaacacaaatcattcatattctagaccctgctttctagttaatgcgggcatgcaagtcactgtgtctctcacaacactggcccagagctgcagggcaaaacacgtggtgggagagggaaagagacanaanaacagacattcggcattggcctttggccttccccacgaagctagatcatttcccacttgaaggaaataaggattaacctatttccaacgaaatttgtggatatatactgggatatgtttttaagtnaagttattattttttancaaccgaattttttttaaaaaatagaagg

SEQ ID NO: 496490 - DNA, 229 bp, Homo sapiens
gtggcgactgtacttacttaaaagcacatcgcttaactacactaaggagtactatgatcgtcacttacgacaaaaggtaacgatggccgaacgggtgggaattggcctggaccttgatccccagttagcggccggttatgaactcttacagggcgccatgaccgctcttgaagagcacgatgttgaccaattaatggacctcttggttcaccaaatgggacgtgccagc

SEQ ID NO: 496491 - DNA, 477 bp, Homo sapiens
  misc_feature (433)..(433): n is a, c, g, or t
  misc_feature (453)..(454): n is a, c, g, or t
ccacaccctcatcaccagccttgggcacagctccacccatcaccccagaacaccccgcagaaagtgcctgtgcatcagcattccccgtcggagccctttctagagaaaccagtgccggatatgactcagtaataagaaacctgactcagaagcaagtgctttgaagaaaaaggtcaacaagggaaaaacagaaggttctgaaaattcagacttagacaaaacacccccaccatctcctcctcctgaagaagatgaggacccaggtgttcagaagagacggtccagcagacaggtgaagagaaagcgctacactgaagacctggagttcaagatttctgatgaggaggcagatgatgcagatgctgctgggagggattccccctccaacacctcccagtcagaacagcaggaatctgttgatgcagaaggcccngtggtagaaaaaattgagcnntcgttcagtacaaagcgaagatg

SEQ ID NO: 496492 - DNA, 857 bp, Homo sapiens
  misc_feature (403)..(403): n is a, c, g, or t
  misc_feature (408)..(408): n is a, c, g, or t
  misc_feature (476)..(476): n is a, c, g, or t
  misc_feature (483)..(483): n is a, c, g, or t
  misc_feature (813)..(813): n is a, c, g, or t
  misc_feature (833)..(834): n is a, c, g, or t
ccacaccctcatcaccagccttgggcacagctccacccatcaccccagaacaccccgcagaaagtgcctgtgcatcagcattccccgtcggagccctttctagagaaaccagtgccggatatgactcaggttagtggaccgaatgctcagctagtgaagagtgatgattacctgccatcaatagaacagcagccacaacaaaagaagaagaaaaagaaaaacaaccacattgtagcagaggatcccagtaaaggttttggtaaagatgacttccctggtggggtagataaccaagaactaaataggaactcactggatgggtcccaagaagaaaaaaagaaaaagaaaaggtcaaaggcaaaaaaagacccgaaggaaccgaaagaacccaaggagaaaaaanagccnaaggaacccaagaccccgaaagcccctaagattcccaaagagccaaaggaaaagaaagcaaaaactgncacgccnaaacccaaatccagcaaaaagtcaagtaataagaaacctgactcagaagcaagtgctttgaagaaaaaggtcaacaagggaaaaacagaaggttctgaaaattcagacttagacaaaacacccccaccatctcctcctcctgaagaagatgaggacccaggtgttcagaagagacggtccagcagacaggtgaagagaaagcgctacactgaagacctggagttcaagatttctgatgaggaggcagatgatgcagatgctgctgggagggattccccctccaacacctcccagtcagaacagcaggaatctgttgatgcagaaggcccngtggtagaaaaaattgagcnntcgttcagtacaaagcgaagatg

SEQ ID NO: 496493 - DNA, 868 bp, Homo sapiens
  misc_feature (414)..(414): n is a, c, g, or t
  misc_feature (419)..(419): n is a, c, g, or t
  misc_feature (487)..(487): n is a, c, g, or t
  misc_feature (494)..(494): n is a, c, g, or t
  misc_feature (824)..(824): n is a, c, g, or t
  misc_feature (844)..(845): n is a, c, g, or t
ggcgctgggatatcagccactaactttcagttcttttctttactgtgaagaatgataatctaatttcaattcctatttgtgtctctcagcattccccgtcggagccctttctagagaaaccagtgccggatatgactcaggttagtggaccgaatgctcagctagtgaagagtgatgattacctgccatcaatagaacagcagccacaacaaaagaagaagaaaaagaaaaacaaccacattgtagcagaggatcccagtaaaggttttggtaaagatgacttccctggtggggtagataaccaagaactaaataggaactcactggatgggtcccaagaagaaaaaaagaaaaagaaaaggtcaaaggcaaaaaaagacccgaaggaaccgaaagaacccaaggagaaaaaanagccnaaggaacccaagaccccgaaagcccctaagattcccaaagagccaaaggaaaagaaagcaaaaactgncacgccnaaacccaaatccagcaaaaagtcaagtaataagaaacctgactcagaagcaagtgctttgaagaaaaaggtcaacaagggaaaaacagaaggttctgaaaattcagacttagacaaaacacccccaccatctcctcctcctgaagaagatgaggacccaggtgttcagaagagacggtccagcagacaggtgaagagaaagcgctacactgaagacctggagttcaagatttctgatgaggaggcagatgatgcagatgctgctgggagggattccccctccaacacctcccagtcagaacagcaggaatctgttgatgcagaaggcccngtggtagaaaaaattgagcnntcgttcagtacaaagcgaagatg

SEQ ID NO: 496494 - DNA, 141 bp, Homo sapiens
atgtgtttcaaccttcacacatgagactgtcgcttctgctgctcctcttcgacatgggtgcccagtttcactcattttgcatatacaatatcctcctggtacgggttttgcttgttctgctctgagaccgtctgtatgttt

SEQ ID NO: 496495 - DNA, 365 bp, Homo sapiens
  misc_feature (19)..(19): n is a, c, g, or t
  misc_feature (86)..(86): n is a, c, g, or t
  misc_feature (103)..(103): n is a, c, g, or t
  misc_feature (110)..(110): n is a, c, g, or t
  misc_feature (127)..(127): n is a, c, g, or t
  misc_feature (218)..(218): n is a, c, g, or t
  misc_feature (265)..(265): n is a, c, g, or t
  misc_feature (319)..(319): n is a, c, g, or t
taacttaatgctctggggnaaggggcctaagaactcttggtgggcgggtccgctccctcttaaccataaaagcttctgctcgaagnatgcgctggccctcggnatggctnccatgcgcaggtcgggntggtacttgttcttcgggatcatgtgtctgatgctctgacgtggcgcgagcattcttgttgatggtggccgcacataggaggtggcagctncgctggccggatctccgcttaataccaccacgacacctttcgtcggntgccgctccacgcccacagtcttcggtaatcagccgttgtagcggaagaattgnggccttcaagttattggctcagtctgtaggctcttatccacttgat

SEQ ID NO: 496496 - DNA, 276 bp, Homo sapiens
  misc_feature (21)..(21): n is a, c, g, or t
aggattcagagagcagagcgncagggagcaccgagggcaccctgagaaagactcccagtaaaagtcggttgtttgcccaaaggaggcagaagtaaactacgggcaggcaaccacaggcttgctctgacaaattaaacacgagaagaaaaatgtaaacctacactggcccaatcactttccaagagcctaattcatggtaaaaccagcagtccaagatctgatttggataaatcacttcctgacgctgcatagattttactctctggacgactgtga

SEQ ID NO: 496497 - DNA, 286 bp, Homo sapiens
acttaggcgcttctgcgctgtcacagttgcgttcgagatctagagcggcgccgcaatagctcgaggtgtccgggacctatcagcggctggcgtgtcactggatgaggctcgagagcgtgaccttcttcgagttactggtcatgtgcgagatcgtgatctccttcgggtgaccggagatgttctggatcttgatcttctgcgactgatacgctaagttctgcttcgagatcgcctcctggttcctggtggagtcctggatctggacgcagaacgcgcctcatggcgt

SEQ ID NO: 496498 - DNA, 110 bp, Homo sapiens
aagagccagtgtgggatacgggctgagcacgcaggggcagaatcatcatattgtttatctttttttccccccctttcttggatccccagtcagcactggtgctcgtgccg

SEQ ID NO: 496499 - DNA, 252 bp, Homo sapiens
cccccccccggggggggggtccctttggcccccccccccccccgggggtttaccccctgcccccccccccccccccggggccccaggggggggggggacccccctttttggggggggtttttcccccttttttccccccccccaaggtttttccccccccccccgggttgttttttgcccccctttgggggggggggggggggggggccccccctttttttttccccccctttggggcccttggtttcccca

SEQ ID NO: 496500 - DNA, 857 bp, Homo sapiens
cgggacgaggggggcgacaaccccacccaatgtcccgaaagtgtgacaccgatatttgtttggccgattccacaccaacgtgtggtgggccgcacgaagtggggcgccgctttcaccacacaagtgggcttcgtctcgcagaaggtgttgtccgccttttctcgcccccttctcatcgatccattgtgggcgcgttctattatatggtcccaccgcggcggctcgttcgccctcagcccgcccacgtggtacgatcttctgcggggcccacgatgggttggcgcacgcacgcggtttcttcttcagcaccgaccagcagtgtttttgtgtcgtcggcggggccgcttcatagctcccccacgcctgttcctcaggtgggcagcagagttatattcttcgcgaaatattagagggggggcgacggtcctccaaagcaacaaatcaccttcttcctgtttcttgtcgcctctcgctcaccccgctggtggcggcgtcgacactttctgcgcgcgggaagatactcttctctacgggggggtgttttatccccaggagccacatacttttgttgtggaccgcccccacattattttatgacacaaccacccgccggggaccccgtttttttttgtttctgctgctgctgatcctctcctcctcgcgcagcgcgctttcttgacgaccgcggcagtagattttttttcagcccctcccgcgggtcccccccctccccccccccccttcaccaaaataaccccttttctccccgggaacacaccccttttttttacacaccctttcccccttttttttcttttccccccccccccaacacatttccgggggtttttttttta

SEQ ID NO: 496501 - DNA, 1290 bp, Homo sapiens
  misc_feature (1000)..(1000): n is a, c, g, or t
ggaggcattgaggcagccaagcgccagggcgcttctcgctcgcagcggggcagcgcggagcttggaggaaaccgccagcataagtttttttcctcctttgcaaagcatcagcagcattcaataccacactacttcaaaacaatatcagtccaatcaggttcactaacgcatattggcttagcgtttaagtttttaacggtaattttacatagcttcaagccattttaagcagaacaattatgacagcacttcagaagcagtcagcatgcacggacaggacaacaggatcaaaacagggttttcttaagaaacattgaccggcagggttcgcagcaatgcaaaggctttctttccattgcgcagtcacacacaacatggtattttaacaagcaaacattgcagcagcaaagggcactaccagacgcccccggaagttcaattacacagatacgaagggcaaatgcgtattctagcatttcaccaattgcaaggggtgacttcaaaaccagctcttaaaacgctcttaagtttttacacacaggttcggtcagggctgcacttacacacattaatttttggcaacagcggcggaatcctttgtttcaaaaacggaagcatttaaagaaccccaaaaggggttgactctcacaagaacgaccctttggaaaaattcccaattgcagcggctaggggcacgcaactctcggcggttccactttttcacacgaggagcccgttaggtgtttcaaaccgccccacgtgtttaacccttgaaagtacggccaaaggaaactgtcaaccacagactcgggggtcacaacacggcatgtctacactttctgcggaggcagcgctggcgaatcagcgcgaattggacacacacccccaacactctttgggcacgcacaacgccaatcaggaacacgcgttgtctcgaacaagcgttggggacaacacaccacctgggcggtaccaagtcaaccctaggacaacaacgccnttacactgagggcggaaaagcgggcccggaaacagacaacaacacgacacatacggccacgaaacagcaaattctcgggggaaccaccacttctatggcaactcgtactgtttacgtaccacgcagtgtaacactctttttacgccgcaacacgccaaccacaccacaacgagccaccttcacactagttctagcccaccgcccttgacacacacggtctctagtggacaaggtcataacagcgaccacaagccgcacaccacacggtcgtcacgagcaaccaccaccga

SEQ ID NO: 496502 - DNA, 375 bp, Homo sapiens
tttttttgggggggggggtaggtaattggctataatttcatgagaaaatatccctgcctataatgagtactcataaaagaacactcaaactcctaacacacctcagacaaactactatgaattcaataccattctttagggttcccatgttccttagtcacagtacactggatagcccttccttggagaaaaacaaaaacaaaaaaccctactcaatgtattattcccaaagccctcaggatttatggagtctcaattagatttactacagtctaagtagtttctcctaaggtaggctgagatcgcccctcaatgtccagtatggtttggtttggtttggttttgttctgttttgttttgttttttttttttttt

SEQ ID NO: 496503 - DNA, 225 bp, Homo sapiens
ttttaaaaggggaaaaaaaaaaaaaaaagaaccccttttgtttccccgggcccatttcaaaacattcccctcccaaatttaaggttttggattccaggttgggagttttccaatgttaatgtaaacaaaacgggccccccccccttaaaatgaatgtaattattattcctcttgcgggtcccccccgtcgcttttaatttttctttctttgggggaatttattta

SEQ ID NO: 496504 - DNA, 217 bp, Homo sapiens
gctgtagtcagctgtgatcactcgactgcactccagtctgggcgacagagtgagaccctgtctcaaaaaataaaaataaaataaaataacatggtgaattgtatttcatatgaatatatctccacttaaaaatctggggggctgcagctcatcttggggggagctggactcagatgcccccgtaggtgcaaaagcaccatccacttctcccccccca

SEQ ID NO: 496505 - DNA, 336 bp, Homo sapiens
gaacgatctcctctcttagtagatcctgtgtcggtgtcctttagcccagtgccatcactggcagagattgtggagcggacatccccgggtagaaccagggggccggtaccgacctgcaggttgtgagccccgatccggaacagccatcattgtgcctcatcgctagcccgggagcaccaccctgcgccgtgctgcatctaaccacctgcaccccgtttgtcgcagggccagagcttgcttatggcatctatgtcatccaccaggctggaaatggacatttacagggaaaactgttgaacgttggggtgcgagaggccctccgttatgaagagtggg

SEQ ID NO: 496506 - DNA, 105 bp, Homo sapiens
tggttcttgtgctgaaaaaaatacaatccctgcatctgttataaagtataaatgaagactgtcctagtaaaaacaaaaaataaaattcgtgtggttctttgctgc

SEQ ID NO: 496507 - DNA, 809 bp, Homo sapiens
tgtatgtggcgcggaggacgcaggcttgcctgactccccctgaggtgcccgcggaaccaatgtgccctgagtccactgggccgtgagcagaccaccgactggggtgcaacttggcactatagaaccgcagacagggacgtcggttatgctatctgggactcgcgggaggccacgatggagatcctgtatagaatgtggaagccgatataagcagagtaatatgctgtctagtcaccatgacaaacgagccgctgcagtcacctgcccgaagtcctgccagactgcaccagctcagctgcaccctgtggtgaagacggtggagggattgtggcagcctagatgaatgggcagccgcaggtatgtcatgcaatgtttcaagccaaaggacgggcaagctgctgtcaacagtagtgcggactcttgccacccagagccccttcaagtgaccggccgatgtgcatgatctgctcacgagggcagcagccaagaggacttgctctactccactgttgaatgtatcagggacctctggtggaccacgacatcggagctgcctgtgagccctggctgacatcctacaaaaaggcgctgcgtaattggataaactcgtgcccacgatcagggtaatgcggacgaggcgccatccctgggccagttactgggagtggctgagaaaccctggccccgagcataagcaggcggtctgttagcgagatggttgccacgtgttataaagtccctgccgcattcggttactgaacgcggcgcgtgacccgactatacggcaccgagatgtgcgcatgggctag

SEQ ID NO: 496508 - DNA, 220 bp, Homo sapiens
cctatctcttcccccgaccctgtataatacctagcttgggctggctgaaagcctaagtatcctgtatctagggtccgtgaggtaacggcagttctgatgtccaggtactagtaggtaggtaggggatagtagtagtattataggtataacagatagacatagtatagcgagagacaagagcggaagaatacctagagaaataccatatagagatagtacc

SEQ ID NO: 496509 - DNA, 307 bp, Homo sapiens
  misc_feature (40)..(40): n is a, c, g, or t
  misc_feature (92)..(92): n is a, c, g, or t
tgtcatggcagcataatgatgttttggttaaggatggacntgtggtatacaatggctggtcccataatattataatagagcggggaactttnctaccacctgtcatactccacagacaacacattactcgtgtttgtggtgaacctggtattaaaaaccctacggtactgccagttctatcaaagtgtagcacatgtaattctgtgccatatataatacttgatagtgataagaaatgactgtgttgctcgtttatatatttactatattatacttttatccttagagcacactccttctacttatt

SEQ ID NO: 496510 - DNA, 295 bp, Homo sapiens
cgcagtcagtcagtgagagctgaggaggagaatggagtgaacactgggaggcagagtttgcagtgagccgagatcgcgccactgcactccagcctgagcgacacagcgagactccatctcaaaaaaaaaaaaaaaaaaaggagagaaaagtttggccacttctggcttaagggtgattctagaaaactggtacccaggttaaattatagtagagcacctggtgagttacttgaaattaaaccttgcccacaccttcagacattgctcaagggcccccttgggggttcccggcatt

SEQ ID NO: 496511 - DNA, 326 bp, Homo sapiens
acgcattttacttagcgctgtcttatttccagtctaattttacactgtaccagaaccacatggctgctctctggaactatggatcttgaccccctggatatattattttattccaagaaagatcacgtacgtcaaacgatgacaggatacatagacactacatatactagatatctataactgtgctgacttatacataggctagaaatatgtgccagctacttcattgctgtaaatactcttgctgagctctaaatatggcacgaaataaacatgaccaatatcaatacgacttcttgaggctactataagttttgagtacgttc

SEQ ID NO: 496512 - DNA, 186 bp, Homo sapiens
cggctggagtcatcatcagcatcatccacagctccctggctgagccacgcgtagcgtcgggagggctaggcccgtgcccccgctgccaccggaggtcactccaccatccccaccaccaacacaagaaagacgaacgaggtttgaaagaacagtagaggatacatgccccaagatgtcaagagggga

SEQ ID NO: 496513 - DNA, 269 bp, Homo sapiens
  misc_feature (1)..(1): n is a, c, g, or t
  misc_feature (71)..(71): n is a, c, g, or t
  misc_feature (74)..(74): n is a, c, g, or t
  misc_feature (78)..(78): n is a, c, g, or t
  misc_feature (87)..(87): n is a, c, g, or t
  misc_feature (104)..(104): n is a, c, g, or t
  misc_feature (121)..(121): n is a, c, g, or t
  misc_feature (148)..(148): n is a, c, g, or t
  misc_feature (186)..(186): n is a, c, g, or t
  misc_feature (203)..(203): n is a, c, g, or t
  misc_feature (220)..(220): n is a, c, g, or t
  misc_feature (234)..(234): n is a, c, g, or t
  misc_feature (237)..(237): n is a, c, g, or t
  misc_feature (243)..(243): n is a, c, g, or t
  misc_feature (250)..(250): n is a, c, g, or t
  misc_feature (259)..(259): n is a, c, g, or t
  misc_feature (264)..(264): n is a, c, g, or t
ntcctcctcttcaaattggcttgaatcttctctgaccccccacgagtgcagcacagtctgggaagaaaggngtnaggntggtgaagntgaacagtaaccccagngagaagggaaccaagcngccttcagttgaggatggcttccaganggtgcctgtgatgagtgggttggaggttaatgacttanagctgcctggtccaganaaggtgattgtgaaganaagaagggaatatnagngggaanagaagancaaagggangttcngggtg

SEQ ID NO: 496514 - DNA, 245 bp, Homo sapiens
agtgtttggtggtgcatgcctgtagttaccagctactgggagggctagtggcatggaggatcgcttgagcctggacggatcaaagccgcagtgagccacgacagagcaagaccctgtgtcaaaagagtagatactccatccatgaaaaaaaatcgatacttttccaaagagcccttggaaattatacttaggacaatttatcagaaagaataaggaatcaaagagatggtaacagaataaagaag

SEQ ID NO: 496515 - DNA, 118 bp, Homo sapiens
acggaggaattgctcagccccagcaactacagtctgggatgcaaggccagccatgatgacagtggtccagcatggtcaacctttgaacattgctccacaaccaggattgggccaggta

SEQ ID NO: 496516 - DNA, 364 bp, Homo sapiens
cgatggcatccatctgttagataaatacggttttctgggcacacacacatgcacattgtaacatactgtctatagctgcttctgctacaactgcagagttgagtagctgcaattaagagtgtataacccacaaagccagaaatataggctatctgggcctcgacaggcaaagtttaccaatccctggaatacctgaaacgtgtcacttaccactctgggaggaaaccaggatggctctgaggcatctaaagcagagagtaaggcatgggcagtatccttctcaaaagagggcatatcggtcccttaccagcatcctcaggctgggatcaggggccccagcatcacagcctgagcaggagagcct

SEQ ID NO: 496517 - DNA, 1215 bp, Homo sapiens
tgtaagtgttgagatgggtttgtgttttatggattgtgtcatgtgaagtttgtttgtcacattttttgatttttgtactgttgttgtctgtataagtttttgatgttggagaaagggtttagttgctgaatgataaaggtatgaagtgttcgtaactttatgttaaagacgtttacagtggtgttgtatgaaatctttaatctcttatcgtatggttaatacatggccttgtccgtgtattctgtgatatctgtatacatgtttacctttgcggtttcttgttggggcgcttgctatcctgtggtggctgggtttggtgggtggttgcggtgcgggtgtagtctttgtgtgttaggttgtggtctttggggttgggtgcttgtaggggcgtcggtgctgatccctgcgtttggtctctgttttggtgccgattatgtgtacataggacgcgcgcagggatcttttggttacactggttggaggggttataggagttccttgagggtattatggtcatggagtctgtctcacatagctgatcgtgtcaagtagtggcttaggtgacttgggtagtgctatttattttgatgtgaataagagtgttatgcactgttggatatattgaagtggatagtagcacatcattaggctttatgtactgtgtgtgtggttgtgtgtagtgtaagtacagtgatgtgttagttgtacagatgtgtggggtttgtgttttatgatacattagcagccttatgtgatttgttggtttatggacatagctgccctttcattttgttttcgttttgccagtgtcttacggtgagtctcaaattaggaaatgcatttaaccagtgtaatatagatgagtgctagaagtatagcgtgttgttagggccctttgccagataggtagtcagttcaatgctgggtattgattcttttcagctaactaaccatgaatctgagaaagcgtttatatatagactgatgatgcagcataacgagcagagtttgcataaatattaccatgattgctttatgtttatatttaacttgtatttttgtacatactagattgtgtaagatatatgttgaagtttcagtgatttagacagtctgtccaagcttgttcatgatttttatgagcacagacttttcaactataatatcttgtctattattacataacaatctgcccataatcagcttatgacgccc

SEQ ID NO: 496518 - DNA, 271 bp, Homo sapiens
tgaactgggttaggtgccggtggtgataatgtggtttaatatacaaccgaagccagacatgggactggaggacaaacaaaaaatgcttaccgaatccggagatcctgaggaggaggactgaggattatgaggaattatggccactactgagggtttgaaaacgtacttgcatcctttgaaggcgggaacgtgatacttttacctactgcttagcatctgaaaggggttggggaccggattctgccatttatgaagttatgtggttctacca

SEQ ID NO: 496519 - DNA, 1223 bp, Homo sapiens
gctggatcgccgagcgcgagtgagggagccgagccgccgacgcgccgcctccgcctcccctccgcgaacaggagcccgggcctggggcccggaacgccagccccagcccagtccctcggcgtcaggccgcgagggtagctgcgcgcgaagcgagcgagggggagggcagagcgagcgagcgccgggcaggaggcggacggaccgagcgggccgcccgagcgttgatgagcggatgacgggaggaaacgccctgcttgcaccggaaacataagcaacaacagacgacacagacaggcgagagtagaacaaagcaaaagagcaacagcaagcagcagaaaccaagagacgaacgagagtcaacaacaaaacaaaatcacaagacacaagcaacagaggagacaagcgaaacagaagaccgacacaaggacgaaaaaagaaggacagaagaagggagaaggaaccacaaggcagcgaacaaagaagcagcagagaagccgaggagaaagagaaaaaagcaagaagcacagaacacagcgaggcgaggacaggcgacagaaagctgaagcagaaaccaacacagcaccggagacacaacaaaacggaaagaagacaaggaaagcaaaacagagagaagagaacaacaacaaggcaagaaagagcggcgaccgaggacgaaagaaaacagcaacgaggaacacaaacgcacagaacacaaggacaagacgagcaaagaacaaaagagacaccgagccgacgaaccgcgaggaaggagggaaacgagcaaacaggggagaagcaaggacgaaggcggaaagcgggaagaagacgaacaggagacaagggggagagagggaaggagggagactaagagagagacgaacaagacagaccacccagagaacacagaaaggaaaaagaggaagaacgaaaagggaagcgagccacgcccaaaaaagacgcccgcgcagcaaacacaagaacaggaaggcaacacaggcaagaagcgaggcaacaaaagaaagcaagaagagagccgacacaagacacacgacaggaaagagacgagggacaaagaaaaaagcacccacagaaaccgaaggacggagagagaggcaagaaaaaaagagagacaggaacaccacacacagacgcagaaacacacagcgacaaagccaaacagggaagaaaacaccacacacaagaacgacagagaacagaccggg

SEQ ID NO: 496520 - DNA, 264 bp, Homo sapiens
acaggggctttttttttgcccccgtgtttgggggggggccccccccccctttttttttccccctaaaaaaacccggggggggtccccccccccggttttttttttgggggggggggggggatactttttttccccggagaacctttttccctttgggccttttttggggcccctttaaaacgtttttttttaaaaaaaaggggggggggggggcggggatttcccgggatttttttcccccccgggccgccccccggggcgcga

SEQ ID NO: 496521 - DNA, 786 bp, Homo sapiens
agcggtaaagttggaagatacaaaatcaataatcaataacatttctacatgccaacagcaaaaattctgaaaaaggaatcaatgtgattccatttatgacaggcacaaataaaataaaatatctaggaataaactcaatcaaaaaagtacataattctcactataatgagaattatgcaatattgatgcaggatattatacgaacacagcacagtacgacacacgacactgacagcagcacacagcacagcacaaatggaaaggcatttcacattcgatggattaggaacgaatccatattgtgaaagatatccatattacccaagagcaatctacaagattcagtgcaattgactatcgatatagctaatgatactcttctgcaacatgtgaggacaagagatatttcttagagtgtctatgaactcacgaaagacccagtatatagccagagccaccctgagcagaagagaacaaaactggcaggagtcacattatgtgacttgcatagttgttctgcagagctatagtaatcaaaatagcatggtactgacataaaaacagacacacaggcctgttgggaacagggccccccgagaacctggccatctgaactggcctcagaaagtgtcctatagagaaaggatctctgcagcactgtgatatgtgcgtagatggccataatgcccatgctagaaggttgtgggcttacttggaatgagggcaagaacatctggcccacctgggtggaaaacggcttaagggcattcttagactacaacaacg

SEQ ID NO: 496522 - DNA, 140 bp, Homo sapiens
ccacgcgtcgcaaaccttacggccaacgtttcttctagtatgatggacagtttctttttgtctttgctctgaataaaactgaactgtgggttctcaaaaaacaaaaaaaaatagaaatacgaacaagacaagaagcgggg

SEQ ID NO: 496523 - DNA, 282 bp, Homo sapiens
  misc_feature (5)..(5): n is a, c, g, or t
gctantgatggataaataggatggatggataggataggatggatggatgcactggaagtttggatgatggataatggataaatggatggatggatgaaggaataaatagtgtttcatgctttattgtggcttcaccatatgctagcgcttactgccatgttactcccttctttccatctcccacatgccagagaaactccagagtgaactatacccaaggattcaagagcgtgtataagggttccctacattctcatctacaccctacctacccatacccat

SEQ ID NO: 496524 - DNA, 179 bp, Homo sapiens
gcacaatgttggcaggtggtcttgaactcctgaacccaggtgatccactcagctgggcctcccaaagtgctgggattacagtcttgagccaccgtgcccagactaaaaagtagtttgcgtaatgtaactatataagtagctaggtaatttattacaagaaccctgttcaattctgcagt

SEQ ID NO: 496525 - DNA, 177 bp, Homo sapiens
  misc_feature (36)..(36): n is a, c, g, or t
  misc_feature (75)..(75): n is a, c, g, or t
aattgtcctaaccatggacataaaacagttgtactncccttgctactgtgtagaatcactttgcacttaattttncccccagatcacagggggatacctgacctgtttttcaaagtgtttatttactgctgttactatttgattagaatgtattaaataaaaaaaacctgattttct

SEQ ID NO: 496526 - DNA, 105 bp, Homo sapiens
tgtagctcatctggtagaattctttttattaatatgtagcagagagagtctcagtcgtgtcacccaggctgaagtgtggtggtatgatctacagatcattgaagg

SEQ ID NO: 496527 - DNA, 565 bp, Homo sapiens
cattcgatgggcgggcacttaccaagcggtgacagagaaacactccgttatatggaggcttcagttaacagtaactgctgaacaaatagaaaacatgtaggtgatagatttcagcaccatctgttagaagatagtttcaaaatgcatacaccccctaaattcacataaacctaggaaatttacccatcattccctctgcatctacaccaaaaatcaagagttctgtactcgaactaccctttccgtgtgccaaaaataagaaatatttaaaaatctatccaattaagttaataggacacaaacatgttccccaaaaaaggagggaagttaccaatcaagcatgatgtgtctaaagtacaaacttagggagtttctctgaacctactctggttcaaggggctgcaaaaaatacacatttttaatacactggtacctattattcgatgaaggctaaattacaagagatttaccaatttgaacctcataaggttactgctaaatatactttaaaaagtcatctaaaaaatgttttagaaatacaacagaatagctgatagaaaaaaaa

SEQ ID NO: 496528 - DNA, 160 bp, Homo sapiens
tctttttttcccgggaaattaaatttaaattttcaaaaaaatgggggtttgattgaagcccctttaaaccctttttggggatgccccggtttttaaataaggaaaaaaaaaaacatgcccagctgggcatggggccccaaaaaaaaatttgctttcctta

SEQ ID NO: 496529 - DNA, 256 bp, Homo sapiens
ctaattggttcttcgatgacgcaggcatagagcagagatatcaaagtagacaatgacgattcagtgcttcaataggatgacactgtctgtgacctggaggcaagtgcctatctcatttctacatgcaagattatgtcctggtcagtgtttcacttctgatgacatctttgagaaaattaaccataagagaacaggttggtcaaggactgaggaccaagtaaataattaggacgtccgtcatcgaagaaccaattag

SEQ ID NO: 496530 - DNA, 103 bp, Homo sapiens
gagcgagtctccatatcaagaaaaaaaaaacaaaggcttaagagtcaatgtggaataaacttgatacttttggcggctttctggaggagttttaaggtaggcg

SEQ ID NO: 496531 - DNA, 763 bp, Homo sapiens
  misc_feature (20)..(20): n is a, c, g, or t
  misc_feature (84)..(84): n is a, c, g, or t
  misc_feature (88)..(88): n is a, c, g, or t
  misc_feature (104)..(104): n is a, c, g, or t
  misc_feature (117)..(117): n is a, c, g, or t
  misc_feature (128)..(128): n is a, c, g, or t
  misc_feature (131)..(131): n is a, c, g, or t
  misc_feature (133)..(133): n is a, c, g, or t
  misc_feature (233)..(233): n is a, c, g, or t
  misc_feature (250)..(250): n is a, c, g, or t
  misc_feature (300)..(300): n is a, c, g, or t
  misc_feature (318)..(319): n is a, c, g, or t
  misc_feature (451)..(452): n is a, c, g, or t
  misc_feature (456)..(456): n is a, c, g, or t
  misc_feature (483)..(483): n is a, c, g, or t
  misc_feature (525)..(525): n is a, c, g, or t
  misc_feature (644)..(644): n is a, c, g, or t
  misc_feature (653)..(653): n is a, c, g, or t
  misc_feature (658)..(658): n is a, c, g, or t
  misc_feature (661)..(662): n is a, c, g, or t
  misc_feature (667)..(667): n is a, c, g, or t
  misc_feature (673)..(673): n is a, c, g, or t
  misc_feature (690)..(690): n is a, c, g, or t
  misc_feature (693)..(693): n is a, c, g, or t
  misc_feature (696)..(696): n is a, c, g, or t
  misc_feature (720)..(720): n is a, c, g, or t
gaggtgattcagataaggcnacagttagggatccttctttcccctatacatacacagacatacaaacacacgcacccgggtgantganagggaccatcaggggncagattgaagggnagaggggaggnggngncctccgagagttggcccggacccaagggtgggctgagacctgggccagggggagccgttccgaggggttatgcctgagcagtttggagatgaggtcctgngctcccgtgggcacggnagcggggaactttaggtccacccttgacgatgcggcgataggtttttttntgtgatgcactcttaaanngtgggcttccccaccagcagctcatagcaaagccctccaatgcaccacagatccaccttctcattgtgcatgcgcccctcaattatctctgggggcaggtagtccagggtgccacacattgtgttcctgctnngggngggcgcatgcacagaccagccgaagtnagcaatcttcagctctcccttgagccctaagagcagattttntggctttatgtctttgtgaattatcttcttcccatgggagtacattagagcatctgccaactcctccatgatcgtggctgttcgctgctcgtcaaatgtgcagctcttctgcagctccntgtagagcnccccncgnngggcntactcnagaatcaagtagatccnccnccngtcataaaaatagttgtagagacncaggatgttgggatggccatactgcaggtgggcctggatttcg

SEQ ID NO: 496532 - DNA, 177 bp, Homo sapiens
ctatcaggattggtagcacaagagaacacttaacagatgagagggatgagatctgtttatttttctcgagtgtgctttctgggatacccaagggattaagctctttaaatctgccccaggaggcggggcatggtggctcacacctataatcccagcacttgggtaggccaaggcagg

SEQ ID NO: 496533 - DNA, 162 bp, Homo sapiens
gattaaggatcccctggtgctagtgtagcaggatgccttgaggtggcctccgaagctgcttcacacttcttgagggggcgtatttggcaggtttttctagacgcaggtcaggtcacactgacacgttggtagtgggacacggaaagccatgccagtgagctt

SEQ ID NO: 496534 - DNA, 373 bp, Homo sapiens
  misc_feature (87)..(87): n is a, c, g, or t
cagggtggagcatatggacaagccatccccaccagcccctgagacatgtgagagaggccagaacaggccatccggaccccactgtgntggtggatgagacagcagaaggaatatcaacctaccaacagaatcctgagaaatgctcactcttacttcaagctgctgcattttgatgttatgaaaccataaataacttatgaagtcatctttgctgacttaaagttttccataactttattataacatatcaaaattatgaaaaatgtgaaaagtagaaaactgatgaattttgcttcttcatatggtctttaagaatctcaaaggcactgaagttttttatcttttctgtcttagaataaaaaaccttgaatga

SEQ ID NO: 496535 - DNA, 108 bp, Homo sapiens
cgcatctgggaggtgacggtgagtagccaagatcatgcactgctttctagcctgggtgacagagggagactctgtcttaaaaaaaggtgcctggcatgtgataagaac

SEQ ID NO: 496536 - DNA, 134 bp, Homo sapiens
  misc_feature (35)..(35): n is a, c, g, or t
atgagtggtgggcagtacagctagtcaccactacnaaaatgctggggcatgcttcctggctgtaagaacagttactggtgagtggagaccgttggtacccaccacatgcctcttgccccaccattggcctcgtg

SEQ ID NO: 496537 - DNA, 145 bp, Homo sapiens
  misc_feature (127)..(127): n is a, c, g, or t
gtcacatgaccatcgcctaaaaaataaaagagcaaaaatgaatcagtgcaaccggtatacgaaaaataataattatttataaatagggaaagggaaagtttactttttgccaaaactggaggcagantgtgtcatgggacgggtt

SEQ ID NO: 496538 - DNA, 430 bp, Homo sapiens
  misc_feature (79)..(79): n is a, c, g, or t
  misc_feature (90)..(90): n is a, c, g, or t
  misc_feature (389)..(389): n is a, c, g, or t
  misc_feature (404)..(404): n is a, c, g, or t
actattccatggaatccccatacttgtgaaatttacccctactttcctaaaaatgtattttgtaaagcctaaaaaatcnaatatatatgncccttttcaagtccattccatgggcatgtacaaagaagcaaaaaatttgaagtcactcggctgggcgcggtgacatgcctgtaatcctagcacttcgggaggccaaggcgggcaggggcagatcacgaggtcaggagattgggaccatcctggctaacacagtgaggccccatctctactaaaaatgcaaaaaattggccgggcatggtgcaggcgcctgtggtcccggctgcttgtgaggctgaggcgggagaatggcgtgaacccgggaggcggagcttgcagtgagctgagatcgngccaccgcactccancctgggcgacagagggagactgtctc

SEQ ID NO: 496539 - DNA, 595 bp, Homo sapiens
  misc_feature (2)..(2): n is a, c, g, or t
  misc_feature (77)..(77): n is a, c, g, or t
  misc_feature (158)..(158): n is a, c, g, or t
  misc_feature (234)..(234): n is a, c, g, or t
  misc_feature (241)..(241): n is a, c, g, or t
  misc_feature (287)..(287): n is a, c, g, or t
  misc_feature (404)..(404): n is a, c, g, or t
  misc_feature (407)..(407): n is a, c, g, or t
  misc_feature (412)..(412): n is a, c, g, or t
  misc_feature (419)..(419): n is a, c, g, or t
  misc_feature (441)..(441): n is a, c, g, or t
  misc_feature (470)..(473): n is a, c, g, or t
  misc_feature (487)..(487): n is a, c, g, or t
  misc_feature (593)..(593): n is a, c, g, or t
anaacaagataataaaatagcgtgcactttatttaaaaccaaccaagcactgataaaaaatatatatcactgcagcngtaattccacatcaaacctgaacagtaagatttgggcatttattcttcacatcatgtgccaagcctggcagagaaggacanccacctccactagagcctcaaaggaaaagtggcccctaaccaccaagacagggtaccctggtggagaggggcagcnggcagcncaccctgctctctgcagagcacgtgaagggaaaggagcggcctgtntccctcccgggctgccggggtgggcactggtcagccactccttctcggtttcaggttgtggagcgatggggagagaggtgcatgctgttgttcagataagggggtgggttctccctnctnttttngggtttntgatacccccacagggcatatnatgcccagcaaggtcccacttgcaggggnnnncctcctaagcagcngctatcttttgctttggctgatggggaatcaagattctgagagttacttctcttttcttgacaaaaagcagcaacagaacactttcctacatacagtttggcagcngg

SEQ ID NO: 496540 - DNA, 595 bp, Homo sapiens
agcccagtttaggattttgacctttatcctaaaggaagtggtacaccatgaaggaagtgtcatgaacaaatttatgttttaaaaaaatttctctggctaatgtgtggaaaatgagtttatgtattagaaaatatggtagacgtaataatggcctcctaaagatatccacatattaatacccagaatctgtaaatatgttgttacatggcaaaagggaggtaattagctaatcagctgaccttaagataaagagattaccttggattatccagggggccccaaagtaatcgcaagggtccttaaaagtagaacatggggacaaaagacatggagtgactatggaagaatggtcaaagagatacaacatggctgactttggagatgaaggaaggaggtcacaagccaaggtatgtgggtagcttctagaagcttgaaaaaccacggaaatagattctctcatacaacctttagaagggaatcaaactcaccttgattttagcccattgagatgcatgtaagatttcttcagaaatgtaagaaaataaattagtgttgtttttaagccactgcgtttgtggtaatttgttctagcagc

SEQ ID NO: 496541 - DNA, 171 bp, Homo sapiens
tatcgcaggcttaggctcgactgtggtgcgactagaaagaggccctgttgcgcttctgtgtcacgtggaacaccaatctcgcggcactgccacgaggcccaggccgtgctgggtgtgctcttgaggctgagaggcccccgatggacccgctgtgcctatcagcacatgcct

SEQ ID NO: 496542 - DNA, 600 bp, Homo sapiens
agcggaacaggcaagatggcggcccatcaccggacagaacacagcaggcggaggaaagtgcaggtttcctatgtcattcgagatgaagtggagaagtacaaccgaaatggagtcaatagctactgcagctggatccagcactaaatagacttatacacagaccggtcgtagactctactcataagaatatggacgtgtcaactcagcacgacgccaagatccatatactagcatctactggaaccaccataactagatctggcgctcacacgaccacttgcacctctagtctcgtcaactcgcggcaaaacaattaactctctcgcttacttcctagacaacgaccagcacacacccgtactaggcaaagcacacccacacggggccactatccggcacctgtacacaacaacatttcaacagggaacaccaactacacaacgcgcacttaacaggcttccaaaaggagcccattaacgccattacgtgccccccacgcgcgaattaatacatcgaaacgttacagaacgaccacatcacacgacttggagatcacggcaccaagacaggcacagtacttacgcccctcttagccgaaca

SEQ ID NO: 496543 - DNA, 961 bp, Homo sapiens
  misc_feature (790)..(790): n is a, c, g, or t
gatattaaccacatttccgtaagaaagaaaaagggctcgctttgttgacttgaggcatcatctcagccgacctcaacgtgtaaacatatgtgatgtaaataggaaagattacttcctcataggcgattactcttcttctgcacaattctatgttacctttgcagtctttgtgttcctgtactgcattgctgccctctgctttatgttggctacacgagtctgtatctggatagtcgcaaacttcctatgatagactatgttgctacactttttgccacttttttgcggctggtgagcacttcagcctgggctaaagctctcaccgatattaaaatagctcctgaccacaatattattgatgaacttacgacttgtaagaagaaagcagtactgagtcacttaggctttgtgaccaagatggcatccctaaatgtatctatgatattccgctctctaaatatcatcctctaggccaggaaatgccagctttgtgtacaaacgagacagtcctaccgatgcattatatacaatatccccctctcgtccaacgcaggataccccctcgtaccggactctaaccagagggagaacaacacaccgaatgaactatacgctagaagctatcaactcgtctccaacactctttacagccatttatagacactaaaacaaccactagcctgccctatctatatacccacgactgacatcatcgtcccctgaaagggtaatttaattgcaagatattttatgttagacactttactcccctcatccctaccttttcccntacctccccaaactatgaaacaatcataccactcaaagccgtataaagtgtcactgatatcaattaacattaaatacctttattttgaaaacccattgagatccctaaagataattcgagcctttaattatcacaaaacctcaaacccaaaacaaccataagactcgcatg

SEQ ID NO: 496544 - DNA, 980 bp, Homo sapiens
  misc_feature (13)..(13): n is a, c, g, or t
  misc_feature (888)..(888): n is a, c, g, or t
taatcgtcattcnctttaataatagataatcccattgtccttcaaccgtctgccaatcaactctctgtgtgggaacaccaaagtttcgtgattaccagaggttccaagtctctaacacaccctgttttaacccatagggcaccctgccctatgtctacaccaccccccctgtgtttctatagccacccgggatggcgtctccaaaaaagcgctgtttttcacaccaggtgccctgtgagcccacacgaagctttcacctccttaggaaaaccctcaggcgcttcaaacattaagtcccctctccgcctctcgcccggttgttttaggccgcctattctccttgcgaagcctattttcgccgggttgttcgggcttctcctggtattatccccacccccaaaacaactgctggtggacacactcctccttccttctaagaaagacagctgtcgtaatccacactcaaaaggtcttacctacgtcataggaccttcctctctctaataccaccgccgttcataaatatgtgtcatgctccctcccatctcctccttgaatgacatgttcttggcgtacactattctccagggcaccacccactgtgactccgttctccccaggagaagaactcctttatcgctacttaacaagagaaatcatgaataacatgttctaaatctttcctttcaaactttacaacaattacattcttattgtctttccggataatctctgtaagccccacactgtttctcctcctttcggtatccccttgatttcagtccactaatcctccccctcgtcctccccccgaccacacctgtcgccccaatagaccccttattcatgactcagcaactactgtcggaaggtgtctccgccctccgntaacgacaccaagctcatttcgttgttcaggtgagttcgaaaaaacgaccgcaccatcttcgaatagcaacacaaaaagaaaacatcacaag

SEQ ID NO: 496545 - DNA, 510 bp, Homo sapiens
acgctgaactatgtgaagctaacatacaatatatgtttaagagtccagatgtggtggcacacggctatcgtcccagctacttgggaggctgaggcaggagaatgtcgtgaacccgggaggcagaggttgcagtgagccgagattgcaccactgcacgctagcctgggcgacagagcgagacttggcccccaaaaaaaaatagtttcctgaggaaaaaaaaactttcaaaataatactaaactacccgtttatgtcacaggaacatttatttatttattttttttcttttgaggaagcacattgtataccatgtacggggggttgtttgctcacttttattataatatttttattaatttatgtacgtactaggttcagggggtacatgtgcaggtttgttccatgtgtaaattacatattgctgaggtttggtgtatgaatgatcttatctcccaggtagtgagcatagagtttttcatttcacattccccctcaccctttccactctag

SEQ ID NO: 496546 - DNA, 592 bp, Homo sapiens
ctgaacattgcagcatggagccgttcctgatttatggatttttggttgctgccagagaattacacactcatccaaaaaacaccaaagtagaatatgtaaggtctgagatatcaaaaaactcaaactctgcgttaactataaacatgatcatttatgaaggtgcggaagaacatgctctcccaaaagatcaagagtacgcatatgttgttcgtgactcatcgcatcaacggtcaaaatcacctcatccacaccgcgggattcaagcgctctgagtgcgactataatatcatcaggtgtaccaaccatgatcgatgggctgagctctatgagtttgtcaagggttcgcttatattctacaatacgttgaataccggcaaagtactcataccgtaggttccttagccaatggcaaataaatatccaaaatgaactgaacataagccaaggctcgcattcttacctcagccaatgcaagttgctcgatcaagctgccaatgaaaaattgggacataataaccatatgaattattcacaccgatcattaactgggagttgcgctttctaatggatcgcggtaagcgcttatacactc

SEQ ID NO: 496547 - DNA, 426 bp, Homo sapiens
  misc_feature (1)..(1): n is a, c, g, or t
  misc_feature (12)..(12): n is a, c, g, or t
  misc_feature (19)..(19): n is a, c, g, or t
  misc_feature (99)..(99): n is a, c, g, or t
  misc_feature (337)..(337): n is a, c, g, or t
  misc_feature (367)..(367): n is a, c, g, or t
  misc_feature (413)..(413): n is a, c, g, or t
nccgtcaatccnaggtttnaaaagccccaagaaatgcaattaaggtaatttgcccctaaaaactctcccctcccccttcccccctactccccccccaanaggcccctggtatgtgatgttacccctccctgtgtcccctgtgttcctcaatgttcaactccctacttatgagtgagaacatgcggtgtttggttttctgtttctgtgttagtttgctgaggatgatggtttccagcttcagccatgtcgctgcaaaggacattaactcattcgtttttctggctgcatagtattccatggtgtgtaggcgccacgttttctttatccagtctgtcanttgatgggcatttgggttggttccaagtcntttctattgcaaatagtgctgcaataaacatatgtgtgcatgtgtntttaaaaaaaaaa

SEQ ID NO: 496548 - DNA, 257 bp, Homo sapiens
tcccaggttcaagcgattctcctgccagctcagtccagctcagcccagcctagtccagcccagcccatcacaggtcagcccagcttagcttagcccaggtcagtccagctcagctcagtccacttaagctcacccaggtcagctccgtccagctcagcccagcctagcccagcttagcccagcccagcccaacacaggtcagcccagctcagcctagcccagcccagctcagcacaggtcagaccagctcagtgcag

SEQ ID NO: 496549 - DNA, 689 bp, Homo sapiens
  misc_feature (481)..(481): n is a, c, g, or t
aaatccattttctaaaaaagcagggagcagagctctctcttcgccgccgacgcagaaaggagctggggaggaaaaagctgctgccttttgcgctggagattcgtgggcaaggcttctcattttcccaggctgcttcccctcccgggtgaggagcgtcctgagactaaggaaagagcctggaaaatggagcagacctggacgagagattattttgcagaggatgatggggagatggtacccagaacgagtcacacagcagcttttcttagtgacactaaagatcgaggccctccagtgcagtcacagatctggagaagtggtgaaaaggtcccgtttgctgcagacatattcccttgagaagccatttggagaaagcccgctcaggcgtacaggacccaggctcccttcgcagactcttgacgaaggcaccgtcaagtgacctcgaagcaacggagaacgttcagcgctcaagcgtgcgcantcgtacttcctggcaggcagcgcatgcaagcagcacgtatgcaggccagaccggcgcggcacatcgtacaagcggcaacacgtgagctgacaggtcgaacgtggcagagccttgaaacgcagaactccaggacaagaaacagcatctggcataaaacatgggctgatgtggagaatctcaacagtcagaatgaagctgagctccgaac

SEQ ID NO: 496550 - DNA, 340 bp, Homo sapiens
tcgatatggcaagtactagttgagcaaagtgagaaagatctttggtgggcacaaggaggaatcgcgtcatctggtgatctcatgatgcccgcatccatccggtaccccgatcccctcatcaaggtgagtgataccattcagattgatttatcagactggccagattactgatttcatcaagttcgacatctggttacctgttgtgtggtttgtttcgtgaaacctaggaagaattggtgtgatcaccaacagagagaggcaccctggatcttttgacgtggttcacgtgaaagatgccaatggcaacagctttgccactcgactttccaacatttttgtt

SEQ ID NO: 496551 - DNA, 393 bp, Homo sapiens
tgacatgcaagaacattgagccacctagagttgcaccagtgggactctgcttaccactttctaaggctgaagatgcaggggaggaaatagtgttacccggagcacagatatgtgcagagctggcagaggatggcgaccatcttgcaagagctacagctgtgcagtgaagctgccactgtcaaaaccacagagccctcttaacattgcttaagctcgcatcccagactacttatcgttatgttgtggctcttagtagtcattctagttccaaataatttttagaatttctgccttaatttcattgtttacccaaaagtcatacaggagcaagttgcttgtacccgctgagcgaaacaggaaagcagagccattgccttacctaaggctaccaga

SEQ ID NO: 496552 - DNA, 114 bp, Homo sapiens
tggacgcggctcgtcccagccctctagctgacggccctcgggggtctcctgatcgcggcggtacttgccggagagcaggccgccggcgagcgggctccagaccagaaccgagca

SEQ ID NO: 496553 - DNA, 539 bp, Homo sapiens
gaaggcggctggggagaaggtgtactgatgtgccgggaccaggctcggctgggctgcgcagccgcgccataacccaggtccaccgcatcatggtcatgcgcagcactgcatcagcctgacctggcaggcctggaggccttgagggaacgggagcggtcccaccacggccagcaggaggacccagacaagattccagttcagcttgtgctttcaagaggtgttcctcctgaaaaggccagcgatttatgggggacatccaaggaccgtcaggactggactgggagtcccagtgaagccatgtttggcagaggagctccgagccgccaccaaggtgtttccaatccacgagggacttccattcactatgttggtttacgaaactcttgtcttcttcaagcgtcgagggtcttgggtccctcggggtcccagggattcgggtgtgtctcatctcgcggaaagtcaacggctacacgtttgcgggggctcctgtaaaaagcgtgcgctcgtgcacacactttcacttctctaggtcagagtgt

SEQ ID NO: 496554 - DNA, 393 bp, Homo sapiens
  misc_feature (153)..(153): n is a, c, g, or t
  misc_feature (222)..(222): n is a, c, g, or t
  misc_feature (267)..(267): n is a, c, g, or t
  misc_feature (307)..(307): n is a, c, g, or t
tatatatgcacccaacacaggaacacccagattcataaagtaagttcttagagtacaaagaggctcccacacaataatagtaggagactttaacacaccactgatagtcatagacagatcatcaaggtagaaaattaacaatgatattcaggntctgaacccaacattccaccgaatgagtctgatagacatctacagaactctccatccaaaaacaacagnatatacattcttctcatctccacatggcacatgctctaaaattgnccacataatgcctttcttttcagtggtccatatgtaaggnttttgaaagtggcagcatctctactgctcatgcttgttgcaagggactctactggaatacaagggcttttactaatctctaatgct

SEQ ID NO: 496555 - DNA, 276 bp, Homo sapiens
cttgattatttgagatagggcgaacaaccttcccagtttgcctgggactgagagattctcctgaacctgggactttcagggctaaaaccggggatatctaggggaccgatgggacaagtaaggtcgccctaagttgactagtgcgcagaggaatcacaggaagtcaggaatcagccgggcacaccaacagggtgacggtggccaggatcagcctcctggatgatccaccccatgtgtagacctcagcacccacatgtgctgctcatgaaaaggcgc

SEQ ID NO: 496556 - DNA, 578 bp, Homo sapiens
  misc_feature (578)..(578): n is a, c, g, or t
aaagcagccaggagggaggctgtactctgcaaagccacaggggcggagctgcacaagaccatgggaacctatctcttgcatcagcatgacctgaatgtgagacatggagtcaaaggagatcattatggagctttaaaatttgactgccccactggatttcagacttgcatggaccctgtaacccctttgttttggccaatttctctcatttggaacagctgtatttacccaatacctgtaccccccattgtatctaggaggtaactagcttgcttttacaggcttgtaagtggaagggacttgccttgtctcagatgagactttggactgtggacttttgggttaatgctgaaatgagttaagactttggggaactgttgggaaggaatgattggttttgaaatgtgaggattatgaaatttggaggagcccaaggaggaaagatatggttttggctgtgtccccacccaaaatttaaactttgaaattgttatcttcccacaaatttcccacatttttgtggggaagggaccccattggggaggtaaatttgaattaatgggaggccccgttttttn

SEQ ID NO: 496557 - DNA, 253 bp, Homo sapiens
gatctaccagatcccaacaacttcgtccattgcgatttgcaacaacttcgtccatcaggatctctcggactcgcggcgtgtggtggttcggcgtgtgcagcaacaacttcgtccacccggacctccgaaaatccaaaggctttaaaagcgcatagtgtggagcttcggcgtgtgcatgcacacgccgaataaccatactgcacacgccgagcaccgcttccacatgagcaaatccggatggacgaagttgttg

SEQ ID NO: 496558 - DNA, 111 bp, Homo sapiens
gaccagttaagtcgggacgcgcttcatcccctactgcctacccctactacgccagcgccttctccatgatagctggggctcttcatcttcagacatcgtctatcttgcaca

SEQ ID NO: 496559 - DNA, 484 bp, Homo sapiens
  misc_feature (76)..(76): n is a, c, g, or t
  misc_feature (82)..(83): n is a, c, g, or t
  misc_feature (86)..(89): n is a, c, g, or t
  misc_feature (91)..(93): n is a, c, g, or t
  misc_feature (95)..(95): n is a, c, g, or t
  misc_feature (103)..(103): n is a, c, g, or t
  misc_feature (116)..(116): n is a, c, g, or t
  misc_feature (118)..(118): n is a, c, g, or t
  misc_feature (140)..(140): n is a, c, g, or t
  misc_feature (180)..(180): n is a, c, g, or t
  misc_feature (209)..(210): n is a, c, g, or t
  misc_feature (259)..(259): n is a, c, g, or t
gagcggggcggaggccgagtgggagtgtggaaagcgccgcatcccgggtgggaggcgaggcttcccataccccgcnctcccnnggnnnncnnncnctgccagnggcttggcagatngntaggagcacggcggggggactntccccggcagagctggagctgggctctggtgcgcgcgcgngtgtgccgaccgagccggagggactggtnnggttgagagagagagaggaagggaatcccgggctgccgaaccgcacgtnctagcccgctccgctcctgcagggcagactttcgtgctctctgcgcgcgaagccgagtcccgggcgggtggggcgggggtccactgagaccgtaccggccctcggcgctgacgggatcgcgcggggccgctacccgctgtaaggcagcccggggccgtggccggacttggtcctgcgcagtcgggcgctggggcacgcgcagcgggaggaaggcgagaggtgctg

SEQ ID NO: 496560 - DNA, 165 bp, Homo sapiens
ggaaacaaacgacatttatgtgcaatggatgtgtagatagttgcatctcatccaaaaaactagagataacagtactcagctacatgggctgggagaataaaatgtgataaccacaggccgggtgccgtgggctcatgccctgcaatacccagcactttgtggaga

SEQ ID NO: 496561 - DNA, 378 bp, Homo sapiens
ggatccccgggcacgatctttgctgtggctgtttctcatcacctttcactactcatagggtagctagagtacatttaacagcctgcttcaactgtagaatttataagagtgggaatctcatctgatctttatacctaatttttagatgcagattagcttctaccatattatcttgatttgcatgccatattcactcttagaacaactgatttagtacagtcacttgactgagtacagaatttcttttttaaccactttacatatttactcctgtacacagactattcaagataaacatcatggtttctttaattgttcagacgtcttagactagacttgacttttgggcttcagcaagatgtggaaacttttttataa

SEQ ID NO: 496562 - DNA, 958 bp, Homo sapiens
  misc_feature (206)..(206): n is a, c, g, or t
ctccagtgagggcgcgagtggctggtggtgggccagcttcgatgtctctgtcctcttgacaagtggtggtcgggggacattgagcacaccgagtcccgcaggctactgctctgccgaacaagaacccctgcatctgccaggcacgttcgtaatgtatctatagtctggctgatgccacaatggagtccaggggtctctgcatctgntcacacaggctggagtgcatgtggtgtgatctatgggcgtcatctgtaacctccaccgtcgctcgtggatgctagatgtgattcatcatgccttctagctctcccgagtagcatgggatgtacaggtggtgacgtatccaatggagtgactccgtccggaggaaaccatgactccccagtcgcgtgctgcggacgacacgtgttcctgctgagtctgctcttccgtggtccaaggtgcccacgggcaaggggccacagggaagactttcgcttctgcagctcagcggaaccatgagcaccacaggagcaggctccagtacaaagcccacaccagaccatgcgcatctccatcgagaactccgaagaggccctcacagtccatgcccctttccctgcaggccagccctgttcccgattccttccctgacccaaggtgccttctaagcaacttctgcctctactggtaaccgagcatgactgggcgaattacagtctcctctaggggcaagacgtgacctatcatgattgaggtgacaaaaagccacttaggcctctcggattccaggcacaaggaggagagcctggcttcagggcccccgatgtgaggccaatcatggtacccccggggggagcctaaaaacacagccggccagggccgacaggttaagcttacactacaaggacgcccacggacgaacaaggcacggggaaggtgacaaaggaccccaggcgacagacaggaaaaccagagg

SEQ ID NO: 496563 - DNA, 892 bp, Homo sapiens
cacacggagcatattttcacctccgctagcataatcatcgctatccccaccggcgtcaaagtatttagctgactcgccacactccacggaagcaagtatgaaatgatctgctgcagtgctgctgagccctcaggatgtcatctttctttgtacaacccgtatggtggccgtgacgtgggaatttgtatgtgatgcgaagactctatcacttagacatcgtactacgagcagagcgagctgatactacagttgtaagctcatctccccactagtgtccctaatcaggatatgaggaggcgggtatgtggcgcatcgtaaagagaggcttcattcattgaatttccccataattctcaggctacaccctaagaccaaacctacagccaaaatccatgtcactatcatattcatctggcgtaaatctaaactttcttcaaccacaacgctttgtcggcctatccggaagtgccccgacggtttactcggactaccccgatgcttacaccacgatggatacatccttatcatctgttggctcatacattgctctcaacgaaggcagtaatattgaataattatcatgattagagaagcgttcgcttcggaaacgacaagtccctaatagtagaatgaacctccagtaaacgctggagtgactatattggatgccggctacctactagacgtgcggaagaaccgcgtattcgatccaatctatgacacaaaggagggatctgatcgcgacaaaggtggtttcaaggcaacccattgggcgcatgacgttttgcttaaaaaatggctccaatagaacagttggggcggctggccgcaaaaggtttcaaaacatggtggggggggggcccaaataagactgggccccagaaaaagggga

SEQ ID NO: 496564 - DNA, 1600 bp, Homo sapiens
taaaaaaagttttactctgtcccctaggagaaaaattgcaggtgacccgagaattgtgctgtggcgtgccctctcttacccgtgggtgtgcacaggtgtgtgagaacgtgtgtctctcaaaaaaaaaaaaaaagattcccctcccccgaggttggggccgtgaaataacccggtgtgttagggacacttgtgtggaaaaaatatccgcgggccatatattatatatgtataacgcacaatatgatgtgtgtgggcccattatacacaagagaggccccggggaacattcctggtatagcgtggcgtgccctcgacggggtgtgtatagcgcgcggttccacaaagagagggggggcgacgaggggggagagagaagcgcggagagagagagaacacacaaggtggggaggagagagaggggcgagtctctcacaccgctgtgagacacacacacagagagaaagtatatctcccactacagaaggtcccagagaacatctctctaccctgtgtgtgacactctcagagaggggcgccccccgaggagagcacagactatacacactatgtattcccccccagagcgtgtcgacacagaccactctctctcctgaggaggggagacacacagagaggcaccactatagtgtaagaaagagagagagagagtactcacacacaagagagagagcacctatgtgggggcccagagggcaccactgggagagaggcgcgctacacacaccccaggcgagaaacctcaccacacaacacattgtttggggacgaagagagagccacgagagagcgcgtgaggggggagcaacacacaccctgatgaggagggagacgacaggagaggagaatatccatccagaagagaccccaccactctctcgtgggggggggccaacccaacataaacataataggcggaacaccctatcaaaacgacagcacagcaccccacatatcactctccgctgataagaccatcgacggggggcgcataaacaaaacacccccgctggggggggacaagacggggacaacttacaacaacaacatttgtgcgtcgccccagcacgataaacgtgtggggtgaggccacacacacacatacagctggtgagaaacgagacgcccgcccgcctatatcccaccaccagagggggggggccacacccaacgacaggacgcgagtgggatacattgccccaccctatcatgaattaccacacgcgatggagagaaaagaggatacacacaaaacagaggataactcggacggaaaacagatacttcctcctcgcacgagtctctctcatttcatcacactctatcatcgacggggtggtactcaccccaaccggcgagcctcttctatccttcctccagacaaaaagaagagagcctggcgaccaagcagtcattctctgctgtgtggttcgccgcccacggagtgtcgagcgtccctctgttggtgaacaactggtgtggggttgcacctactaacccaacaacaatcgtgtggtcgtgtccccccaggattcttactcaccgtgatgagaaatcattcttatcggggtggtgacacccc

SEQ ID NO: 496565 - DNA, 241 bp, Homo sapiens
  misc_feature (76)..(76): n is a, c, g, or t
  misc_feature (105)..(105): n is a, c, g, or t
  misc_feature (107)..(107): n is a, c, g, or t
tagacgttgcacaagatatggttacagtcagaataaccatattataaactggatgttcgggtcttgggacacatcnctgggggggggggggggtatgactacttnangaccaacaattctgcagccaagctacaaaaaagagaaaaggttaaatgagttaagaaggaaaagaccaccagtcttacaaaattacattgtggaacattcaccaattctttaccaaagttgatgaccacctggg

SEQ ID NO: 496566 - DNA, 886 bp, Homo sapiens
ggcccggccccctggtccggacacttggcgggtgccacgaaggacccgcagcagcacgtgcggtcccccggcgttcctgggcgtgttccggcgcgtgtgcggacctctggggagttggggcgtgggggcgggggggtggggcggacatgccggggtgcgcacttggtgcccccctggcatggcgggaaggtggacctgagactccacgatggaaggaggcgaaatcctttctgaagggcctgagtgacaagcagcgggagtgaacattacttctgcaaggactttgtcaggctgaagaagatcccgacatgtgaaggagatgtcgaaaggggtggctgtgaaggtggaggagcccaggtataacacaggacaagcagctcaatgagaaaatctccctgctccgagcgacatcaccaagctggaggtggacgccatcgtcaacgccgccaacagtccctgctcggaggcggtggctgtggaccggcttgcattcatcgggccgacggcccctgttaccgacgagtgcggaccctgaagagctgtaagactggcaaggccaagatcaccggcggtatcggctccggcaagtacgtatccaacacagtgggggccatcgctacgggagccaggcagcaggtgcgagctcgaagtgtactgagcagtctgactgctgttgagaacgggtcgtcggggggtccctgattcaccggtgttggtacccttaagcggcgcgaacgtgtggcaactggaatgtgagagacagcaaaacgcttgaccgtccattaagtcaagcgactgtggtgaccttttcgcccccaagaaatttcgggaaaacaaaacaaaacaaacaaaaaaaacacctggaaagtccctaacgaaaaaaaac

SEQ ID NO: 496567 - DNA, 493 bp, Homo sapiens
  misc_feature (17)..(17): n is a, c, g, or t
tccggatgcagtaagtnaatcgtgtgcggcgaacggcggatgaggatgcggtcttgctgcaccaggctggcaaaggtctgcatgtcgaaattgacgctgatatccgcccgcgcacaatttccaccacgatctggctggagtcgggcaggacgatgggccggttcgacagcgcatgcggggcaatcggcacgagcacgatgccgcccagggtcggatgcagcagggggcgccggccgacagcgagtacgcggtcgagcccgtgggcgtggaaatgatcaagccatccgaacgctggttgtacatgaagtggccgtcgacttcgacgcgcaattcggccatcgccgcaccgccgccgcgcgagacgacgacatcgttgacggccatgcccacgtgaatcgactcgccgtcgccgagcacgctgcgcttcgagcaaggtgcggcgttcggccttgaagcggccaccgagaatttgcgccagcgcgggcacgtgcgc

SEQ ID NO: 496568 - DNA, 103 bp, Homo sapiens
  misc_feature (35)..(35): n is a, c, g, or t
cgtatagtctagaggatccgctccaccgagtaggntggacgctctctagtgagctgttataagactggcgccatgccaccctgaaagctagtgcgggtaccga

SEQ ID NO: 496569 - DNA, 287 bp, Homo sapiens
tttctttaaaatgctttgggggcccttttgtaaacaaattgcttttagattgttccaaaccaagcctaaaacccatctgtgaatacttaaatttgtagcttaatccccttttagacttgtgagttgaatgccaaaccagttgaacaaaaattatggcctttaaaaatttaacatgttttacctgtaaaaataaaaaagtgttggttggttttaaaatctggtaaccccctgatgaaaaaaaattttttttatacgggttatgtctctaaaaaagtattcctttgata

SEQ ID NO: 496570 - DNA, 218 bp, Homo sapiens
gcttctgcttcagggtgtccgacaaatcagaatatggtgttggtatgaagcggggtctcctcctccggcgggttccaagaaggtggtagtggcccgagcgggacaggtccgctcggacgacatgaaccactgctactcccgcctgcggtgaactggtacccggaaagttcccagagagagcactccagactatagccaggtggaaatcctacagcgcc

SEQ ID NO: 496571 - DNA, 109 bp, Homo sapiens
catacctggacttctggcataccttgaccttctggcatacctgaccttctgcatacctgaccttctggcatacctgaccttctggtatgccagaaggtccaggtatgcc

SEQ ID NO: 496572 - DNA, 500 bp, Homo sapiens
agtgctgtgattacagagcgtgaaccaccgagacccagtcctgaaatgtaatgtcataggaaatcgaagatttgatctaacaattattcgcgtaccaggcaataatatgaaactcagtgtattgtcataaagatatctaagctattactttttgaagttgtataaaaaggtgaagttaacatgttttaaatgaagtcgatgtgtctgtccctacatagggttgccatttctgtttttaaactttatgttgggttttaaagtacctgaattttcacatggactcatgctgggggacattgggatacaatactgtatggggtatatgcatcccataagggagtctgtcttaaattaacggcatatatccccctatccatgaatgtactctgttagtattgagcatcaagagtaatttttagcataaatgataacctaagaatatgtttcctttgtctgatcatgactgggattgtctgtgaatgccctcatggtattgaggt

SEQ ID NO: 496573 - DNA, 316 bp, Homo sapiens
ttaaggaagggtccccaggcttggggagagccccaaagttgagaacaagtaagtgaacaattattgtactgaaccacttgttacgaaacacgctgatcataaacaacctgtgtgtaatatttttcccctacacacgtagcacccttcagcaggaccctataaaactttcctccagcccttgcctctttgcaggtagccccttctctgctgagctgcccactgcaacatattttcacaatttctctaataaatctgcccttctttacctacaactatcttggtaaatggctttaccacctgcaaaactgaccctagg

SEQ ID NO: 496574 - DNA, 483 bp, Homo sapiens
  misc_feature (209)..(209): n is a, c, g, or t
ccaagctggcttctcctctgaacaatgggatacctgcctcaggggttgctgcgaggactgagtgcttagcacagcacttggacaggaaactcaaaaatccaacggagctctcagtggtttcacagaggaggtggcagctgaggatctggcctcagaggatgttaggatttcactccgttactcatctgtccctttggccattgccatcntggtctgtctccacagctcctagaaggaaaggtcggggctgagactgactttcggctggcacagggcctggacgaatgaggccagtgaggcatttcagatgcagagtttaccggaatgccagcaaattgcatgataatattttaatccaatgtggtaaaaaaaaaagtttttaattaatgcaaaagtccatgatgaataaaatatcaaaaattaaagacaggatccgactttgcacgaccctgcctcactcacttcctgctaatccacggaacc

SEQ ID NO: 496575 - DNA, 1444 bp, Homo sapiens
cgtgctcctgtgatccccgtgtgcgagggttaacgctgaggccccggcctcggtccccggactaggcctgtgacccctgggtgccatgaatgcagtgagtggctcgagcgctggcagccgcgtgctgcgggaacaaggctgaaacctgccgccctggcggaggagaacaatgaacccccacctgccggccggccccccaggatgtgggagatgacaagaggagggcagcgacgggatggcgaggtcacacgggggacggcagactggcaacgacgggcggacgagcacgcggcatgagacaacttccccagcgagacgctgggaccacaagtcaccattggaaggacattcaagggacgcacggatgaaaaccagcctacgaaccaaaacggccgggtttcgaggcaaaggaagcgcgagcattcgctgcctgcgtgggcctcattgcggtcatgccgtgaccctttccgacattcaacggccggccttcaaacgccaccatagtaggtacctggtcttacagcggcattgtaggcaacgggggcattattctttccaaccgttcgagcgcttaagtggcgcaactcgggaggaaccgtatatttaggcatcccagcgcatataccttggcgaaagcgagaccgcagttgggcacacacccagggaacgcgccttggaattactacgaaggatataccccagatacgcacgcagacacacggggggcaacaaaatagcatttgcaggatacgaaacgaaaccgccactatccctttggcacctttgaaaaggagtggcgacacggcccataagttcttcacagagcagtcccattcgattgggcatcgatacatttccatatgagttgcagcacccaaggtcacgggcacgggcttacgcagcaagcgacgtggccacctaggacacagcaatcctcatggcagtatgacctcttgcatttgcacggaagaagaattctcaggtctaccttcaagacaaatccccgggccggtgtgcccatataaacaagccagtttagttaggccgcggcaacgggtgggttacactatatttaaatttcaagcggaccccggcgggctcataactggaaagcgtacccctggaggaacacacagtcattggacattagtatgatgtcgagccaacgattccttttgacgaatatccgcgcggagccatcccggaacagggacatcggcaattaggcgaataaaccgccagacacgcggcaacagccaacccacttgttgagaacaccaccagtcgggcggggcaaaccgataacccatacgacatggtaacacaccgggcgatagaaaacctggtgctacgagcactaggtacccaggagcaggcccaacaacgatggcaggtcgcagagcacctcaacacggcgcggaccacacggccgaggggcagatcg

SEQ ID NO: 496576 - DNA, 1054 bp, Homo sapiens
  misc_feature (503)..(503): n is a, c, g, or t
cgtcttttttctctgtgttgtttggggtgtatgatggataaaagaagatatgaaggaagagcacagggggcggaggaatggtttgtttacaacggaggcttgtctactatatatgtggggccatcgtctagcatatcgatggtcttactcgtaagacgtgattatagatgtcctcccgcccgaaaatgtgctgttttgagggactcttaccctaggggcccgtttcccgtagtgaccaaagttcccgcccccgggggtcctgccctcttcccaaactggtgttttcaacttccctcggcccgattgctttcctgcccccgagggtggcccgtgtggaatggcttacccaggccacctgacagggagaatcctggcttcaacggggatttgacacgcggattctccccccccctgtgtcctggactgggccacccttggggtcatagcacccgtcccgtccatcggcgatcccccgcgtaattgtggtactccagccagagganatatgacactccccgaacggagaagaactgattggggcttccacaccgccctcctctccccagagaatcccggctcctctccccaggaatcccggtgctttcccgacttcccaagggtattttaaatagccatactcttctctcttagcccttggcccactttctcctggatcctgccctgctttcagccattagtgaaggacccgacccttaggagttctgcgagagcctcccttggttccctcgtgaagacccatataacacggatcgcctttggccatagccctgagcctagagggccctctgatgccccacctgaggtgctgttggtttattgctggccacgtgaattctctcacaggggttctaggaaggggcacttttggagactgcctgacaccacacccctatcccctgcctccccctctcagaagagggtggaagatgaaatgaaagactatgggactcttggaggataccccgtgtctatttctgggttagagaagtgcttactaaaggggttttctaataaaaaccaatgccccccttga

SEQ ID NO: 496577 - DNA, 818 bp, Homo sapiens
cagagtttctatcaaacttatttttgtgatatctccagcatatcttttctgtagtgacagacacttcacgatacgtgcttggtttaacaatgcatgcatcaattcttgcatatatgtttaattggggttgaagaaggaagaaaataagtacatcattaaatcctggaaatccagttaacaaccaaatctttcttcaggaatatgtggctaactctccttaacgtcggccttccctcacctacaagatgctcaagtaaacgcgtcttagtgacagggcttttcagcttaaatcaagatgattcctgcttttcaaggaacatttaagagatttcctagttcaagataaaggaatttgcaggtgaagacacttctgactttgttttatggacacgagagacgaaaatagccctagcggcaggctgactgaaggagaaacagtaaggacgtcaaatgtctgtcccgtggcatctttaatccagcatgagattccagaagaaatgtgtgattaaaatccaagattcatgctgtttctggtctctgcaactcgttcagcagaggaaaacagcatgttggggtattcgtcagacaaaatgatgccaacttttgtaaattcaaggatgtcacctattggcccttttgtcttatgtgtcttatgtataagaaattttctgtgaaatatccttccattgtttaagcgtgcgttcagggtccatctttattagtttggcatggaagttgaccattaggcttgttacaaagtttcacttcttgccattttgtgctgggcggggcagaggggccctccatggaaatctttc

SEQ ID NO: 496578 - DNA, 407 bp, Homo sapiens
agagcagaacttggactgagtcctgcaggacacaggtattagcttttctcttttatttgctttatgtttcatttacttctttggatcgaatagctccaattgtattgctgttatttggtttttcattttgttgttgggttttttgatgtggcgtttttttgttttgctctgtttctttttggctttttagaaagagggttttcctgtattgccctgactgaagtacattgccgtgattactggtcactacagtctatatcttatttctgtcctcaagcaatccttctgtctccattttctgagcagcatgtgctctagccatgtgccaccggcccaacattgtctagaccttttgatactgaatcctttccgcatactttggttgatggacttgcttattcctttac

SEQ ID NO: 496579 - DNA, 498 bp, Homo sapiens
ggacagctgtggaaaagaactgacaaggctggcacagtgactcacacctgtaatcccataggcagcactttgggaggccgagcaatgcagatcgcttgagttcaggaattcaagaccagtttgggcaacaaagcaagaccctgtctctacaaaaaaaaaatacaaaaactagctgggcatggtggcatgggcctgtagtcccagctactcgagaggctgaggtgggaggatggcttgggcctgggaggcagaggttgcagtgagccaagatcgtgccactgcactccagcctgggtgacagagccagattctgtgtcaaaaaaataaaattaaaaaattggaccaacaaaatttcagggcagtaactaaagggcgtgtttacaggagttaaacactaggactgatgtgttcaagaacagtacagggatgggtacgggggcttacacctgtgattccagcacttgtgggaggcccacacagtcagctggaactcaggaa

SEQ ID NO: 496580 - DNA, 173 bp, Homo sapiens
ccctaagtatcctttgattcgattcaaaaaggactttgatatctctcagggcttcagggctatcattgtgagcaattgtcttttatatacgggactgtaaccaaactaggcccgtctgtggcattctctaaatgtttcttttttaccccataaattccttatatccgcttgga

SEQ ID NO: 496581 - DNA, 112 bp, Homo sapiens
gcgcagacagttccagccgagagttcccatatcttcttccatctcattctacactggtaaaactacacccaccaaagacactgcagcccaagcaatcctgcctgacaagcaa

SEQ ID NO: 496582 - DNA, 388 bp, Homo sapiens
aaaaaaaaaggggttttcccccccccggaaaaaacttttttttttatcaccagccaaccccccccccgcttttggggggaaagggccaaaaaggatggcccctttttaaaaaaaaaagttatttcccaaatcccgggggaaaggtccccccgatttttttttccccgggggaggaaattcttttttttaaaaaaatccttttttcgcccccaaggggggccccttcccgacccaaaaaaaggggggcccttttccccaaaaaagggggaccaagtttgggttttttaacccccttcctttggggggttttttttttctttggtgccttaaaattccaacccaaaaagttgtttgccggggggggaaaaaagttaattccaatttttta

SEQ ID NO: 496583 - DNA, 267 bp, Homo sapiens
agcaccttctcattagttcatttagtcccataaattattattttctctgcttgatcttggtggacagatttcatgaagctgtcagttagttcattaaagtttaggaaattctcagacagtgcagtggtatcagaaacttgtattccagagtacaggtcagagtcttcttttcttttctttttgagatgtagtcttgctctgttgccagactggcgtgcagtgttgccatctgcgctcactgcaatctccacctcccgggttctagcc

SEQ ID NO: 496584 - DNA, 324 bp, Homo sapiens
gacaggttagttttaccctactgatgatgtgttgttgcttggcctggagacggatacttggctttggttaagaatcttcctcactgatatgatcatctatcagggtcaatataaaacggcgatcagcccttgcatcacttgagcagctctccaggtatccatttctcagccacagatcacaggggcgggggcccgggaggcatcagagggcgctcatccagctggcgacgtgccactttgcccctaggggagtacagaataacatgttaaaggctcctttatttgatggtcctacaggctcctccccattcagggggggggcaa

SEQ ID NO: 496585 - DNA, 667 bp, Homo sapiens
tagcccggtgtgtatggatacaatcgagacatacgactttaatctttaaaaaaaatgcattaataaatcactactcactaaatacaaaaaatctgatcaaaaaaaatgcctcgccctcttgggaaaaatgccgtttggacattgaacagagatcaggatgaggggaggtgatacatgtcgacccaagtaaaaagggagcctgttttgaaagagttggttgccgcagagtacagatgtgaaggcgtccccatcataagagcatatttggtgatcgagctctgaacccgttcgggaggaattagcatcgggaaggcttcttgagctgtctgcccccttgatggaccaatgaccccctcagattgttagatcggccccgtggagtcagaagcccctacctgcttgatgattaagcgaaggctcaatggatcaggaatgaaggggagccctccaattctttattgtcttgggggtcctgaaaaaattctcatggcggatgaatgaccagtgctgcaaataagcacacattgtgaccatgtcgggatgaccgcatagataccaggggtctgatattgtggccatggcacccaagttctgttcaccgatcgctgcgaataagaccctttttgcccatgagttcgatgctggaaaacgcaacttccgtatgaaa

SEQ ID NO: 496586 - DNA, 212 bp, Homo sapiens
cgccaccacagtaacacatcccggcaggacacaaacacatacacacgcagacacacacacacacgcacacacataccacatttcaataagtcttcatggttctgggtccttacctttcctgtcctcctgttatatgaacacacacacacacacacacacacacacgcgcgcacaccatatttcagtgtgtgcatggtgtgggggcataacgg

SEQ ID NO: 496587 - DNA, 595 bp, Homo sapiens
gaggttgcgggttcgagccttatatcccccgcccgtgattcctgttgtccagtaaagttctgctaagtaggtattaccttctgattattggatctacgaagagttgccctcctttattacccctaccgagtgagcgcctagaagcaactagcctgctcacttaatagttatgtcatccgctcttattaattcatcatcctagcccctaagatctggcctatgagtgagcgtacaacaatgggagttagacctgacaccgtacacaaataaaaaacaacaaaagatatataagaacaagaggcaatgtgtgttcgcgccgtgtgggtcccagcaataattgttaggacagcaagccggtaggggtggcgggaccccccgggagggcgggagacatacgcgggcgaagcccgaggattccacaaaagatgacacgtgcggaagccatgaagggcagccgggaggctatgccctcctgtataaaaaactaccgaggggcgaacaacgagacacgtcccggaccaaaaacaaaaagggcggtcacgagagggcccaacgggggctctacaaacacggggtgcccaggggacgcaattaa

SEQ ID NO: 496588 - DNA, 432 bp, Homo sapiens
ggccctgcgtgttctcctcctcgcaggacacccttcctttctccgcatcaggctgcttcttccttatgtactctcacagcacttactatgctgtggtatcttactgggtgtgattctttgtccgttttcctacctaccccttaaggtctgtgtgcgcaggtactgtgtcttccttggctgagcctagtatcctaactgcctgctgtggtgcctgacacatagtaggcattgaatacatatttgctgaatgaaataatgagtaaaagctaggtaatagaaataatacttaggtctaagagggaccagtctttaataagtagttgtttagctacttcatttagttaaaaaggacatcttaataactaattacttagtgccattactgccatctagtggtgactgatgttattatactgctgggtccattctcaa

SEQ ID NO: 496589 - DNA, 802 bp, Homo sapiens
aagtagaagcaacagttgaaagctgttatatcattatcacgatgtgatagtttgtggaaggtccaggagacaccttgagtgccttgtagtgcactaaaggagaagtactcgtaagagtgtttgcgtccttggttgcttcgttggcttagaggacccctgtgccaagagcattgttttgcgttgcgtagctacaagggaaagtccctttgactgtgcggtcaccagtccttggttggcatgaggctcacgacataggtttgtcgtaacagaatcactaagtatggctcctactagaagggctaatcgttagatcacttagtgcttcaaagtcgtgatagcagctctgtgcttttgctgtgagccgttaacggatagaaagtcgttttgcccttattggagctaaggagtggaggactgcatagcaaacacagttggataagtgctatgacttgagtcgtaggcgtgcgtccttggaaaaagtttttgcagtgacctgtcgaaatggtactctgccgtatgttacaggcatggatattaccattcattttattaaggcttaaaccataaggattcataaatttgttcccactgaatatagggcccagctggtaacctcgcgtggtcaaatggaaagttgttggacttgtggaattggaaggcagacacttgtgaatcgttattagttgtcaaaggagatgtgggaggaggtgactttaaccttgggtattggattgatcccttcaatactgatgaaaatggggggtaaagtagtagacatttttaactatttaattaataaggg

SEQ ID NO: 496590 - DNA, 234 bp, Homo sapiens
acacccaggactccccttataagtcattgtctcagatgttgctcatctggaaatccagatatctccctatttaagattcttagctggtctgccgcagcctcctggtggcttggattaccggctcctgccacctggctgggttgttggtttttggtgtctgcggtggaggctggggttccaccatgttgacccagaccgggcctgggactccctggacctacaggagatctaggc

SEQ ID NO: 496591 - DNA, 783 bp, Homo sapiens
gtcccagggcatatcagtacaagaaggccctttttccatagccccccaccaaagtagtgtgtgtgtgtgcattttaaccatcatgcagtagtaaaaatatcttattctgaattccacgtctcatggtttacccaatgaagtttcaactttatattcgttttacatcattttcgtgaaccttttgtgcaagaacattcttctcagcattatgcacgtactaaatccagtatttttcctttattctgacttctctgaagaatttactttctttataatattttactggagacagagtctacttggtggacacaggatgggagtgacagtgggtgaagaatctcaggatacaatggggaaagacatcaggacaatcacggggattacaaggcgatatctccgtgccatcgagcctcacggagatagcggggaattaacaggcaccgtgccaaccaatggcacaagcatacataaacgggaggtacaacacgaaggagaatgacggtacacaacactgtaggaccaggaatgggatcatcgaaagatcctgacacatcggtgatgcgggcacccaacactgggggacatgccacaaaaacggggacggggggactcaaccacgagctggtggaagcacaacacaaaagcctggaccatacaagacaaagtgtaagagcatatcaacgaaaaaacactctcaatcatataaccccaaacacatgacataacacagatacataaagatgaatcacgagcacacccataaatctacagaaataatccacc

SEQ ID NO: 496592 - DNA, 417 bp, Homo sapiens
  misc_feature (147)..(147): n is a, c, g, or t
tgaataggaaaaaataaagttagttttgggaatgggaaccttgctattttattattcttaaacccttaacctttcatggcctagccaccaggagccagtagctgtgagttagtgtggaaatggctctttgtagagggaaccagaggntgcagacagcaaaggtgagaggatgttggctttggagagggccgttccccaactgcctccagcccagagcagggtggggaaagccctgagagtctttgggcagaagctggagtgggtggagaggggaagctccggcccctgtgtccaggtagcaaagccctgtcctcacattttttacttgcaaccaggacctacatgtgaaatgatcacttctcattaaaaaccaccttcactgcactccagcctggggaacagagcaagactccatcc

SEQ ID NO: 496593 - DNA, 1312 bp, Homo sapiens
gggaaccgttggtgcgaggcggtggtgaccatcgaaaggtgcaagagccagatcacctgttgacagtccgatggtgcctttcgtccaagaaggtatttggacaatatctcaccaaaaattattgtgaagacgaattacactctactgtgactggttgcagcggtagttgctaacaggcagccggagatgcttaccggaattacgttgacttccagaattaagccagggacgacaggaagaggcagcgaagaccgaggcattcaaatttgcaattaatcgtggtcacactgtctggtctggagcttccttgagcttgaacgactttggggagaccagatactgctatctgatcgctactcttccccctgtgcatctcgctctcttcgtgtcgtgcctgccctcggctgtgtcctgcggcgacgcgttctgctccgtggccctgccggctagtgcgggctgggtgcgtgcccccctgttgggcgtcacctggatctttgccgcttggcgttcctcttctggggccctgtttggccctttgagtgggtcactcccgcggggtcgcgcaggtcacactgcgtggtttctgtgtgcgacgctctctctcgccgtggttggttggcccaaggcccctctgtgagctgtgctgattcttcttgttgtccatcccattgggtaggtattaggtgtcctcgagatgcgtagtcgttccttggtacgcgcactcttactatgcgggggtcttgtggtcttcgctccgcgtggttcgctctctcgcggcggtaagaagcctctggcgtcttttgtagggttttaccccggcgcggcagtctggtgggtgtgtttccgtcgtcttttggggggtttcccaccttcgctgtcccctcccagttttccgtgctgtcttcttggcggcgtcccgcctggtttgactcgcgtgtttgacggcatggattcttgctttacgactctcggtgaacatacgtctggttccccgcttcgccagcacacgcgcttgtgttggctttgcccggtcttgatccgcgtttgcctgggtcgctgtggtcctcctcatgtttctgtgcttcatcactttaccctgggccccttatccggctgctgattttgcaaatacccctggtccacatcttggtgttctctctggtgttttgctccctccaacactctctccagtgactctggattgccgcatacctttgcgctcctaatcgcctgctctttcagttatcaagtcgcggctgactaatgtttgccttgatgcgcgcctattcttatctccgtgtcatgacaaagt

SEQ ID NO: 496594 - DNA, 242 bp, Homo sapiens
gtacaaaaaaaagagggggggctttttgtccccctttgggtttttggggggggcccccctttggggggggggggaaaaaaccccccgccccccccccccccccccccgggggggggggggtttttttttcaaaggggggcctttttccccccccaaaatgttgttggggcccccccctttttttttgggggggtttttttttttttttggccccccccccctttttttttcccgggggggga

SEQ ID NO: 496595 - DNA, 516 bp, Homo sapiens
ttgttttgccaaagcccaccctgtaacacaattgtattagtcagggttctctagagggacagaactaataggatagatgtatatataaaagggagtttattaaggagtactgactcacgatcacaagctgaggtcccataataggccgtctgcaagctgaggggaaaggaaggcagtctgagtcccaaagctgaagaacttggagtccaatgttcgagggcaggaagcatccagtacgggagaaggatgtaggccagaagactaaaccagtctagtctttccaagttcttctgcctgcttttattctggttgtgctggcagctgattagattgtgcccatccagattgagggtgggtctgcctttcccagtccactgacccaaatgttaatctcctttggcaacaccgtcatggacacacccaggagcgatactttgcatctttcaatccaatcaagttgacactcaatattaaccatcacaacaacttaaatgttctcaagtattaaaaaaaaaa

SEQ ID NO: 496596 - DNA, 1021 bp, Homo sapiens
cgtccacaaggcacgggggaacgagtggaccagctcttcaactttgatgttcatgacgatgtgcggttgctcagatgacgccacatgtggagaaggatgagtcccagtgcaggcaaggtggtgctgagcgagctggtacgagaagaacaatgctaagcatctttcccgcacagtgcgcgtgggaacccgtacgagccgtgaaaagaagtgggacgaacgtacttcgagtccgcgtgacgtcactccaggagtgctgcagcgtgccccggtctcctcagctccctcagtgtgccccgtgggtagtcaccgggagctccagagcaaccactgacttcgctccctggccgaagactagttggcgcaggacaacgtcatgagggaagggatgggaacggtcaagctagtatcctgtgtcacttgactcgcacttgaccaatcagtcacgttgtaactggcttatagtatcgtatttacgcaagtgaaacggaaggatgcaacgtgatcaaagagctgagaggcagcacatggcgatttttgagtgcaggaaaaaatgccctagataatacaaaaaggaaaacagtcaccaaatagaaacctagtacaacctaagcgatagatccaacagagtcacattacccatgttacattaacctacggaactgctaggaaacaacacaattgggggagatggaattggcaggatcagacttaattgtgccgaacccattcaggaagggaagttggctgattcctgactggcactcccagcgcacggaccgtggcgtttacgatccgtggtgtgcgccatcccagtcgataatagcgctgaagtgtctcccacgttgggagaatgtacgcgagaagttaaaagcatcaagcttgtcaatatactatgccagagggcggtaacggctacgcaagagcactgcacttagtatcagttgtaggaacaccagacttatggatcttagcaacgtaacccaatgacatactcggtgacagtgttcggaaagcacctaac

SEQ ID NO: 496597 - DNA, 684 bp, Homo sapiens
gcaccccttggggccccccagagaaaggtttccccaggaaacattttagagaatgggcgacacatgtcccctgcgcaatatagaggggagaatatttgtgcagagagacaaattttgtggagaattttctgggtgttctcctctgtgtgtgtctcacaaagacattgcacgctgttctccggtagacaccccccatggggtgtcctataggagacagagaggagagtgggcgggtggggtgctcacaggagaccccccttggagagggcgccccacacaccccctgttctcctctcccgaggagcgtcccttctttcacacactgctggtggcggcaccacagggcctgtggagaggaaaggagaacttctcctcgctgttagatttgtgggctcgatataagaagatgtgctcttttgtgttaatattaatagtctcgtggccactagggtgtaagaagagtagagggcaagaagagcctcgtttggcctctctctgtcgctccttcttccttctttcccccacagaattgagactcttctgcccctctgattcagccccaacctggcctagacccgccgacagagcccggagaggctcaatgcatttcgcagcccccacccccaaggttttcccacatcacagcccagcccaccccctgggtaaaaaaaatggtttgtggga

SEQ ID NO: 496598 - DNA, 426 bp, Homo sapiens
  misc_feature (419)..(419): n is a, c, g, or t
atttccttactgcctcttgctgtcaagagtacaatctatgttaaacgaaaaacatacttgagtaataccatcacacagattctgagtgtatggcccataggtaccacggtggaggcgtgcataccattgacgcgtctaagtccgaggagcacgaccacccacatgccttgcagttcttgagaaaggattgcaccaacgtcaatggtgagtagaaacggtaattttacaaacagataattgatatgatccggatgcgtactcagttaagctggtggcgtcaaatgagctgactaaattgcatggagcagtgatgcttaaacgatctgctgggagatggtatgccagtctatctacttgcatctatataacgtacatcgaataataataggcgtgctgataaaagctggcattaacgcttnctcttct

SEQ ID NO: 496599 - DNA, 422 bp, Homo sapiens
cagggtggcagagaccacagctcaatggagccaaggccaacactgcaaccccaaggcactgcctggtccagactccccctcacacacccagggccagctacttttccggtctgtcttctgggatccccaggactacctcctgctcctagcttccctcacaccagggggcgcagtagagcaatcagcacccactccccatcccatttcatacccaagccttcagtctcatagacagttttgtgctcgacccaaatggcactagtggccacgaagactctggtatggtatagacctgagagttacccagctgatctaccaaccaacatctacacactcagctaagaacaaaggattcctcagactcagcacagagcattttaggtttattaaataaaaattataatttatacaagaaaaaaaaa

SEQ ID NO: 496600 - DNA, 171 bp, Homo sapiens
tttcacacacatacacacatacacatgcattcacagcacatgctcacacacgtcacacatacacttacactcacagtcacatacacccacattccacatggactatacactagtttgtgtgacgtagcactggtgtaccgacgctcgcaattcgtgaatcatcggtcagta

SEQ ID NO: 496601 - DNA, 349 bp, Homo sapiens
gcctacctcaggtgtctccgacagcccaaaggacagagcccgctgaggactcgggggagtcagaggcgctggagtgcagttcgcagcatccatcccagctcctgcctcctgaccctgcccctcggtttgccacgtcgcgtgtgcccatttcccaggatgcgcaggtcccacagaagatgagcgtgtccctgcccgagggaccagcgtccccagtagtccctaccccagactccgtggagcaggagaagttcctccgtcaccactttgagacactgactgagtccccctgcagagagctcttccccgcagctctgggagacagtgtgagtgccctccgtgaagcgtgaaa

SEQ ID NO: 496602 - DNA, 814 bp, Homo sapiens
  misc_feature (20)..(20): n is a, c, g, or t
  misc_feature (92)..(93): n is a, c, g, or t
  misc_feature (132)..(132): n is a, c, g, or t
  misc_feature (145)..(145): n is a, c, g, or t
  misc_feature (147)..(149): n is a, c, g, or t
  misc_feature (151)..(151): n is a, c, g, or t
  misc_feature (153)..(153): n is a, c, g, or t
  misc_feature (158)..(158): n is a, c, g, or t
  misc_feature (162)..(163): n is a, c, g, or t
  misc_feature (179)..(179): n is a, c, g, or t
  misc_feature (181)..(182): n is a, c, g, or t
  misc_feature (184)..(184): n is a, c, g, or t
  misc_feature (186)..(186): n is a, c, g, or t
  misc_feature (191)..(191): n is a, c, g, or t
  misc_feature (193)..(193): n is a, c, g, or t
  misc_feature (195)..(195): n is a, c, g, or t
  misc_feature (200)..(201): n is a, c, g, or t
  misc_feature (212)..(212): n is a, c, g, or t
  misc_feature (219)..(219): n is a, c, g, or t
  misc_feature (236)..(236): n is a, c, g, or t
  misc_feature (244)..(244): n is a, c, g, or t
  misc_feature (246)..(247): n is a, c, g, or t
  misc_feature (256)..(256): n is a, c, g, or t
  misc_feature (265)..(265): n is a, c, g, or t
  misc_feature (268)..(268): n is a, c, g, or t
  misc_feature (270)..(270): n is a, c, g, or t
  misc_feature (276)..(276): n is a, c, g, or t
  misc_feature (282)..(282): n is a, c, g, or t
  misc_feature (288)..(289): n is a, c, g, or t
  misc_feature (294)..(294): n is a, c, g, or t
  misc_feature (300)..(301): n is a, c, g, or t
  misc_feature (322)..(322): n is a, c, g, or t
  misc_feature (331)..(332): n is a, c, g, or t
  misc_feature (335)..(335): n is a, c, g, or t
  misc_feature (341)..(341): n is a, c, g, or t
  misc_feature (349)..(349): n is a, c, g, or t
  misc_feature (360)..(360): n is a, c, g, or t
  misc_feature (370)..(370): n is a, c, g, or t
  misc_feature (376)..(376): n is a, c, g, or t
  misc_feature (389)..(389): n is a, c, g, or t
  misc_feature (440)..(440): n is a, c, g, or t
  misc_feature (462)..(462): n is a, c, g, or t
  misc_feature (466)..(467): n is a, c, g, or t
  misc_feature (469)..(473): n is a, c, g, or t
  misc_feature (475)..(475): n is a, c, g, or t
  misc_feature (478)..(478): n is a, c, g, or t
  misc_feature (480)..(480): n is a, c, g, or t
  misc_feature (517)..(517): n is a, c, g, or t
  misc_feature (519)..(520): n is a, c, g, or t
  misc_feature (526)..(526): n is a, c, g, or t
  misc_feature (533)..(533): n is a, c, g, or t
  misc_feature (537)..(537): n is a, c, g, or t
  misc_feature (558)..(558): n is a, c, g, or t
  misc_feature (562)..(562): n is a, c, g, or t
  misc_feature (564)..(564): n is a, c, g, or t
  misc_feature (568)..(568): n is a, c, g, or t
  misc_feature (573)..(574): n is a, c, g, or t
  misc_feature (577)..(577): n is a, c, g, or t
  misc_feature (582)..(582): n is a, c, g, or t
  misc_feature (593)..(593): n is a, c, g, or t
  misc_feature (597)..(598): n is a, c, g, or t
  misc_feature (602)..(602): n is a, c, g, or t
  misc_feature (614)..(614): n is a, c, g, or t
  misc_feature (648)..(648): n is a, c, g, or t
  misc_feature (657)..(657): n is a, c, g, or t
  misc_feature (674)..(674): n is a, c, g, or t
  misc_feature (680)..(680): n is a, c, g, or t
  misc_feature (702)..(702): n is a, c, g, or t
  misc_feature (707)..(707): n is a, c, g, or t
  misc_feature (711)..(711): n is a, c, g, or t
  misc_feature (715)..(715): n is a, c, g, or t
  misc_feature (718)..(718): n is a, c, g, or t
  misc_feature (726)..(726): n is a, c, g, or t
  misc_feature (728)..(728): n is a, c, g, or t
  misc_feature (731)..(731): n is a, c, g, or t
  misc_feature (746)..(747): n is a, c, g, or t
  misc_feature (768)..(768): n is a, c, g, or t
gccctggctgcctccacccnctcccagggggaccaaaagccttcatacatctcaagttggggggcaaaaaaggggggggggggggggggggnncgtcgttcgggataaaacaaagtgagagggtgttggggnggggttggggggntnnngngntgcgnggtnngcgcgggggcggtgcngnngncnccccngngngggcnnggggggggggngggccantctccttgggggggggngggggggngnnggggggggnggggggctnccngngacggngcgtcncgtgtnnggggnggctgnngggggagcggcggggggcggncggggtccnnggncgcatngggggctngggggggggcncgctccggcnggcggnggtcgccttcgcngttccggtttttgggtccggggtcgggccgggggggggggaaaaaccgggncggggcgggaaaaacaaatagngccnngnnnnncncancntgttttctgcgcaagttaggttttgtcaagaaagggngnnagcaantaagtcntggnccgcctagaagcatttgcggnggangntggnggggnnggnctcgncatactcctgnttgnngatncacgtctgatgnaaggtggacagcgaggccagggtggggccgccgntccacacanaaaaaaagcgctccggnggggcnttgttcttgttcttctttgtgntgggngccngggnggnggtctccntntgnttcctgtcggctttnnctgggtttttggtggtgtcgncagaccgcactgtgttggcgtacaggtctttgcgggtgtccacgtc

SEQ ID NO: 496603 - DNA, 863 bp, Homo sapiens
  misc_feature (35)..(35): n is a, c, g, or t
  misc_feature (63)..(63): n is a, c, g, or t
  misc_feature (73)..(73): n is a, c, g, or t
  misc_feature (115)..(115): n is a, c, g, or t
  misc_feature (118)..(118): n is a, c, g, or t
  misc_feature (120)..(120): n is a, c, g, or t
  misc_feature (165)..(165): n is a, c, g, or t
  misc_feature (167)..(167): n is a, c, g, or t
  misc_feature (189)..(189): n is a, c, g, or t
  misc_feature (191)..(191): n is a, c, g, or t
  misc_feature (199)..(199): n is a, c, g, or t
  misc_feature (318)..(319): n is a, c, g, or t
  misc_feature (333)..(333): n is a, c, g, or t
  misc_feature (349)..(349): n is a, c, g, or t
  misc_feature (357)..(357): n is a, c, g, or t
  misc_feature (418)..(418): n is a, c, g, or t
  misc_feature (451)..(451): n is a, c, g, or t
  misc_feature (567)..(567): n is a, c, g, or t
  misc_feature (585)..(585): n is a, c, g, or t
  misc_feature (616)..(616): n is a, c, g, or t
  misc_feature (620)..(620): n is a, c, g, or t
  misc_feature (670)..(670): n is a, c, g, or t
  misc_feature (676)..(676): n is a, c, g, or t
  misc_feature (682)..(682): n is a, c, g, or t
  misc_feature (753)..(753): n is a, c, g, or t
  misc_feature (765)..(765): n is a, c, g, or t
  misc_feature (778)..(779): n is a, c, g, or t
  misc_feature (787)..(787): n is a, c, g, or t
  misc_feature (823)..(823): n is a, c, g, or t
gacaccaaagaacaaggtaagtacaaaaaagcagngcagggaccggaccggaaaacccgggancgcaggagcngcgcctgggtccccatggcgcagaggccggctccgcgtacgncgncnatcctggcgcaggccgtgggctgcgtcttcctgctggagccagancngccaggctcggcgctgcgctcncnctggagcncgctgtgtctggggcccgcgcctgcgcccccgggacccgtctcccccgagggccggttggcggcagctgggacgcgcttatcgtgcggccagtccggcgctggcgccgcgtggcagtanngtgagtgccaacgnggcctgggtctctgancctccgangacggccttggaggtcgggcggacgcgcagaaacagggcttctcagaggtccccgggaggngcagctgtccgcgcaggccccttggcgagaagngtcggacgtctgagtggaacccggttcgtcaccgctgctctttccactcggctggcctctgcgcctttctctcatcccggttcttctttgcggtccagtaggtccaaagcaacaanagcttcttgatgacaatntctttgttccaccagagtcattgcaggaagnggangagttccacctcattttagagtatcaagcaggtagaaaccaccaaaacanacaacnccactngtattccagttcacctagagctggccagtatgactaacagggagctcatgagcagcattgtccatcagcangtctttcccgcngtgacttcccttnngctgaatnaacatgagctgttatttctcacccagtcagcctctngacctcactcttctctctcttcctggaacggtgttcctga

SEQ ID NO: 496604 - DNA, 375 bp, Homo sapiens
gagctgcctcttagccccaaagtgctgggattacaggcgtgagccaccacacccggccaacaattgtgtttttattgagagttgctatatgtcaggcactattttcagtgctttatatatcttaacaaatttagtctttacaacagccttaagaataggcccattttttagtcttcattttactgataaaagaactgaggtacacagtagttaagtaagtcgcccatggtcacacagttaagaagtggcagaggctagaagacatactccatctttagagtgctcagatttaaccactgttatctttccttttagatatttgagcatgctattatggcacgatgtagtgtggctatagtggagatgcagtgggat

SEQ ID NO: 496605 - DNA, 458 bp, Homo sapiens
gagtccaccttagaaaaacagcctgtcgctctctcagaacctttgctatgtgtgaccccctagagccttcatgtggatcgcagcatgttaagaacgctgtatctgtatctgcctgagagtgattagagggtcttcacgttaagcagctgcctctgtcccaccatgggagggataaggggtcatagcagctgcctctgtcctgcctgagagtgataaggagtcttcacgttgagcagctgcccctgtcccacctggaagaggattaggggtcttcacattgagcactgtggctgaaggttcatgtactgttgtcttaattttctttactcctcctccatgcagtgtccttgaatccgacccctactttgggtttgaagaagcacagaggaagttacaagaaagaccctggctcgtgaattcctacagcgagtggcttcagagattaaaggtatgtggag

SEQ ID NO: 496606 - DNA, 269 bp, Homo sapiens
acgagaaatgcgagccaaaaacccagtgccccagctgcgtaaatttacaaccaatgtgtcacccttttcgacaaaatgattcaatctagtcatagccagaagagtgggtctcctatttcctcagaagagcggcggcgcagggatcagcagcatctggatgacttcacagcagctcgggcttctaccaatttcaccatatgcccaggcagatgctctccataagaagaatcctgggcacttcacagacacaggacaaacccgaatcatga

SEQ ID NO: 496607 - DNA, 231 bp, Homo sapiens
gggttttggcccaaaaaaaaaaaattttttaccacaagggggaaaacccggggggggggtttttaccccccccgggttttaccccccttggcccttttttttttggggggccccccccccccccccccacctcctggtttttttttttttggcccaagggggggttccccggaaaaccccctggggggggggggggggccccccttcttttttttaccccttgggggttta

SEQ ID NO: 496608 - DNA, 399 bp, Homo sapiens
  misc_feature (358)..(358): n is a, c, g, or t
gtacaagtagtcaaaatctctgatctgaaccagagaatgagacctcacatttggtagactaagatgtggtattcctaggtacaacagcttcccaggtatttaaacactcccatggtggaagtgagaggattagcagaaagaagaatgaaaaatcataaccaaatgacagctggtggggggtccccatccaaaatcttgcccagccaggcacagtggctcatgcctgtaatcccagtgctttgggaggccaacacaggtggatcatatgaggtcaggagtttgagaccatcttggccaacacagtgaaactccgtctctactaaaatacaaaagtagctgggtgtgtggcgcacgcctntatcccagctacccagacccggggattaaatcctgagagtc

SEQ ID NO: 496609 - DNA, 506 bp, Homo sapiens
ctgtctgcagcgtcgaatctatcaaggtcccctcggcattatattgacgagcttgacgtgtatgacttggctcagcagaagagtgcccaaatgtcgtgactaggggactaggtcatagaagattccaaatgtggctacttccaggctgtacccaaagagagctggctgatttcaacttacctaggaatcttattatgcttcctgaaaagccccaacattttccaggcttcctgagttctcccagcccttaaaaagaggatagctatacagttgagagaggtggctggccaatcctgagcagtctgtctgatgggttggctttcatacgcagatttgatatcagcagcacagtcagcaaatgccacctgaagctctggtgggtgcttgtcccttgccatgagcatcgggatctcttctctcaggtcactgcggaaagtatgaccatattctttactttccaaattttaggaatcacttctagccgattggccacatccaatgcttgg

SEQ ID NO: 496610 - DNA, 358 bp, Homo sapiens
gtacaagtagtcaaaatctctgatctgaaccagagaatgagacctcacatttggtagactaagatgtggtattcctaggtacaacagcttcccaggtatttaaacactcccatggtggaagtgagaggattagcagaaagaagaatgaaaaatcataaccaaatgacaatgcccagagagaaataagtagcacgttacaggaagtttcaaaatcgaaaactcagctggttgccatggctcacacctgtgatcccagcacaaccttgtggaccagggtcttggcgagggtggaaaaattctggtttggggtgtttccggcagcaacaaacagctacaacctgcagcacaacctgggtcc

SEQ ID NO: 496611 - DNA, 888 bp, Homo sapiens
  misc_feature (662)..(662): n is a, c, g, or t
tattaaggattcctgagattttgcttgagcaggattacataaggtgttctttaaatgtctgaaatggaacaggatttcaaaaaaaaatcccacaatctagggtgggaaaaggaaggaaggatgtgaataggctgatgggcaaaaatgcattttatccatcagttccagccttctctcaaggagaaggcacaccgaaaggagatacaggtggagacatctggaaagttttgctccactggaaaacgtgtgtaggtatctgtatgtgatattatctgtgaaaatatatgaggctacagaactaaaaattaaaacctctttgtgtcccttgggtcctggaaccgatttatgtaccgtttcaaagaaaacaaaaatcatcctttacagaagagatttgatgtatgtaatagcatagtagcagctctgaaggtactatatgtcatagccgaatagagtcatctgaattgaagaaacaactattatgggacataaatcatcaggaaagagagcaccacgtggatggagttctctagaagctccagtgaatacgagatgtgactctaaagttgatttaagggcaggatggtggtttacgcctataatccaggcattggagagtccgcgtggcaagatacttgaactcaggaggttcagatacagcttgngcattgggagactgtctctatttaatacaagactgatggaatgggggtgtcctttactgcacaattgtggcgtaggagggaactgacccgagtaagccaatgagcagggtccatgcctcccaggcaaagagagccttccaatatatatacgacaaaaaaaaatctgcgccgaattacaatgcgccagaaaactatcacactgagattacacacccgactatgtcaa

SEQ ID NO: 496612 - DNA, 627 bp, Homo sapiens
  misc_feature (267)..(267): n is a, c, g, or t
  misc_feature (273)..(273): n is a, c, g, or t
gcgtagctgccttgagagttgcagtgttggtgagatccagagtccatgtcggacctgtcatactatctgggcctgattgggggcctgtactctcttactgctgtctgacgctgctggcctttgccgatgtactcaggactactggctggggtggaacgtgattgctgggtcaccccccagtccgcaacgctcacgtgtgtgcctacaagttccacatggggctctagtggctgagactgggctggcttttcactgagagctgcagcntctctnccaagctccgctccatcgctgtctactatgacaacccccacatggtgccccctgataagtgccgatgtgccgtgggcagcatcctgagtgaaggtgaggaatcgccctcccctgagctcatcgacctctaccagaaatttggcttcaaggtgttctccttcccggcacccagccatgtggtgacagccaccttcccctacaccaccattctgtccatctggctggctacccgccgttccatcctggcttggatagcctacatcaaggagcggaaggctgtgtgcctatactcggctggtgatcttaccggaagacccgatcgtttcatggttgcccccgtggcacggctgggca

SEQ ID NO: 496613 - DNA, 1226 bp, Homo sapiens
acgaccaaagcccgcgcgcctgatacatcccgcgatcagacagctactgtaccgctgccgtcgccgccgccgacatgcccaagagaaaggctgaaggggatgctaagggcagataaagcaaaggtgaaggacgaaccgacagagaagatccgcgaggttgctctgctaaacctgctcctccgaaagccagagcccaagcctaaaaaggcccctgtaaagcaagggagagcaaggtacccaaagggcacaaagggaaacgctgatgctggcaaggagagggaataacccatgcagaacaatggagcattgccaaaacagaccaggcaacagacaagctgcacaggtgctgcgagatgccaagtgaaagtgtgctgccattacaggataactggtgtactatcatggtgactgtacagttagaacctacatactgatgaatcaaggtaaaaataaaagattgcagcaatagaggaaataacattataataaaagagataaaaaagaaaatagatggaaagaagcaagaggaaaaaataaatagaagataaaaggggagacaagggggcacatatgaacaaataactacaacagtgtctaccacaagcattggaatagaatgtgaaaaaaaaaacaaccattaccccattacaaataggaaacaaagtaacatactagtgatcacccaggaggaacaaaaatccctgacattatgaacaagagaccattgtgcaaccaatttggacgacacaaaggcttatactagcgactaacacacaaaacaaacactagagacaaaaatgaaccgacgcataacagcaatatacaactataaacacgcagtagaacatataaatacccatatagggccagaaagaataaagtgtgcgaccatgacacccgaaacaaccaaggtaccccaagagtatcgatggggcacacccttagcgactacacagttggtgttaccacaaaaaaaggaccatgtcaacaaaaacaggcgggacaccatataaaaaaggaggaacacacaacaacaagtggccagaaataaccaccgacaagccaagccaggataaaaggtgcaacaaaactaaagaagagcacaccacaaaaaaagtaaaaacagcacccaaggaaaaagaaccaacagacaacacacgcacagagactataacgaaggcaccacaaacagcagtaacagatgcacacgaccgcacaaaaaaaaa

SEQ ID NO: 496614 - DNA, 753 bp, Homo sapiens
tggcaggaaaacaggaaactccagtcccagagcagctgggcatgaatgacctgtccccagtgatgttgggcacttctctgccatgagggtcctgagccttggggtgctgcactcttctggtttgttgaatggactggacctgtgccactggtgcacacatgccatgcaactgcttaagcaccatgtggcctggcgtgagttgccctgctctgtgtgcactggggatcccatgctgtcaagcagctctctgacattccatttttgcctattccattcaactgcagcagcacagggttcccagattgcagtgtgcttgaacccatcattctgcccctgccccaactgtgaaccccatgccaaaccgcttgtggtgggcagagcagatggccattgtgtgtgcagagtgtggctggtgccccgtccaaaccacaggtgggtcccatcttgccgattacacattcaggcaagcaccctcccaaaacacacacatgacccttggctcttcaaagaaacaataacccgcgggaactgggtgacagtggtcacgtcccaatcaaaacactgccggccaaagcccgggatgtacccccaacggcaggacaacaccacggaacacagattatctaatcattgtgaactgccactggcaactgtgctcccgcaaggacaggcacaagacagggatcccagtggaccaagagtgacaatgtgaaccccgggaaaagccggcgcacaggcaggaataccacacca

SEQ ID NO: 496615 - DNA, 239 bp, Homo sapiens
tcatcacgaataatcgcaccaatggtggtgcccggcggcaggccgatatcgcggatcgccttgccgatcactttgctcgactttgaatcaccatgggcaatcgcctcgatggcttccgccgcgccccggcgcagggagtgcacgctgacgatatcgccacggcgcacgtgggccagcaaggtgccgatggtggccaactgcgggctgatggcgatgtcgatgtcgccgccctggctcag

SEQ ID NO: 496616 - DNA, 233 bp, Homo sapiens
ctccctccctccccacatgagtcttcctgcttttgtttcaagctgtcctgcctttccagaccaaaccaatgtacttcttacgtatattgattgatgtctcattcttgtctccctaaatcgtataaaaccaagctgtgccccaactaccctgggcaagtgtcatcaggatttcatgaaactgtgtcacgggcgcattccccaaccttgaaaaaataaacttttttaattaactg

SEQ ID NO: 496617 - DNA, 593 bp, Homo sapiens
tgctcctaggcttcaaacccatacagcatggcactatatggaatactgtaggcaattttaacacaatgaatcctgacccttgggaatgggatctggagccagtgggaagcattctccgaatatgataatgtggttatcttctgacgagtgctggcattatcacttgttgctaaaaaaacaccaggcttgttctgaggttcacccgactccactgcatgtattacgtgcatgtgtaccttggaatggaaaatacatgactaagccctgagacaactctgcactgtatcctgctattcttccaactgcaggacctcatggagcgagagatccaaacctttctgaagtactttaccttctacctttttcatgctactcaggattgaatcaattggaagccaacaaagccattctgtgttactgtgcctcctgactgtcagcacgctgcactgtgcatttagataattctgccagaaggcatttttataaaaacagctttcaaaatctattcttgaaaagacatttgtatactcattatgccattctatcatttatccatagggagttctgtaaataaaacactgaggtctaatact

SEQ ID NO: 496618 - DNA, 354 bp, Homo sapiens
  misc_feature (346)..(346): n is a, c, g, or t
cacctgcacagtgcctaagaccttgccatcaatttcaaaaaaaaaaaaaaaaaaaaaaaaaaaaatttgtgggcggctggcccgaaaagttttaaacccttgtttgggcgcgggccccaagtttggttttagttagacactttggccattacgtggtaccaaagggagactccgggcgcatagacttaggtgttgtgttctctcaacaatattaaaaaagcggccggcgcgacagcccgacggtttttgacacaattcaaaatggaggttccggaggccatagcggttctctttcaacggggttcccagggagtccgattattaaaattaccgcccgccccctggnagaactgc

SEQ ID NO: 496619 - DNA, 434 bp, Homo sapiens
aacggcacctttacctgaccagataatttcgcccgtctgcaccagcatcagctgcatttgtagggtcggagcgttaacgttgccagaggcgctggagtacagcacgtaatgagcgccgacattgcgggcaatcctatggctttactacgggtgcctaaactgtcctgcggcgacaaacctaactgttcgtcgccatcgacagttgctgggcggaaaccagggtaaatttcccgttattagccagcgcatttcgcagcgtttcggtcgcttctgcggcattcagcgaaccgttagtacggttgttaacgctatcaaccagcaggacgctacccgcagtcaccccgtcagccccaagcatcttactgaccatcggctgcattgcgccattccagtcataatggcgaatatgcggcgcaggcggtgcagtttgatct

SEQ ID NO: 496620 - DNA, 179 bp, Homo sapiens
cctgcagaggcgttagtgtggtgcttcgcccaaagtgtcagacacagtggtggagcctacaacgccaccctctcagtccaccagctcgtagaaaacacagacgagacctactgcattgataacgaagctctctactgacattttgcttcacgaacccttaaacgcctctgcagtggtac

SEQ ID NO: 496621 - DNA, 123 bp, Homo sapiens
aagtgattttcctttgttgcgtcaacgagcctagctcggagactcaagctgccccctgtgataatgtgccttctcgtatttctggtgtgattcaggactttagagggtcagtaagagaccgag

SEQ ID NO: 496622 - DNA, 235 bp, Homo sapiens
  misc_feature (135)..(135): n is a, c, g, or t
  misc_feature (184)..(184): n is a, c, g, or t
agctccgtctcaaataaataaataaataaactaataactaaatgttgtaacacaaaagaggataaatgcttaaggtgatggatatcctgtttaccctgatgtgattattacaaattgcatgtctgtaccaaaatntctcatgtacccgataaatatatatacctactatataccgacaaagttnaaaatagaaactggaagacaaaaaataaattaaaatcaaataaagcttctc

SEQ ID NO: 496623 - DNA, 759 bp, Homo sapiens
taaaccagtttccaaaagttcttaaagggcaagagtgaattccttgtggatttaactgggccccagcttttaggtcctttaagaacactaacaggactacatagaggctttttcagcattactgtgtcgtctccgtgccagatgtggcaagatccccattagcaaagggaaattacttttgaaagccattagacttacaggtgatgcaagcatctaagaagagaggttaactcacactatagaggcataaggtggtactcagtttccattttctctaatgtgtttaacacgtggtgttttatcccagtgttgtgcaagtaatgggggtgtagcttgagaatggttaaagggtggttgggggagggacttcgttgtaagggtttggctgtaaaaaatgttcccaactccgctgaaatgttgctgaaaagcttggtgctggtaacagtctcaacaacccggggctgctcatttctgtgcctactttactctcccactgaagcaggttagcgttgaaggtggtttggaaaagcctgcatgcctgtcaattctttggtttccttctccctttcccccttccccctactccttccccttatctcccctcttcgtccgctcaacctctttggtccagtatgttgtaactttgaagtaaattgtgtactacgtggatttctgcttggagccccagatacagaatcctggtatggtcttaacttgaaacacacgctggaattaccttaaccttatttaaacaaccct

SEQ ID NO: 496624 - DNA, 945 bp, Homo sapiens
catcgcgtcgctccgcgccccgtctggtgcgtgaggagcgtttctgccccgccgcgccgtctgacaccgtgaggagaccctccgcttggcagttgcgcgtctgacaccctgacgtgccctctcctgccggtggcccccctgtctcctgggcctgttggcgggtctggctcctggcccgggctccctgcccccttcgcggcgaaattgtactgggtgaccgtctagcacgcgtgcacgagcgcactcagctggcgtttaatctggaggtgacgacactctgctgggcccggaggcgccacctagcctggtggacagttggctcgaggcgcgcgtctcgtccacgcgatcaccctatgcccagtgtttgcgagatagtcgtggcggcacacacggtcgattgcgacgcggggtgctgcgtagggactctgcggggggtcggcgtgggtataaccgtggtcgccggggtcgggaggcgaatggtgctgtcggcctcggtggacggtggtctggtcgtggatgacgccagaatagcactatgcggattaccttggtgagtactgtcctggcggtatccccaagcgtcttctcactcgacttgcgtccctgtgtgcgagactcgagactggttcccccacaagaccttggggtactctctagtcgcaccagtgagggtgccgatcaagttccagtacgattacacctggcaatttaaaaggccaggttggaccgggtacaggtgctcacagggggggatcgagcattgtctttgaaagcggaggaaggtgcttcagtcacccgaagattattatccaaccttccttatagtgtggcaccaaagcacagggtatacccaggctgtgagcccgcagtcagggaccccctacctaatataattccgaaaccttggggactgtgaccatgtgatcttcctccagatgaccagga

SEQ ID NO: 496625 - DNA, 463 bp, Homo sapiens
  misc_feature (257)..(257): n is a, c, g, or t
gtatactggcattctaagttctgtgggaatctgtacttttataaaatgaagggaaagtgaaataaccctgtttgcttcatgggtcaagggatgggctgggctagagttttaggtttgggagggttgttatcctaaagctcttacctagccagataaattgagggaagatcaatttggctctggaaagggaaaagtctttccctttgagactgtgacctttccctgcttcctatttctctgccaggtgcttacatgtngcagaagctaattgaagagacagataggtttgtagtgttcacagaagaggaatcaggcatgagtgaccagttgtgtggcattgctgcctgccagacggatgacatatacaaccgaaactgccttattgaattggtcaactgtcaggtaccttctctttacaagttacctcaacatcaggctagatcatgactcatacttgttcccc

SEQ ID NO: 496626 - DNA, 188 bp, Homo sapiens
gctggtttggtaatccgagatcattaaaaatggctgaaccctaacaatatgtacaaaaatataacatgtaaataaaagaaatacaaacaaatttcctttttaaagtacttttaaaaaaaaaagcagggccttggaagttttggattcttattgcctcccctgatgcaaattctcatggtttgggttgg

SEQ ID NO: 496627 - DNA, 151 bp, Homo sapiens
gtctacgccggctaagggattatcgcacccgatagcacaagcgcacgacgacgatgatcgtccagcgccgtcacaagcgttaaggagtaggcaatggcacgttctgttaaaaaaggtccgttctgcgacgcccatttgctgaagacagttg

SEQ ID NO: 496628 - DNA, 698 bp, Homo sapiens
ctcgaggatcccggtgtaccctttgtctttctaaccctgtcctgtaattcttaacccagtcttttagttgttttttttcttttgagacaggttctcactctgtcacctaggctggagtgtaggggtgcaatcttggctcactgcagcctcaacttcctgggctcaaggaatcctaccaccttagcatcctgagtagctgggattacaggcacacactaccaagcctgcctaatttttgttttattttttgtagagatagggatctcattatgctgcccaggctggtctcaaactcctgacctcaagtgatctgcctctcttggccccacaaagtactgggattacaggcatgagccaccacccacagccagttaagtgatttttgacaaaggtgcctagaacaatcagtgggagaagagacagttttttcaacaaatagttgtggcaatactgcctatgtaagagactgaggttggacctttactttataccatgtaaagaaaattaacttgaaatggactaaagacctaaacttaagagctataagtataaaacaggggcaaatatttatgccactagatgtggaaacattagaaccctggtgcactgctggtcagaatgtaaaatggcataactgctgtggacaataccttggcaattcctcaaagttaatggtgaatatcacattatgtagcatt

SEQ ID NO: 496629 - DNA, 279 bp, Homo sapiens
attactcaccttcttttttttattataaaaggtacacttctgatttatatttacacaacaaagaacaaagcatctacacacattaaaaaattaattcaatattcctacatctattttaactcattttaacttactacatacagaagccagaatgcagagttaagaatggcacataaggtggggagaagaaggggcaccacgaagaaacaccacttagacaattacttgtctgtagtgggtaaaagcaacaggaatccccctagaaatattgttggctgg

SEQ ID NO: 496630 - DNA, 115 bp, Homo sapiens
aagggtgaggatggtgcgtttcagcagccagggcttctcagagaacgggccaagagtttctggacaaataatatgtgatctttcagaaatatgttcttattcactcctacattgg

SEQ ID NO: 496631 - DNA, 338 bp, Homo sapiens
cccctttgcccggcccccccccgtttgggaggtgtgccccccagctcatttagaacgggccaggatcacaatggcggctttttggaataaaaagtggggaaaggtggggaaaaattttaaaaatcggatggttcccgtgtttttttaaaaggaggtaaccatgggagccttttcttttttttttgttttaaaaaaagtttttttcccttggggtcctgttgatttgtgcccttaccccccaccctttggctttttgaaacatttgttgtgtccccccaaagtttaatggtttaagggccgggccaaattttttttttttaccaaatgttttaaggcca

SEQ ID NO: 496632 - DNA, 348 bp, Homo sapiens
accggggttccttctggtaggatacatatcaactcaaatagaatagtctctggagacaagaacacgtcttcttctattcatggtagatcaatattttcctggaaacaaaaggcattctcactccaattaaactacgatgaatggactgtctcatctatgatgcacatgtgactccacaacaaatgtctttgagtgcagcagtctagcaatgtgggcaggaagatctaaaaaatctcatgtccaacatggcatgataacaatccaccaaaaccaaacaaagcttctttgggttcattcataggctgcctggtaagatatttgcttccctgtgctgttagaggcttagat

SEQ ID NO: 496633 - DNA, 108 bp, Homo sapiens
acgcctcaacctcccaaagtgctgggattatagacatgagccactgtacctggtgtttattaaattcttgactcagtttatgcccttacccccttctgtcgtcttctc

SEQ ID NO: 496634 - DNA, 302 bp, Homo sapiens
tagaggaccctgctacgtggtagtatggtctagtgtatacagccgggccggctcccctcctggcaataccaacgcattcatttcttcctggctctgtgagtggttgctgcctcctatccgtcaatatccaatgccctgggacagcgggggaagtgggattccagccatttgatttattctttcaccttatttgtcctctattactcgtgggtacaacaaaagagaggattatactatcatacgactgtggtttctaacacagaaactcaggctgggcacagtggcatacgcccaggtatgca

SEQ ID NO: 496635 - DNA, 228 bp, Homo sapiens
gcgtatttagtcatgtttctgttgaatgcaaccaatgtacaatatttgacagctttcacctggctttctggagtaacagtgaatttattggtgttcttgaatcattaaatcgctagagatttctagtgaatttggatgctttctgacaatttcctgtcttcttagtctccccttgccattgtagagtttccagcaccctatgagcccaatcatttttcaggaccttga

SEQ ID NO: 496636 - DNA, 158 bp, Homo sapiens
actcgagaggagaccccggcgcccagagactaggagtgccaggcttctctgaaaccagcgctagagcatatttccatagccaaggaggggggactccctgcagctatctgtgggcttacgcaagtagtccagacatacacggcttggggggacaagct

SEQ ID NO: 496637 - DNA, 204 bp, Homo sapiens
gctgcagcagcagcatcatacacaccacacacccaccagaccaacatcatcacatggccaccacatcatcccatcatcacaccagcagtgtcagcagcagcacagggcagtgtccaacacaggcagcacacagtcaattggcaccaacaacaggctgcatatttcggcgcacagtgctctccaccagcacagccaggtgcacca

SEQ ID NO: 496638 - DNA, 158 bp, Homo sapiens
  misc_feature (108)..(108): n is a, c, g, or t
gtcccccacccaagagcattgggtcaccctgcaggaaggtggctgccaccagcaatgagacgaggggctctgcgaccctcagagctgccagccagccagccctgggtngcaagagtgactcctcctggggtctcctccctcctatcgccctccgtctt

SEQ ID NO: 496639 - DNA, 473 bp, Homo sapiens
gtcaactgaagggtgagcacggtggagaagagttttactgagtaacaaaacagctctcagcagcgagaaaaagctgaagacggtagctcctaacgcagcctggtagtcgacagctgtggccgagtccaggggtttttatacgctcagaatgaaggacgtgcatgctgattggtccatgggtgggctctgaaagaagaaccatttgattggctgaaaggcatcaggaagttctcacttccggttgtggattctacctggaactggcagcccggttttcaggcttttcaggctttggcttgaaagttggatttcaccagggacccaccctgatctgcctaggaatttgtctgcctcctgccactatcactattataaaacatcccttcctccaattacatatgcagggaaccaccgattactttgtcaatattatgtattttctagaattgtgataaagctaattatacagtaaa

SEQ ID NO: 496640 - DNA, 868 bp, Homo sapiens
tggcttccgtgtttccgttttcagtttttttgccaaaaggtgtcttggtaagcgatattcctactgggtaaggctgtagcatgaaggatctctatggagtagggcactggagtctttgtttattttggctcaattcacgtccttgccgttgtatgttgacctgcgccagacatctggagaccacttaaccagggacactggttggtgaactgcgacattgggccctgccctcaaggaagtctgccagttctggttgggtgatgagacgtgagcatgggcccccatcacacgtcccttcaccactgggtgcaaagtccttctgtctgggcggacatgtacatataacatgcacgagaacaaaggagtgtgactgatgccttgaattgtgcatggtctgtggcaatgcgcaggagggggtctacgggataacctttagcagatacgtgacttattgagccttgggtcctcaacgaggctctagaaatatgcaagaacagacggagggtagggaaggcgcttccagtcagaaggaatagaggcatgaatagggcactagtgtagatgaaatgaagttctctgtgtatacatgagaatgtggacagacatcgggggtcaagggtaaggttggggccagttgtagtgaaccccctcaagtgctgtgccagaaaatgttcctcttcacttgtcagtgagaataggaactcctgcctgtgatcctgtcgtatcccatgcgaaggaggggtctcttgagagtcatttgtgggagagatgaggtggagcccttcatataagttgacgcatccctaactcgaaaaatcgtgaaattctttgagtgtggacaagacgcacaaaggtcatgctcatagta

SEQ ID NO: 496641 - DNA, 375 bp, Homo sapiens
ggagcagacgacacagaccgtggcgtctctttaaccataggagaccgaagtggtagagacaagtacctccacaagcacgacttggaccacatctgacgagcacaccaggtggtagaaagacggctacaagttctttgccaagcggcagcatagatgacactataactacagctacccaaatactagtggcgcgtttgacaatactggcgccatgatagagtgtggacgagaccctcatgtgctctttccagatcctcaagcccgacgacaagaacaaggggaagtacgggcagttcagtgacctgaaccctggaggccgacccatcaccccaccccgcatgttcgctgaggatactctagagtcccgctgctagc

SEQ ID NO: 496642 - DNA, 329 bp, Homo sapiens
  misc_feature (74)..(74): n is a, c, g, or t
cagtctggtcactctgggcgcctgggatggtcactttatgagaagcagctgggagatgtacaagtatgggcatntcacggacagtttcatgactgaggccagtgtctgcctgaaaaatatggaacacgtgatctagaggctactcatggttataaattaaatgccaccaatgaacttaatctacctttagaataccacgttactatttgtgagacataagctagcagtttgttgagccatgattttgattctttgtcaggggtgtccataatggcagaatacatatttagaagtctggcaagctatcaggataagctgtggcgggcggt

SEQ ID NO: 496643 - DNA, 914 bp, Homo sapiens
  misc_feature (70)..(70): n is a, c, g, or t
gcccgtcgtgttgttttgtttttagagcgaagggggggtgtgcttgcgttcgtcgtgtgtttggtatgcnaccggcggccgctgtggggtgtgggacgcgccgaggacgtgggtgttttgtcgcgccgagcaggggtgggtaggggggacacttttgttgttttggtggggcgccgtttgatttgggtcccccgccgcttttcgggtggttcgcgcggactagtgatcgccggcggagaagattgtgtggcgccgccgccctgagttttgtgttgaaaaagactggcttgtccgcgcccccgtggggggtggagcgcccccctctgtgggggaggaggccttcgccttctgcctccgtgtgattttctcccccccgcggggttgcaagagtatgtgaggagcgctttttttcctgctgaggatgagagagataaaaatcgtggtgttttccccaacccccctcccttgcaagatggaggtttttttgttgtgggtggttattaatgtaaaatggagggggtatggggttgttccccgacaaaatatttttgttgggccccatcacttttttgaaccaccgaaacaatattcgcactttttcgctttcctctccgaaatatatctatttgagacgacacccccccccccccccgcatgttaaaagtatgatgggcgccagccccactttttaatattcctcttgctaaataccccctcaagaaggatgaatattcatacagactactaccacagcaggcggcggcagctaattaataggagaaacattttatttcccccccaaaaaagggacaatttttttttttttttttttaaagacgccccccttgggggtttttttttttcccccgcttttttttttggaaaaaaaagttttttcctttttaaaggtaata

SEQ ID NO: 496644 - DNA, 370 bp, Homo sapiens
tacagcctaggccccaaaccaagtccggccttactaccagagaaccttgaggcaaaccatttactcgaacagagaacgaaaagtttcaactggaagactgaacgatgtcgtggccggtcctgcatccttaatcacatggtttcttcaagacaaaactcctttgggagtccgatgccacaccaggcgagaagcgcaatgcgtggtcaatttcctagggtccacagagggacactactgtggccccagggaagtgagtatcgcttgtgagttgtcttgcgccagcagtctagcaattatggccgatggcgggtccaacaacgtggtgtgcttatcacacagtggatcctctcatgccggtgggtcctctctg

SEQ ID NO: 496645 - DNA, 220 bp, Homo sapiens
  misc_feature (220)..(220): n is a, c, g, or t
actggtctgtacgcctcgtctggcactggtcgtatgctccctcgcgtgcggcggttgtggccctctctgttctgtctggtgtgtgtttgtgtctgtggtgttcgttgtgtcgtatcgtcttgtctgtttgttctgttcggtggtatcgttttttgtcgctttgatggttttcgatgtgtgtgctttgtgtgtgtcgggtgttggtgatctttggtgtttn

SEQ ID NO: 496646 - DNA, 738 bp, Homo sapiens
  misc_feature (34)..(34): n is a, c, g, or t
  misc_feature (157)..(157): n is a, c, g, or t
  misc_feature (177)..(177): n is a, c, g, or t
  misc_feature (186)..(187): n is a, c, g, or t
  misc_feature (205)..(205): n is a, c, g, or t
  misc_feature (208)..(208): n is a, c, g, or t
  misc_feature (263)..(263): n is a, c, g, or t
  misc_feature (276)..(277): n is a, c, g, or t
  misc_feature (292)..(292): n is a, c, g, or t
  misc_feature (299)..(299): n is a, c, g, or t
  misc_feature (345)..(345): n is a, c, g, or t
  misc_feature (356)..(356): n is a, c, g, or t
  misc_feature (414)..(414): n is a, c, g, or t
  misc_feature (431)..(431): n is a, c, g, or t
  misc_feature (442)..(442): n is a, c, g, or t
  misc_feature (487)..(487): n is a, c, g, or t
  misc_feature (498)..(498): n is a, c, g, or t
  misc_feature (571)..(571): n is a, c, g, or t
  misc_feature (588)..(588): n is a, c, g, or t
  misc_feature (603)..(603): n is a, c, g, or t
  misc_feature (629)..(629): n is a, c, g, or t
  misc_feature (639)..(639): n is a, c, g, or t
  misc_feature (671)..(671): n is a, c, g, or t
  misc_feature (737)..(737): n is a, c, g, or t
aaaatgaggctttatgtatttcaggctggaaggnaggattgccttattctccatgaagaatctcaggcagggtaaaagtaacttaccactaagtacctctgtgccagaagaaaagctcaatttattcaatccttagaaaagttactatcgtcccctngtcaaaaactaaggtgtatngataaggtnnagagaaaaccacatagtnctnattctaattcgtagtgaaaaggctgcaggcatatggtgctcctacgatgggcctnaccctttcctaannacatctcatttccanatccttngccttctctttcccccaacatttccagccagcatagaacccaattnctgggaaattnagaggagaaacagtattatgaacacagactcctttcaaattggaacaggagcaaaacnaaataaataagagaatngtgtagggaantgagaggtaaaaggaaggtcagggagcaatcccttgcctcaagtntggtgcacctnatggaacatcagtacacgggggatggctgtttctggaccaaacttggtggctgcccgaagctcaaaggcagcnacattctgtttgaaaanctcatcaaaaaacanggtggccagcagggagttcagcaganaacgaaattnaaaggaaatcgaaaaagtccacagtgcaggtncgaggataggcagggataccagggctgaatcgccaaaaagtctctaagtggttgaaagagcttgcna

SEQ ID NO: 496647 - DNA, 437 bp, Homo sapiens
agctctccatatggttagtctgaggcgaagagattacacaatcggccgacgccggtagggcggacagattcaaaaggcagtgctagatctcacaccggttatatcgcctctctaagatctcagctgcagctcgccacggggatctcgccgggtacactataaagctggctcagcattacggggagagttcccaccatttctttccctttaacctgtaaaattctttctgaagtaccaccccgcgcttctactgggggctcaatgctcacatgtattaccttagaaagaccctggccacagacgggagcctgtcccaatatctcctcttggggtctgataattcaatgcgagcaacagccaagagaataaattagggaccagtctccttggtctgtttaggacaacctttcacatcctactcttttacttcccatgtt

SEQ ID NO: 496648 - DNA, 504 bp, Homo sapiens
ttatcataggaggtggagcactttgcaaatatgaaaggctaagagagactacttaagcccaagtctttgtttgtggctgatgatggacagatgcaccaggggagaaccagctggtttcagcaacagcctcatctgcagctgggctgcagccactttgagggttattagttgcctccatatccatttagaaaatgtaatggattggctctcacgtttagcttgcctttaactctctttgctacttttctaggagaaattattttctctactcaccaaaagcaaatattgacctggtagtggacaaataaatcaatccagcaagctaatttttgtttcaacccttcattgaaaatagtaacttcagttcttctacctactttgcccttcaatgggtggcagctagtggagaaagcccagctttaaggtctgacaaacttaatctttctgagcctcagcttttcttttttttttttttttttttttgggaaacagattttggctctc

SEQ ID NO: 496649 - DNA, 410 bp, Homo sapiens
tggcagcccagtgatcacatgcttagacatacgataataaagaaagtgccaatgtatcatcgtgtacgaactgacagcgatagaccagtgatgactggccacgccataaagattactgaatgctgtaccaatcgtttagatttaattctgtaagcaatgggacttttacagttttgatttgtgttttgggcatagttgttattggagataatattatagatgtataaagagatggaagaccagtaaaactgaaatatctgttgttggaatagagatcataatgagtgcgaaaggaattgcactgggtgggagaggacgatcataggagggtgtcagtattcaagaggtagtgaatattgcgtagccttattaatctgttgctttgctttatgggatcccaagccatatcc

SEQ ID NO: 496650 - DNA, 406 bp, Homo sapiens
cggtcgtcatgcgccggccaacagtctcatccctccttccaagatctcagtggctccttccaacatctcagtcgctccttccaacatctcatcgctccttccagcatctcatagcgccttccacatctcatagctccttccaacatctcatctccccttccaacatctcatcgctccttccaacatctcatacctccttccaacatctcattactccttccaacatctcatagctccttccaacatctcatatctccttccaacatctcatgccaccttccaacatctcatgccccttccaacatctcatagccccctccaacatctcatagccaccatcaccctccttaacctctacttctacctacgccatgagatgtgggaaggggtatgagatgttggaagg

SEQ ID NO: 496651 - DNA, 359 bp, Homo sapiens
gggacttccaaggctttgcccttggttgaacccacagcgaaacagccgcctgacaggggatttcactttggacccgtccccagggtccccagtttttttttggcaaactttgcccaattgggccatagtcttcttactggcagctgcgggagacataccagggagacaaggtgggccccagccaaagcaccaggctcagccgtgattcatacatgagttcacctctgcgccgtctctcaccaggcaggcacctcccacctgcatggccatatcgtggttaggcacgtggcttttgcagtgccatagacattggtcttaacccagctctgcgcttgccagcagacaacctttgataaact

SEQ ID NO: 496652 - DNA, 267 bp, Homo sapiens
tctagaggattcggcagctatccggttcaatggctcacgtagaacctgggcctccatagagctgagtggtcaccctaacacatatcatctttaccaacgcataagagtgtgagctagtgagcaagatgctcttgggtcatctgacatagactagactatcagagtctgctacttatagcagtgtgtgactcttggggaaatcatctaagcagtcgttagtccatgtgtgggtgtcactctataaaaatgacggataatagtcaagtt

SEQ ID NO: 496653 - DNA, 182 bp, Homo sapiens
cgcgcttcgtgtgcaaaccatggatgatacaagcacagcttgctgcttttttactagcttgtgtagtccgagtccattgtacacatcacaattctaaaccaaactaccaataaagaaaacagactccaccaataagcaagctctgttaggcttccatgttagtgtatcttctcccccactag

SEQ ID NO: 496654 - DNA, 950 bp, Homo sapiens
aacggtaagtgagccgaacttggttcatggcaggcgccgggcgcgctgctggtgatgggtgtgagcggctcggggaaatccacgcgtggtccccctgcttgtcatctgatctgggatggaaattctatgatgttgagtgattattaaccgggggaacatcgaagcacgatgtcaacatggcgtaccgcttcagtgaccaggacctggattccagtggctctgtaacttgctatgacattttactaatcagatgtagcctcgggacagccgtgtggttctagcctgttcacgcctctgatagcaagatcgtacatgagacatattaactgcaaggaaaaagatggtgtagctctgaagtgtgaggagtccggtgaaaggaacgcaaaggcagggtggacaatgcgatctcgtggtggtccatctgaagcgggtcgtttgaggtcatctctggacgcttactcaactggagagggacattttatgcccctgaagttattgcagtcccagttttgagactctggaagccccagcagctccaaaaaaactttatccacaactaagtgtggacacatgtttccgagataattgctacaattatggaaacctaagatgatgtgacatgattggtatcaggggtccgaaccgaaactatgcataaagtattgtggccatccccaaacctcgttccagtcggctgcccatactagaattttaccggttctaatggccacccccatgtgtcagacgactgtagggtgtcctgtggaatatgccggtcacggacacaggggggttaagctcgtgatgatgacgcttccactatgtgaccgtttatcccgtcactcttggtaaactgccccgttgcaaattgtgcaaaaagaatctgcgcgaacaatgcgccagaacacacgcgcttcaacgcacgtatccacagcgctgacatctatgaa

SEQ ID NO: 496655 - DNA, 542 bp, Homo sapiens
gccgggcgcgtggctcacgcctgtaatcccagctctcagggaggctaagaggcgggaggatagcttgagcccaggagttcgagacctgcctgggcaatatagcgagagcccgttctccagaaacaggaaacaaaaaaacaaaccaaaaacccaaaaaaaaaaaaaaaagaaaaaaaaaaaacattttgggtcgggcgccccggggaccctagggagaaaaggttttttaaacaccctctggtgttggggggcgggggcggccccaattaatggtactgtggacacttggcgcaaaaaggcggtggacccaaagagggaactccgtctcggccaaaggcgaaagtgccgtcgggggtttctccccaccaaaatatagaaacaccgcccgggggcgagcacacgcagggctcgtttggggaacacacctccacagagggggggtcccaggaaggagccacaccggggggctctttctacacagaggggggtgtccaaagggggagccgcaaatataaaaattagcgccgcggcgaggggagcgc

SEQ ID NO: 496656 - DNA, 717 bp, Homo sapiens
agagagttcataagcaccaacagcaccactgaagtagtcttagttgtataagaagaggactaccaaccatctggttcctggtcagaggattataatctcacggatatcctcagttgtgagagaagcaatgatctgtgactgtccaaaaatgaaccatgacattctatgtgatgaagaataatataaaccctttgcccaagtggatacagaggaagtatactattactcctgggaatataattttgtgtctccttttcctttaggactcacataacgtgcgcatagcaaagatggtcaccaacaccagatagtctcagactgtgtctctttcctttcgtggaaataatatgctacacacgatacagacttgaatacaatgtgaacaacattttctgtgtagaacaaggatggtacactcctcccaaatgtatgtgcactatttctgcaggagaatgcgggccccctccacctatagacagaggagacattacttgatttctgtggtcattatatacaccatgaccatcagaagagtgccactgccagaacttgtatcatctcgagaggtacaactcttatacacgtggaaactgaccatggtgacaaccaccaaatgcttataaacatgtggtacatctcaagagatgaatggcaaatttacatttattaaagtgttcccacagcagatgtattgatcaggggacatatatgatgagg

SEQ ID NO: 496657 - DNA, 703 bp, Homo sapiens
tgaggagcaccttgggggagtggctgaaggatcttcgaaaccaaaagggcaaaaggcccctaatccgactaggggaatgcaatcgctttccacacattttaaaacaatttaaattcgtttataacgcctatgtaatgcgggcacacgttgggggtttataggaacctttgagtccctcaaacacgacttagttaagtagcaaggttcggaatctggtttaatcccgaagatctgcacagttgttcacgaggtaagtccaccatctgcctgggcgtagtaaaagctttatttatagcaaatacatgtttcaggtgtcatgagtgttagagaccaaaatggcacaatatggattttccactcaccgctcagatggatcgcattaaaaggtgtaaaatcttgatcgacactgagttatcccatgtgaaagtagacttcgtgatctgacgctacgcacaacacttaattcagagccaatgggtcacgcatcagctgtgtaaccccgtttggtcgcagagaaggtttagccagcgcgacgacatttttgtgtgtcgccatttgagcatgtctgtttacgctacagcgatctatcggtacgtatggtaatactccctgggtcgctttgatagttaacagaacagtgctgtggatgacaaaatggattaaagttcgctcgctgtcgtataagcggtcaaatgaataaccc

SEQ ID NO: 496658 - DNA, 188 bp, Homo sapiens
gctcacggtaaaacaaggtatctgtgtctcctcatgtcttacttctggtcatcgtcctctgtgccacttacctacaatctattcctttgttgttaccaaactgctctgtttgttatagccctgtaacccacttgtatttgctggcacaagacccagcagcacgcaactttttaaaacaagccttttca

SEQ ID NO: 496659 - DNA, 561 bp, Homo sapiens
cacacgtgactatgccagcctacgtggctgtgctcgggctgaagaggctgatggaagatgagttgtggaagtcgcccatgttgtgaatgctgaagacgttaagctatgtgttgtcaagtacctgcagatatgctgctctccagtatcttctagcgttcctcagcgaaagagcgtagagagaccgaggcacatgtggttagcccagggatggcggcagggcgctgatcccgacatggtcctggaagggcaccggacgtggggcaggacaaaggcagccaggcccttgcgaagctcacatcacctcgagaccggagatgagcttccctggacgagcggatctatgaggtggtccggcccctcgtctccctgttgcacctcaattgctcagggctgcagaagttcgaggagctcatggccctaagaaatctggtgggactcagtgagaggctccggcagaaggatcctgacggacagaaggttgtgcccatgatagaagggtacatgtttgaggagcattgagatgatccgcgggcagcacggagtgatgtgtacttggcatga

SEQ ID NO: 496660 - DNA, 177 bp, Homo sapiens
actcttgccattgacgactccatacactgcctctacttccttcaaacgtcatctactaggtaagcctttcttgggcactgtatcttaaacagaagccacgtcagccgttcacgcacacacgcacactcacagatattctacatccctttcttcctttttttgccttagcctttccac

SEQ ID NO: 496661 - DNA, 135 bp, Homo sapiens
atggcagacccaggctgaggtgcagatcacgaggttaggattaggagttcaagaccagcctggccaacatggtgaaagcccgtctctactaacaatacaggcggggcacggtggctcacacctgtaatcccagca

SEQ ID NO: 496662 - DNA, 300 bp, Homo sapiens
ttgcgctccattgtacaagccctttacccagtttccacgagttgggatgcggggtatcgaaagaatgtttggcccacatggttgtttcgggtgcttcccagtttgtcagcaggttccctctccggatgagatgggaacaagaagtattggacaaggttcttgaaggcgcacattagcgcggcaattgttgtattacatgcacagttattcttacgaggtgaagcgctccgggtcactctctcggtgtctcgctctctctctatctctgtgtctctctctctctctctctctctgtctctc

SEQ ID NO: 496663 - DNA, 480 bp, Homo sapiens
cgcagtggctcacgcctgtaatcccaacaccttaggagtccgaggtgggtggatcacgaggtcaggagatccagcccatcctggccaacatggtgaaaccccatctctactaaaaatacaaaaattagccgggcgtggtgacacgtgcctgtagtcccagctactcgggaggctgaggcaggagaatcacttgaacctgggaggcggaggttgcagtgagctaagatcacgccactgcactccagcctgcggacagaccaagacttcatcccccgcaaaaaaaaaaaagatgggaggtgatttacagtgaaagacacaattaaattacaacggttcaatgggaaattagaaaattaaacaccattaaaaggagagaagagaggtaattggttagcttcaagagtcaagtggctatatgggtcaaagggttaaatttatctctaaaaattggcgggattcaaaggtggtacttacttgtgc

SEQ ID NO: 496664 - DNA, 191 bp, Homo sapiens
taagtattgatgttgcctctgcaggcttgtggacatacttctggtgagcactgtgcggaaactatcggatgagatcagtaagctgcatgcctcgaaaggcattgcctgtctcttcacttaagtgcatgtccatcgaccaaagccctgtactgatcaatactcatctacagaccagggagtaccgagctcga

SEQ ID NO: 496665 - DNA, 199 bp, Homo sapiens
tcatccgtggatgtatgaataaaatgcccactttttgtattatttgtttttgttggctcccccacatgggggttcgtgctctctgattgggtgaaagtcaagttgttggccactgatgagcattgtgattctacaagtagaaacagtaggtttgttgctaccgggttggcacgcagcaggtaccgcttttggtcgacac

SEQ ID NO: 496666 - DNA, 206 bp, Homo sapiens
aatgccttagacttatcttccacaaataggactacttcgtttctattgcatatactactgaacatattttatacaacctcacagtaactcaacatcttataaaactctgacaccacaccactgacacacgttgtcacatgcttgaactgacactacctaacaatcatacccacacagactactacgactaccctacaatgacccat

SEQ ID NO: 496667 - DNA, 116 bp, Homo sapiens
ctgaccgagaatcctgctgctgtggaaaccagttcctacaggtcatcgagcaggacagagagggacccttttatggactccctggtgggcactgctgctgcaggaattctcgaggg

SEQ ID NO: 496668 - DNA, 1273 bp, Homo sapiens
  misc_feature (666)..(666): n is a, c, g, or t
  misc_feature (1273)..(1273): n is a, c, g, or t
tccaggtgaaaaagccagttgacttaatggctcggggggcagggggcccaggagctcttggggggggggggtccggtttcctctctttcaccatctcaacagggctttctgtggcgtgcccaggagatgtggcggcgtggccctgtgggagatgtgggttgccatgtgcgccagggctggggggggatacctgtgggtctcttgggcgagatctcagtggtgtctcgtagaagtggcgtggcgagagcgcggtgggcggagaagacattctcgtggaggagaagtgggtggctcgcgcacacacatatgagagagggggtggaaaggggtattcccgcgtgtgaggcccgggagaatcctcgcgagtgtataaaatgagacccacacacagacgggaaacaccctttttgggcgcgtgtgcggagctgttgcgcggggggctctcccaagagcgccccacaaaaaagagatctctgatgagcgagagaggaaaatatcacaaggatcgcgcgggtgagataaagacgcgaggacagaggggaaaaatgggggggggggagccctctttcaaaagagttactatagtagggggggggcctcctcacgaagagaagggacgtcgaagacgaagagacggctcgagtgaggctaataataatctctccncctactcctgttggagagactccaagagagaaaacatccgtgtggaggacgacgacaagaggatttctccccgaagacgaaagaagaaaacacaatcctccacaaatattggggcggaaaaaaattttgtgcgcccaccaaatagaacagtttgtgtggggacgagggaggaggagagcaccttcccccctattatgccggaaacaaggaggcgaggggggggcggcgcagccccacacaaaagaggcggacaccgacgcacaaaaaagacggaacaacaggtggttggaaaacctaccgggcgggagaaaataaacaccaagtgggcgcccacccccggaggagggacctaataggtgggagaagcaacgttggtggtgagtaaagcggccgccttctttgttgggaaaacgcaagaaagaggaggctctctagtagagaaaacggcggaaagaaactccccgatctgtgtggtgagcaaccccccgaggggtgagccgccgggggaggagggagagaaatacccggagaggagacggagggcccaaatactaccggccgccccaatagggaagacagcatcgcaaagtctaggaaagaatatagn

SEQ ID NO: 496669 - DNA, 470 bp, Homo sapiens
cattccaaccttgaatcgttacagcgatagcatatcctatccaaccatactaacgtggacacccacaccgcccctcagaacttcaaaagggcaagatcttttttccttcacttattgctgaaacccagggcaccaattcccattaagagaaggatctctgtgctgtaaactaaacaaattgtgcattttttctggggccattgtttttggtttattttgttattttgttttgttttttgtttttgtttttttggtttcattttgttttgggttggtccaattttaaaaggaaatactacaataaaaatgttaaccagaaggtaaccctgagtgtgattgtgagagagacacgcctttttactagttcatttgcatttaaatcagtgatcctgttctgtggcattcatgaaaaacaagttgaagaatttgtttatctggaattgtttctaaatataagtcatttgtagcaa

SEQ ID NO: 496670 - DNA, 165 bp, Homo sapiens
ggaatgaaggtcgatgtggaacaagtggtcacatgtcacctatgcacaaggaccataagacaatttgtgagacttaggcccagggtgacaaaggcagggggtattaccctggagcaagggcagcggtcttcatcatttttaagcgaccgatcctccgcaggagga

SEQ ID NO: 496671 - DNA, 232 bp, Homo sapiens
  misc_feature (178)..(179): n is a, c, g, or t
  misc_feature (210)..(210): n is a, c, g, or t
cgggatgatttcttgaaatccgcgactgcgactcgacacgtcggacactgtccgacgaagcgacgtaacggcattgacatagttagcagtgtttcgtgatgcaacaggccagtcacccgaactctttcccagctcctagcactgtacctatacctacgaggatacctaacccactccnntaggcaccccatacaaaccaggatgcgcagntacccatgaccgcagatacctt

SEQ ID NO: 496672 - DNA, 113 bp, Homo sapiens
ccacagctgccgcggtggcccctaacctgaggggcctggagtcgtggccctgcatgtctgggtagggcttggcaatggttgccttaaccctggctcctggcccgagcctgggg

SEQ ID NO: 496673 - DNA, 386 bp, Homo sapiens
agaacggaatggaatggaaaggaatggaacagagaggagtggagtggtgtgtattggagttgagtggagtggataggagtgcactggaatggaatggaatagaatggaattgaatgcaatggaatggaaaggagtcgagtggaatggagtggagtggcatggagtggagggaagtagagtgtagtggagcgtggtggaatggaatggaattgagtggagtgtaatggaatggaatggtgaaatgaaatgtgtgctaagattgtgccactgcggccgggggcggatgcacgcctgtaatcccagcactttgggaggccgaggcgggcagatcacgaggtcaggagatcaagaccatcgcagctaaaacagtgaaccccgtctctact

SEQ ID NO: 496674 - DNA, 232 bp, Homo sapiens
  misc_feature (92)..(92): n is a, c, g, or t
taacagagatacctatgaaatgtagttattacgatcagcacggtacaaatgaaacacagcagttgattatctgtacagtagctgaactagcntatcagtcttcttccagtcatcagcatagtagtaagaaaacacttggtaaggcagatggagacatatttatagtctatagtctgtctgggaaggctgactgccagacagggcagttggtcatctttacctagctgacaca

SEQ ID NO: 496675 - DNA, 186 bp, Homo sapiens
ccggaaaaaacccccgggggggggcaaaaaaaaaggggggtttttttttttcccggccctttaaaaggggtggcccccagggccccggggccccccgaaatttttttttttttaaatttttttttttttaaaaaaaaaacctggggggggttttaaaaaaaaaaaaacccttttttttttcgggga

SEQ ID NO: 496676 - DNA, 304 bp, Homo sapiens
gttaaaaacccctggcagctaaccggtttgactatagcaagaacactatccgcaagtgctaggataataggtatagaaccactgcgccaagccagatatagtatatatctatttaatctagctagtattacctaacatatatataagaatctaccgctatataagaggtacacaaacctatagtgatatgtatatatactatacctcatagaataagaccataattttcactaataaaagtagtaccctcatgtagcaacagctactataaaataacatatctagtacaatactctagataata

SEQ ID NO: 496677 - DNA, 280 bp, Homo sapiens
gcagaccaatgcattcaggattcagtactcttataagtcttgactacctgagtgacagggaagatctgtgatgtgcagcaatttaaaattttgcctaggtaccaacttgaatctcacaagcttggattcccaggatggggtcccttaagtttaaatctccctttaaaaggcttattttaaaaaccactagtcctgggaggacagtacagatttttaaaataagggaggtttttaaaaccaaagtagtgaatttgacttaatagtctaacttgtgaatgaa

SEQ ID NO: 496678 - DNA, 1599 bp, Homo sapiens
  misc_feature (60)..(60): n is a, c, g, or t
  misc_feature (62)..(62): n is a, c, g, or t
  misc_feature (70)..(74): n is a, c, g, or t
  misc_feature (76)..(77): n is a, c, g, or t
ccacgcgtcgcccacgcgtccgtggtaataaaatttgtggatgcgcttcaggagcgtggntntctgccannnnncnnattttttgacaaggttttcacaagtgttaaactgatgtccattttgaggaaaaagggggtgaaagccacaggaactgttcgtgagtacaggactgagcgatgtcccctaaaagaccccaaagaactgaaaaaaatgaagaggggttcatttgattacaaagtcgatgagagtgaggagatcatcgtgtgccgctggcacgatagcagcgtggtcaacatttgctccaatgctgtgggcatagagccagtgaggctgaccagtcgtcactctggagcagctaaaacgcggactcaggtccaccagccatcactggtgaagctgtatcaggagaaggtgggtggcgttggtaggatggatcagaatattgccaagtacaaggtgaagatccgaggcatgaagtggtactcaagctttattggctatgtcattgatgctgccctcaacaatgcatggcagctgcatagaatctgctgccaagatgcccaggtggacctccttgccttccggagatacattgcctgtgtgtatctggagagcaatgctgacacaacatctcaagggaggcgaagcaggcggttggagactgagagccgcttcgatatgattgggcactggattatccatcaggacaagaggacccggtgtgccctctgccactcacagaccaacacccggtgtgagaagtgccagaagggtgtccatgccaaatgcttcagggagtaccacatccggtgacatcatgagacatgcttctttggtttataatgagatgtttacagttaaatacagatggcagttgagcacttctgttttgtgttggaaaaaagacctgaatttctaatgacttgattttctattttctccctacccacaatacagttatcttttttattgtgttgtgttatgcctacatgtgatataaattaatatttatattcatttatatttatatttttgaacttatttatttaaagttatggatcactttttattcaaataaaagttgtgctttggggtatatttgaatcctagcaagaataatcaaaggaaaacttgcaagaacagtaagaagactttaccattgcatgccatggtttataatctaagataggcaatagtgtataaatatcatgtaaatgtgatggatttcttaatcatatttatttcatattaatccaagtttatcaaacttttgagggataatctgccttgtatttagtcagagggctagaggtgcagatttcatattttcttaatgaaaatattttcctaatacacatatatcaatgtgagattcatttttgtaaaaaaaattatttttttaattttgtgggtacatagtaggagtgtatttttatgggttacatgagatattctgatacaaacatgcaatgtataaaaatcacatcagggtaaatggggtatccatcttgtcaaacacttgtcctttgtgtttcaaacaatccaattatactgttagttattttaaaatgtgcaattaaattatttttaactatattc

SEQ ID NO: 496679 - DNA, 136 bp, Homo sapiens
ggctcggtacctgatatgttatttccaatgcctcgcaaatgtatataatatctaagaggaaaggttttgtcatcccagctgttgtccagctttggtgagggctatatgtaggagtagacgtgatgccacaatctac

SEQ ID NO: 496680 - DNA, 167 bp, Homo sapiens
ttggggcagtttaatggcattattgtttaggaggtgaaaataccaggacagagtgtttaatgaggcctgactccggtgacgtggggaagctagccgcaagggccttattgctcaatgtccatccgctgtttccggtttcccggtgcccacagcctgctctgctgcag

SEQ ID NO: 496681 - DNA, 320 bp, Homo sapiens
  misc_feature (82)..(82): n is a, c, g, or t
tggttgtacatcccacttgcccccacacggagactgactttaaaacccttcatccaatggtggtaacccccgggttttcccntgccccacctcacccacccaaaaaagcacagaccccgccaggggcaggggccccccgcacacccttgttccgggcctgtttgggactggccttcccggctcaaccagttaggctcaaaagggacccaaaaagggatggaaaaaaagaacaaaaagaaactgttcctcccacccccttccctgatgccaggggcaccagactgattttgaggcacaaataaaaaaggcttcataccgga

SEQ ID NO: 496682 - DNA, 469 bp, Homo sapiens
atcacagtggagtaacttagccaattctaacttcttggccaccaggagcaatctcatctaagagtcttacggatacacataagccagaatggttctcagcatttaccctaaggaaaggtgcaaacacccatggataaatgccacacaaaatgatcttatcaaatacagagatggcctgtccttgggttaggtgggatgtaggtggaagtgggtcactatgccatcatagcggccgtatttataaagatcaattgacaccaggaccgggtgattgggttctgagaaagggagcctggaggaatcgtggggagagattttcagggagagccagagaaatcttcctcaaatgacagggtccattataggcctaaggaaaactcaactggccatattttgttaactctagcaaagcttatgataggtttcaataaattagcacctgaatgaagacttctgtctccatgaaggc

SEQ ID NO: 496683 - DNA, 248 bp, Homo sapiens
  misc_feature (20)..(20): n is a, c, g, or t
  misc_feature (163)..(163): n is a, c, g, or t
  misc_feature (221)..(222): n is a, c, g, or t
tctctgtgttttcttgaatntctttgagttttctcaaagcagctattttgaattctctttctgaaagaaggtcacatatctctttcttcaggcttggcctctggtgccttattgagttcatttagtgaggtcatgtttttcaggatggtgttgatgcttgtgnaaatccacctgtatctgatctgggtgttggaaatgttagatatttactagtctttttnngtctgggcttgtttgtatgcatcctc

SEQ ID NO: 496684 - DNA, 145 bp, Homo sapiens
agaaaggcagcaacaagacgggctcgggagactcttcttccctacttaccgacaacataactaggttcttcgtatgtagctctgagccccataagcttttactatgtcattggccttgcagcacacccccagcacacagtcactc

SEQ ID NO: 496685 - DNA, 140 bp, Homo sapiens
gattttttttgtggcatgaaagttaaatgtctatattatggtagaaatactcctgaaggatattgtacttctttagtgctcccagaggaatttttaataaaagcaccttccttaacaataaattctttcacggacttata

SEQ ID NO: 496686 - DNA, 1427 bp, Homo sapiens
  misc_feature (165)..(165): n is a, c, g, or t
gatcgtgtcgtgggatggccgctgggccgacatctttctaagtctgcttcgagcacccttcagttccatggccaagagcccatctcgatgggcgtatatctctccttccagatggctctgcacgctggggcgcgtgtgcctgcggaatggctctccagtctgaangtgcaatcaattgcgcactgaaactgcgtccaacagtcgtatgagacatcgtttgcctggactactgaagtgctcaccggggagaggcgctagacgaccgactgggtcccctaacagcgatctgccagtgaacgagtgtcttccctctttctctctggagccgccggccatgcaagaccgaggtacgaagactgtgtgcagtcgccaatgtcccccgtgcaagaaaacacccttcgtttcagccagagcgtccccaacgggcaaacgaccgcggaggagtcaacgaagagaaatcttttatgtggcaggaaaggagtgccgttcaccaatacacttatttggagaggagggcccctcctgtgaagaagttgacaagagcccaatttaccttctaatgtgttgcaccctggcgttgttggcttttgtcgggaattggcttcctcaacatccgttgtgcactctttcggcaacgttcgtcttcacgtctttccattgtcggagcacgcgggcggcaacgatacggggtttaagacaacccctaaggaaggaactgccgagacgaagaggccaattatatgggaagccacccattcacgaaacttcgggatatccgagcaaaaaggagaacagggtggttaaaaccatcagagactaaatcttcgccattgacgtcccgttggcgttacacacagcaaggctggaaccgacacttctggttggcggatttagagaagggctgccccaagaatggttaaaccgacgccacagatggggtgtcatcatcttggttgatttgctcaccacacgtgggagcgtgtcccgatttgcgcagatctgcgcgaaaaattgcccaattggtcgtgtggggtcccccaatttcctccggtcccctttgggtcaaaaccatttggtgttctccaccatttggtgacaagaacgggacccgccctttacatttggggaaacaaactaaacaagagcactctggttgggggacttaggtagggacgtaggggagcatgttctcatattttcaccgcacaccaacagtacggaggtggacagtcgctaaaatcgcttacacagttttcctctatattacgacaccagagcatattcacgcgcctccccagcccttaaagggaacgctggctcgccacccacacgtttttcacctgtttacccaaacagtttttgccccactaccacgtttttggtcgagtacacagagagtggcccacaatacgctggctttccaccct

SEQ ID NO: 496687 - DNA, 128 bp, Homo sapiens
accccgtgtcttcagaagcttatcttgtctcgactcttgttttcgaccctcatctttggacatgtatgctaagatgatgtgcggcatattcatgcccccggtttcacgaagggaaattaaccagatca

SEQ ID NO: 496688 - DNA, 145 bp, Homo sapiens
  misc_feature (36)..(36): n is a, c, g, or t
atttttcaagtgctgaaacaaaatagttgtcaatanttgagagtagttgttggttgggttggtttgggttttgcgaaaattttcacttcattcctgaaggatagttttgctgaatataaaatttaatattgacagataaaagaaa

SEQ ID NO: 496689 - DNA, 399 bp, Homo sapiens
aactggtatataatgggagaatctctcgatagaagtggacttgcatatattggggcagggtgatacagtctatgcggttttgggcggggtaacaagaggggatgagttgtgtgaatagcccaagactcccatgagggagatgccatgagccggccaaggccttcccctggcactggcacacagggcctctgcggagcacactggctcacccagtcctgcccgccaccgttatcggtgtcattcacctttcgtgtcttttcccgtttatcctctgttgattttttcttgtgctttatgggttaggcttgtctctcttgcatggtttggagctgatcgcttctcccccaccccctagggtaccagcaggcagagccttgccctctgctcaggctgggcgtg

SEQ ID NO: 496690 - DNA, 390 bp, Homo sapiens
  misc_feature (368)..(368): n is a, c, g, or t
  misc_feature (375)..(375): n is a, c, g, or t
atgaaatgttcaattatattaaaacaaacaggcatgagctactgcgcttggccaatatattttgaaagagttagatatgaagtaaaaccttgctaatccttaagcctaataattcttgaccaagggtaaccctgggtttatccctagatttgtttagaatgctttgtaatttactttgcattcttaatttgaaattagacccaattctggcctctttggaccatctgagaattaaaagtctaagtactgcttcctagggagttcatgctagctggggaaagctttatgtgttacctgatagaatcaaagctaagctcttagcttgcattcccagcattactgatcagttctcctaggtataaaatttnaaagganctatagctttaacca

SEQ ID NO: 496691 - DNA, 200 bp, Homo sapiens
  misc_feature (39)..(40): n is a, c, g, or t
  misc_feature (92)..(92): n is a, c, g, or t
  misc_feature (138)..(138): n is a, c, g, or t
  misc_feature (188)..(188): n is a, c, g, or t
cgggcatggtgccagcctgaagagcacagccaacatggnngtggggcggggggtggctcaacgagtcccttctgctgggcctctaccttcangctccaacctgccctcgctggaactgctcatctgtcgatgcctctnccacctccctatgccctgctacttaaactgcgtggcgaccccttctgggnccccgacatccg

SEQ ID NO: 496692 - DNA, 808 bp, Homo sapiens
  misc_feature (4)..(4): n is a, c, g, or t
  misc_feature (105)..(105): n is a, c, g, or t
  misc_feature (135)..(136): n is a, c, g, or t
  misc_feature (138)..(138): n is a, c, g, or t
  misc_feature (184)..(184): n is a, c, g, or t
  misc_feature (190)..(191): n is a, c, g, or t
  misc_feature (193)..(193): n is a, c, g, or t
  misc_feature (226)..(226): n is a, c, g, or t
  misc_feature (231)..(231): n is a, c, g, or t
  misc_feature (234)..(235): n is a, c, g, or t
  misc_feature (243)..(244): n is a, c, g, or t
  misc_feature (255)..(255): n is a, c, g, or t
  misc_feature (268)..(268): n is a, c, g, or t
  misc_feature (273)..(273): n is a, c, g, or t
  misc_feature (276)..(276): n is a, c, g, or t
  misc_feature (453)..(453): n is a, c, g, or t
  misc_feature (460)..(460): n is a, c, g, or t
  misc_feature (481)..(481): n is a, c, g, or t
  misc_feature (542)..(542): n is a, c, g, or t
  misc_feature (546)..(546): n is a, c, g, or t
  misc_feature (800)..(800): n is a, c, g, or t
gtgncgagcttccagcttggccccagttggttcgtagttcggctctggggtcttttgtgtccgggtctggcttggctttgtgtccgcgagtttttgttccctccncagcgctcttcccgggcaggagcgtgaggnngnaggcggcacgcggtccccggccaggagcaagcgcgccggcgtgagnggcggnngnaaaggctgtggggaggggcttcgcagatccccnagatnccnnagttcctnnaagacccctcngtccttacaaaanacaanttnaagatttattttgtctccaacaattttacgcttcctgccggtgaacaacccaaagacgtttacttccaactctaccttcaacacctcactgctctcaaccggccgccgctccccgcctgcaccaacagcaaggtgcccccggacttctccatttacgaagagcgcgagcccaccccngtcctcngctctggggccgccgccgcgngccggagccgagcagccgtcggcagggtaaggacgcggggccggggctacaaaggcgggcntttngcggttgccgcgcgcgctcgccgccgtttgcagcccctccctcccgggcgccccctcgggcctcccaggtgcggggctgtccctgcgccccctcgcgtcgccccttccccgcggggctgcaggcgccggagcggagaggccagaagttggggccgcggggttcgcgttctttgacgtgtgggtctgggaggtgtggagttgcgttggcggcggttgttttgcacgcagtcgacgccgcttccctggaccaccanggcgcctg

SEQ ID NO: 496693 - DNA, 524 bp, Homo sapiens
  misc_feature (117)..(117): n is a, c, g, or t
  misc_feature (152)..(152): n is a, c, g, or t
  misc_feature (156)..(157): n is a, c, g, or t
  misc_feature (165)..(165): n is a, c, g, or t
  misc_feature (169)..(169): n is a, c, g, or t
  misc_feature (293)..(293): n is a, c, g, or t
  misc_feature (302)..(302): n is a, c, g, or t
  misc_feature (323)..(323): n is a, c, g, or t
  misc_feature (339)..(339): n is a, c, g, or t
  misc_feature (353)..(353): n is a, c, g, or t
  misc_feature (371)..(371): n is a, c, g, or t
  misc_feature (373)..(373): n is a, c, g, or t
  misc_feature (381)..(383): n is a, c, g, or t
  misc_feature (386)..(388): n is a, c, g, or t
  misc_feature (390)..(390): n is a, c, g, or t
  misc_feature (392)..(395): n is a, c, g, or t
  misc_feature (424)..(424): n is a, c, g, or t
  misc_feature (429)..(429): n is a, c, g, or t
  misc_feature (434)..(434): n is a, c, g, or t
  misc_feature (441)..(441): n is a, c, g, or t
  misc_feature (446)..(446): n is a, c, g, or t
  misc_feature (491)..(491): n is a, c, g, or t
atgccaaatttttattaacaccattttatttcttttgcagctttaatttttaacattataacatttactggctcctctgggtgactaaatatcttcacatgcccactagctaaaaanaatttctaagtagaactcaactgaaactgaaagcnactnnacataaanaaanggcatacttatgtttatttgctctcctatgatgaatcctgtttacaaatagcataactgcaaagatttatatgtaatttctaaatccttcaggttgctctaccattcatcttcttatgtctggnaagaaaaanactcttagtgaacactttgcngcatctcttaaatganattagtctccagtntatttcctatagaataangnaagaattnnnaannnanannnnccttcaatttctaaagtttccacattcanaaaantattnctcctgnaggantttgcaggagattcctattgcctatagtctttcccaacatttgcnacatgtacacagatttttcgtatttttattata

SEQ ID NO: 496694 - DNA, 154 bp, Homo sapiens
ggtcggagtttactccgtgcgtgtctttcgtctggtccgtgttcaacagcctcttcattaacacctgctgcctgtggcttcatagcattcgcctactccgtgaatgtctagtggacagcgaagcatggttgtgcgaccgtgacctgtgggccct

SEQ ID NO: 496695 - DNA, 174 bp, Homo sapiens
tagacgaacagattctcagagccagaatcacgcaggtcgaagcctccaatgacgatgaagcattggcgctcgtacgggatgagctgatatcgatccataacgagcaggctgaaagtttggagaagacaaggggtgagcttgtcaacgtatctgcaaagcttcaggatacgcagg

SEQ ID NO: 496696 - DNA, 698 bp, Homo sapiens
  misc_feature (12)..(12): n is a, c, g, or t
  misc_feature (26)..(26): n is a, c, g, or t
  misc_feature (58)..(58): n is a, c, g, or t
  misc_feature (417)..(417): n is a, c, g, or t
tggatgcccttnctaaagactcagtnacagtgccagctaggtggcaatacttgcaagncctgtggcaaagttctccacaaggctggtatatgctctgaatcagtgtccagcatgtggtgttgtttctcccatagccaggattcacaagtccaggaatcaagggatggaaatgagagcgacactactcactattactcctagtgatccactagcaaactttttgcttctcgtttctatgtctttatgctatgctggcctagaggtcttagttccaaagggaggaatgtttctaccaggagacaccacaatgattccattgaactggaagttaaaattgccaactagccattttggtttcctcatgtctctgaatcaacaagcaaataagggagtttctgtgctggccgaggtgattgntcctgactaccaagggggaaactggactgctcctccacaatggaggcctcatccaatcagttgaagaccttgggagtaaataggctggagtcccctgaggaagagagaattttgcccccagactgtcttcaagcttgatctgcaatataaactcttccctgagtctccagagtaccagcctatcccgcagattttggatgccacagattttggacttggtagcctctacaatcatgtgagccaattccttaaaaataaaagtcttcctttgtcttttaaaa

SEQ ID NO: 496697 - DNA, 298 bp, Homo sapiens
aatctcagtaacgtatgtacatagtcccccaaaaaaaaaaagcagcattggctgggaacacatcagtataagcaaacaaaacatcaaagggcctgaattctaaaataccttgggattatataaaattacatggtaaagttacaaatgtggctcattctggagaaatgttggaatgtttaaataatgtggccttaatacatattatttcacgacattaaaaaaaacaagggtgaatacaaggtatcatcatttcaagggtaaagagataaagcaagtacatatacgtgtagaaatggaa

SEQ ID NO: 496698 - DNA, 364 bp, Homo sapiens
  misc_feature (30)..(30): n is a, c, g, or t
  misc_feature (119)..(119): n is a, c, g, or t
  misc_feature (137)..(137): n is a, c, g, or t
  misc_feature (300)..(300): n is a, c, g, or t
  misc_feature (329)..(329): n is a, c, g, or t
  misc_feature (343)..(343): n is a, c, g, or t
  misc_feature (354)..(354): n is a, c, g, or t
aaagcagccttcaggctactctctcttggntccttgctctggggaagaacactcaagcagctttagaaaaagtccacgtggcaaggaattgtggtcttttgccaacagccatgtgagtnatccatcttaagagtggntcctccagccccagtaaagtgttcaaatgacagcagccctggctaacatattgactgcaacttcatcagggaacttgagccagaaaaactcagctaacctgctcctaaacttctgacccacagaaatggtgagataatgaatgcttgttttaagctgctaagntctggaataatttgttattcagcagtagnataactaatacaangccacccaagnatcatttccc

SEQ ID NO: 496699 - DNA, 788 bp, Homo sapiens
  misc_feature (126)..(126): n is a, c, g, or t
ggaagggaaactgcgaggcgaaggtgaccgtcgaccgtgcatttcagatctgctcgtgtagacctggtgcatcaccaccatgttggtgcaaggttggtgtgtctccgtacattaccttctagggtntgccacccagtttcaccaaggcctcccctgttgtgaagaattccatcacgaagaatcaatggctgtgaacacctagcaggaatatgccacaaaacaagaattgggatccggcgtggagagaactgtgcaagaactcaaagaggcagcatgggaaccatcgatggcaaacaacatatttaaacaattgatcagatgggaagcatggtttgtggctggaggggctgcttgtggtcttggaagcattgtgctactatggttgggactgtctaatgagatgtggagctattgaaaaggctgtaattgtggcctcagtatgtcaaggatagaattcattccactatatgtacttagcagggagtatggtttaacagcttgtgtctgcatagcaaatcagagaacgcctgtcctcatgaactttcattgatgagaaggctcttggggtgacaaattggttgtgacctttgcagccatggttgagctggaatgctgtacgatcaatacaatatgacaggagccaggccaaagcatttgcttggtgcacttcctggttgagggtgcaggtggtctccgaccaaattaggggctctctccacagacgcttggcacagtggttgggagccccaattgcgttggcccgaaatttaaatggcccgatgcggcca

SEQ ID NO: 496700 - DNA, 363 bp, Homo sapiens
ggattcattgtctacccccaacgcccatacctatcaagctggcactccttataccccattctctgtttcatctcatcccctgttaatgaggcttttgcccttatggacttaccaattctgagatattgcctatagacagaatcacacactatttgacttttttttttcactgcaacctctgccttccacggtcaagagattctcctgactcagcttgcaagtagctgggattaccggcatgtggtaccacgcctggctaagagtctggtcttcttagtagggacatgttggccatgctggtggagctcctggcctcaggtgatccacacgcctcagtgtcccacagtgctgatattacggcct

SEQ ID NO: 496701 - DNA, 219 bp, Homo sapiens
acgctagtataactgagcttatgttatgagatgattttacaaagtcctagataaccacaggactggtggcacatgcagggaatcaaccctgtgctcagacgagttagaactcaaaaccccaccctcaagctccagggaaaggagaggggctgaaggtagcactgataaccaatggccaatgacttaatcaatcatgcttacctaaggaagcctccataa

SEQ ID NO: 496702 - DNA, 116 bp, Homo sapiens
gcaggaataggaatcatctgtgtaccacactcgtgctgacatcgtgattagatgaggcacagtagtctatctttgtgcacgttttcttatctgggttaagagcaaatccttcatgg

SEQ ID NO: 496703 - DNA, 299 bp, Homo sapiens
accctctcgcgattcggccgatgggagcttgaggtccccgggcactcctgatggacgtcaactattcctgcaggtcagcgccaactattcttgcaggtggtcaccaggttcatcgttctctcgggtagttgtcgttcacgcgatgtagttgtcgtcggttcagtgtgtagttgtcgctggtccggctcgtagttgtcgtcacggcgcggcgtccacggcaggtggcctggcgcgttgctcggcctcgtcggcgcgcttggggcgccctgagaattccaggatgacggaatagtggacga

SEQ ID NO: 496704 - DNA, 386 bp, Homo sapiens
tacgggtccacgatgtcgttgacggcgctgggaaacttcgtagcccacgcacgtattgctcgcggttgtactggttgactgcccggctcgccgataaacacatcgcgcttgatcttgccgttggggttgtcccaccgcgtgctggacgccggcagggcttgggcttcgggcacgcctttatctttctggtactgggcgaacagggtcaggctgtgtttcgtcgttggggcgccaggtgaggctgggggcgatgaactggcgcttgttatcgacgtagttgatatcgtcttgcgcatcattcgccaggccggtcaggcggtagagaaactggccctcctcgtccagcggggccggccaggtcgatggccgggctctggtgttcggaa

SEQ ID NO: 496705 - DNA, 415 bp, Homo sapiens
atgggccaaaaaaaaaaaaaaaaaaaagggccaatgctgtgggtagcccctttcataaaggggttaagctcattccccagggaagagctttcatggcctaatcccctccaaagacccccccttttaatactattgcattgcagattaagtttcaacatgaattttggagggatacaaatattccccccctagaatatagtaaaataggataggatatattttttgggtctgtctgcttttgcccagggtaatgtttttgaggttcatttatggtgttgcatgtattagtaggttgtatttattggtgcatagttattcccttgtatgtatgtaccccccttttctttttcctgctgatggatattgcattgtttccagttttggggtattatgaataaaacccctctccccctta

SEQ ID NO: 496706 - DNA, 1165 bp, Homo sapiens
gctagaacacaggtgatctgacggagagttgagtcaacggcgcgtggaaggagtcctccagaccactatggtgcactcaagaggtagtcctctgtgctcccaggaatggtcgctgctttggtgtgcctggtgtgacccatctacttccgctgggaacagtcatgagagaaggtagggactcgtgcaacaactgcgtgctgaggaatgatcagagcagcaggagacagaggccttgggacaattacctggcaatatgcggagctgaacatcttcacttcctgaggggatctggcgcttctgggaaagtcaaagcctctcagggttggcgtggctggtacgagtatcgtccatcgataggcttacatactggtgacaagggggaaccgaggaggccgcccagaggggaatcccatggcgttccagcacgaaacatcgcgtccatacccttcatatgtgtcgacaggcagtcatgcttttccttcgctggcggcatcaggatctaattactctgtgcctggtacgagggacgggggactgccatcttcttcaggctcgcatggatcgtctgagacgaacagtacctagtactcacatctcccactggtggaactagacattggtaaatgctgtagctgcaaatggggtcactccatttggtacccctgtgtaccagggtaccctcactttagcaagtgccagggaggcttactatgccactgcaaggaggtgtgagtcaggggacgaaggaagtgcgtaaaaaggcaatgaggaggttgcaagtttgcacaaggaaatagggggaatgattgtggaagggccactggttgcaacgttatgcccaccacccttatgcgtgtactctgggggaacgcgacggtttgtttcccagccctaccggggggtaaataatggacaaaacttgtttgacaacgaaatgcccctaatcaaggaattctatggactcggccccctagtggtccctggtgcggcactgcggtcaaccccttgcacagactcgttcagtaaggtgcgactccctgttaaggcgctgtggggtgtgaaccctgtggccctatttgggcaagggatctccttgcaaaacctgtgcctgttatatggcccaggcaaaaccgggtgtacctcggtctcgccatgtaatgtgtgt

SEQ ID NO: 496707 - DNA, 950 bp, Homo sapiens
  misc_feature (383)..(383): n is a, c, g, or t
  misc_feature (398)..(398): n is a, c, g, or t
cttcatagacccaacccagagagttaagaccaggtctctctctctctctctctctctctctctctctctctctctctgtgtgtgtgtgtgtgtgtgtgtgtatagctatgctactgtgtactactacactatcataacaaaccaccaccacaccactctcactatgcgtagagatgcactatcacgcgcgagcagacagatgtcgtcgtcactataggaaacgtagcagctcccagcactcagcagggtccagcaggagaggcacaaagaaacgcacagcagctcttgtcatcatcagcaagagaggaaacatctctcgtgcatcacccctctttaaacaggccttctatagaaagcagcaaaacagaatgcacgccactacnacataatatacagcnagcggcctcttgtaggagctcatgataaataatggtaaatgtctgcgataatctaatctataataatagtagatctcttttatgtagtatggcacagcaaacatcatataatatactatacttaattagaacgagaatgcaccaccagcccgagacaggtctgccagtactcactctctccaatagttagaatactgctgcgaatgattgttggtaatgtatcggctgtatttataataagtacgccagacagtatgtagcaccagtagaccaatcattagggcagctggaatattttagcttgtatgagagtgttgattcctaataggtgataaagccatgctgttgtccgcatgtatactataagctgtcaaatcattctgacagatacttaagataatgacaagaataaaataaagtcggcagacccccgtgaagaaataagaacaccccaatcttcgttggtgtccataatagaaaacactatggtaacgaggaaggacgattattcccaataaagggggggaaaaataactagaacacggataatgg

SEQ ID NO: 496708 - DNA, 92 bp, Homo sapiens
agctcccagacatctgtgtacttctacttctggcatcactccgaatcaggatcagccccagcattttggtgatgggactcgactctccatcc

SEQ ID NO: 496709 - DNA, 406 bp, Homo sapiens
taatctgtactcattgcgagatggtgggaaaagcgtagtacctggactggatagcaccgtccctcatggcacagtctctaatggcctcccttggctaggggagggagttccccaaactcttgagcttcctaggtgagaacagagctaccctgcttctgttcaccctccgtgggcttcacccactgtctaaccagtcccagtgagatgaaccaggtacctcagttggaagtgcagaaatcacccgccttctgcattggtctcactgggatctgaggactggagctgttcctattacgccatcttgtcagggaatcagattatttgttttttacttgttgatttgttcaaggccctgttagattcttgatattagctccctaccttaccatatacaaaaattaactca

SEQ ID NO: 496710 - DNA, 3516 bp, Homo sapiens
atggatgcaaaagctcgaaattgtttgcttcaacatagagaagctctggaaaaggacatcaagacatcctacatcatggatcacatgattagtgatggatttttaacaatatcagaagaggaaaaagtaagaaatgagcccactcaacagcaaagagcagctatgctgattaaaatgatacttaaaaaagataatgattcctacgtatcattctacaatgctctactacatgaaggatataaagatcttgctgcccttctccatgatggcattcctgttgtctcttcttccagtggtaaagattcagttagtggaataacttcgtatgtaaggacagtcctgtgtgaaggtggagtaccacagaggccagttgtttttgtcacaaggaagaagctggtgaatgcaattcagcagaagctctccaaattgaaaggtgaaccaggatgggtcaccatacatggaatggcaggctgtgggaagtctgtattagctgcagaagctgttagagatcattcccttttagaaggttgtttcccagggggagtgcattgggtttcagttgggaaacaagacaaatctgggcttctgatgaaactgcagaatctttgcacacggttggatcaggatgagagtttttcccagaggcttccacttaatattgaagaggctaaagaccgtctccgcattctgatgcttcgcaaacacccaaggtctctcttgatcttggatgatgtttgggactcttgggtgttgaaagcttttgacagtcagtgtcagattcttcttacaaccagagacaagagtgttacagattcagtaatgggtcctaaatatgtagtccctgtggagagttccttaggaaaggaaaaaggacttgaaattttatccctttttgttaatatgaagaaggcagatttgccagaacaagctcatagtattataaaagaatgtaaaggctctccccttgtagtatctttaattggtgcacttttacgtgattttcccaatcgctgggagtactacctcaaacagcttcagaataagcagtttaagagaataaggaaatcttcgtcttatgattatgaggctctagatgaagccatgtctataagtgttgaaatgctcagagaagacatcaaagattattacacagatctttccatccttcagaaggacgttaaggtgcctacaaaggtgttatgtattctctgggacatggaaactgaagaagttgaagacatactgcaggagtttgtaaataagtctcttttattctgtgatcggaatggaaagtcgtttcgttattatttacatgatcttcaagtagattttcttacagagaagaattgcagccagcttcaggatctacataagaagataatcactcagtttcagagatatcaccagccgcatactctttcaccagatcaggaagactgtatgtattggtacaactttctggcctatcacatggccagtgccaagatgcacaaggaactttgtgctttaatgttttccctggattggattaaagcaaaaacagaacttgtaggccctgctcatctgattcatgaatttgtggaatacagacatatactagatgaaaaggattgtgcagtcagtgagaattttcaggagtttttatctttaaatggacaccttcttggacgacagccatttcctaatattgtacaactgggtctctgtgagccggaaacttcagaaactttgggatttgaatcaaaaaaagtttatcagcaagctaagctgcaggccaagcaggaggtcgataatggaatgctttacctggaatggataaacaaaaaaaacatcacgaatctttcccgcttagttgtccgcccccacacagatgctgtttaccatgcctgcttttctgaggatggtcagagaatagcttcttgtggagctgataaaaccttacaggtgttcaaagctgaaacaggagagaaacttctagaaatcaaggctcatgaggatgaagtgctttgttgtgcattctctacagatgacagatttatagcaacctgctcagtggataaaaaagtgaagatttggaattctatgactggggaactagtacacacctatgatgagcactcagagcaagtcaattgctgccatttcaccaacagtagtcatcatcttctcttagccactgggtcaagtgactgcttcctcaaactttgggatttgaatcaaaaagaatgtcgaaataccatgtttggtcatacaaattcagtcaatcactgcagattttcaccagatgataagcctttggctagttgttcagctgatggaaccttaaagctttgggatgcgacatcagcaaacgagaggaaaagcattaatgtgaaacagttcttcctaaatttggaggaccctcaagaggatatggaagtgatagtgaagtgttgttcgtggtctgctgatggtgcaaggataatggtggcagcaaaaaataaaatctttttgtggaatacagactcacgttcaaaggtggctgattgcagaggacatttaagttgggttcatggtgtgatgttttctcctgatggatcatcatttttgacatcttctgatgaccagacaatcaggctctgggagacaaagaaagtatgtaagaactctgctgtaatgttaaagcaagaagtagatgttgtgtttcaagaaaatgaagtgatggtccttgcagttgaccatataagacgtctgcaactcattaatggaagaacaggtcagattgattatctgactgaagctcaagttagctgctgttgcttaagtccacatcttcagtacattgcatttggagatgaaaatggagccattgagattttagaacttgtaaacaatagaatcttccagtccaggtttcagcacaagaaaactgtatggcacatccagttcacagccgatgagaagactcttatttcaagttctgatgatgctgaaattcaggtatggaattggcaattggacaaatgtatctttctacgaggccatcaggaaacagtgaaagactttagactcttgaaaaattcaagactgctttcttggtcatttgatggaacagtgaaggtatggaatattattactggaaataaagaaaaagactttgtctgtcaccagggtacagtactttcttgtgacatttctcacgatgctaccaagttttcatctacctctgctgacaagactgcaaagatatggaatgtctcaaacggtgagcttcttcatttgtgtgctccgctttcagaagaaggagctgctacccatggaggctgggtgactgacctttgcttttctccagatggcaaaatgcttatctctgctggaggatatattaagtggtggaacgttgtcactggggaatcctcacagaccttctacacaaatggaaccaatcttaagaaaatacacgtgtcccctgacttcaaaacatatgtgactgtggataatcttggtattttatatattttacagactttagaataa

SEQ ID NO: 496711 - DNA, 162 bp, Homo sapiens
cacatatgcagatactcaggagtgtacatgccagggataggattgccagagcaagatgaaatacagcacaggaggtatagaaatacctcctctgtttcttgcccttccctgagatatataggaatgttctccgattccatcagcccctctctgggcacctgg

SEQ ID NO: 496712 - DNA, 365 bp, Homo sapiens
ttttttttttttcttggagaagggagtctcatcggtcacccaggcgggagtgcaggggggcgatctcactacaacctcggcctccggggttaaagcagttctggtctcagcctccctagtagctaggactacgggcgcagaccaccacgccgggctgattttggtatttttagtggagacaggatttcaccatatgggtcaggcgggtctcgatctccggccctcaagtgatccacccacttgggcctcccgaagtgtgggggtcacaggtatgagccgccgggccagaggtaccattatatctggaattttttttttgggacatcctggagtgggcaataggtgggcgggtacctttaaggggg

SEQ ID NO: 496713 - DNA, 638 bp, Homo sapiens
ccaatggggcggggtaatcagtcttgtttcaggggcttcaacagagggaagctgttcataggacttgagtccaggttcctcgccgtagtagataggttccccatgatgaatgtcagctcggtcacgcgtgttgcaaacgaggtagtagtgtccatggctctctaagactttttcaaagtcatggaagtagcgatgtatcatgttctctatgatcaaggcaagtttggcatcaatgtcgtcagctggacatacgttcagaagtaggatcatttcacccgaatgtgctggaccgtctatatacatatcaatcagggctctctcttatatgtctgtcccatagaggttgtgtttgctgccaatgtagttgagaatggctctggtctgcaccagcttcgtcccatcgatctcacacattggcacctgctggaacatcgaatatcgttcatttcttaacttgtccaaatcttatgcagattttataaatttctcatctcactctactccatctgcagccaggagccagtgggtggagtccattgtgccccgtgcatcgaagtagtgtagcttgggtttgtctgccatgatagcagtctcctgtaggtttctttaagctgtgttgaacgctgtcgccctcgtgc

SEQ ID NO: 496714 - DNA, 586 bp, Homo sapiens
tactgtatctctaacattaacgttcagtcgatgtagctaacaatagtcataagatcatttaaaacttaaaaaaaaaaaatcaaccagacacagtggctcacgcctgtaatcccagcacttggggaggccaaggcaggtggatcacatgaggtcaggagttcgagaccagccgggccaacatggtgaaaccccgtctctaccaaaaatataaagaattagctgggtatggtggcatgcacctataatcccagctacttgggaggctaaggcaggacaatcgcttgaacccagggggctgaggttgcactgagccaaaatcatgtcactgcactccagcctgggtgacagagtgagattccatctcaaaaaaaaaaaaaaattgggtcatgacccagcaatttcccccttaggtatgtcctcaaggcaaatgcacagatacatgctcaccaggtagtaaagggataataaataatagtagcacagtcccaaatagtcctttaatggatggtacggtgggatggtactcagtttgggaactgaaaaccttggagatgtccatcaacaatacaaacaataaacaggtggg

SEQ ID NO: 496715 - DNA, 113 bp, Homo sapiens
taatcttcatcaagtgactgatccaccgctatcgcggcaagctagctcccacatttggttttgtgtttggcttgggctcgggttagatgccgatatagccaaggaacgcgggt

SEQ ID NO: 496716 - DNA, 360 bp, Homo sapiens
gctcgacgggtctctctgtaccagaagtagtccactggggagcttcgagcgcactctgacacataacctgaacaaaaccacacatgaacatccaaataactcagccataccaagtgtattaaacggcaatgcaataaacaagggaaagactgctcagaggtcaaagtcagagtgacataatcatcagcatagcatcatagcatgtgtgggttttgtaagagtggacatgcttttttccgtacctgttttgttttcgttgagaggacattgactccatggcaggggactctgaaaagagttgaagaagtaccacatcacccaggccatgatggtgttgtagtacatggccaccaacaaggg

SEQ ID NO: 496717 - DNA, 198 bp, Homo sapiens
  misc_feature (138)..(138): n is a, c, g, or t
  misc_feature (192)..(192): n is a, c, g, or t
tagtaacactcaagattaaaaacaaaaatcattttgtaatttgtttagaagacaaagttgaacttttatatatgtttacagtcttttttctttttcatacagttattgccaccttaatgaatgtggtggggaaatttngttaattgtattttattgtgtagtagcagtgtaggaattatgttagtaccccgntcacaa

SEQ ID NO: 496718 - DNA, 164 bp, Homo sapiens
attcattaaagagctattctttgaccccccccccccactttttaaaacatatcacagcagtccagtaaaggggtttttataaaaccctctcctggtgccaaaaggtttccacacagcgcaccaggggttaagggggcgggaaaagcattggataggaagtaaga

SEQ ID NO: 496719 - DNA, 406 bp, Homo sapiens
ccacagcaaagcttatacgtgtatcaataagtacttcaaaaaataaaatggacccttatagagcaaatctgtgctagtactcaggattagtaaaacagtatgaaactaatgagatacactgatcgaaattacgaagtgacatactgatgattctgagtatgtacagggtgaggggtacaatcttcccttaagacctgccaggaaaggagagacgtggaaccaggagtggcagggacacccaagctggaggaggtgggtctgctcagtcctatgcagcgcaggctcagagcaccaccgaagacctttctgccaaagatctcatcctacccatgagaaccatcatactccagagactaaaaaacgccagtcccagctggagacgtggaaggaggtccattcctatggg

SEQ ID NO: 496720 - DNA, 328 bp, Homo sapiens
aaaaaatctattaaatccctttccatcgatcagctctgcttctttgcccagaggcatattcacgtctactggagttgacattctgctgctctgtcaactagtgggggtctgaaatgacagacgagaatttggaggttggcaccagacgagtatatcagactgatcatcgttttggttgcagattcctggatttccctagcaggctggcctctcatgcgagggcttatacaggcagtgcattgcaaaccaaaagggaacagagctaattctggtggtgtggatggggtaaaacagtcttcccccctagaatgtcaatggtaccgagctc

SEQ ID NO: 496721 - DNA, 357 bp, Homo sapiens
ctgaacctatatgtgactcctatatgcagcagcccagacatgcacacctatggggagcattgagtcactctcttctcattccgtctgaacaaagatagcactacaaagtcatgcttcctgccagcccagtggagaaatcttggagggattcccttggatttgcgaacccctgtcaatcttccaactggacatgaaaatgccgttggtcattgtggacaacgtatgtccctgaagtcaatgttccacgagaaagatgcaaccaatgacatgatgcatgaatcatgagctgcgcagatgtgtttgctctctggtcacatatgcccacgtgagacgattttcgccaccccatatgaccta

SEQ ID NO: 496722 - DNA, 460 bp, Homo sapiens
  misc_feature (285)..(285): n is a, c, g, or t
tggccaggctctctactactctaaggaaaaatatggaattagttttcacctatgctttaacaattaccacaaactcaggggcttaaaacaacacaaatttatcctctcaccatcccagaagtgacaaatctgagagggggctcacggggctaaaatcaaggggatggctgcgcggggctccttcgggacattctaggggaaaagtcggttttctggttttcagcagctaaaggcggccggtattcctgggctgggggccccctccatctttaaagccagcaaggnccagtcaggttttggtcacaaggctatctctcgggttcggacacttctacctccctcttcctgatttagggacccctatatttacgggctgggcaggtgggctcagacctataatcctagcacttggggagcgcgaggggggcagacggcttgggctcaggaggtagagagcctg

SEQ ID NO: 496723 - DNA, 309 bp, Homo sapiens
atgctggagaacaatccgacgtacacagtacttactaccatggtccctaaaagaccatatgattgtattatggccttccccctgagtatgggcaggatccatgaatgggatggattacattcctttgattaagttatgctgtgtgttaaaagagattttgcaggtataaagtccctgatcagtcgactctcagttaatcaacagagagcttttcctctgtgggcctggtctaattcggtgagccccttcaaagagggtcggaggctgtgcctgaagacagagatactttggttgggtttcgaagacgca

SEQ ID NO: 496724 - DNA, 290 bp, Homo sapiens
caggagggacggagcaggatcacactggatgctctctgtgggcccagtgtcctcacagggtccttaggagagggggtgggagggtcagagtcagggggagcctggaagacatagcacagatggctttaaaggaggggccacgggtgaaggcgcgggaacctccagaccccggagagggcaggacccggattctccccagggcctccagcagccagccctttcaacacatggactttagatttatttcacttttgggactgcaagagaataaactgtgacttttgttacag

SEQ ID NO: 496725 - DNA, 319 bp, Homo sapiens
gggggttttcatttaatgggtccccccccggttttaaaagggggcatgtcccctgctttaccccttaagggcggggggtgggccctggccatggtcccccgctggggggcggggggccctggggaccccaacttccccggggggttggggggccccccccatggaaccggtcccctgggtttttcccgggtgggtacccggccgaaaattggcctggaagccgttttgccttggggggggggcccggtttttagggctgttttggtcccccccggggttggcctggggggggggcccctttaaccccccccctcctcca

SEQ ID NO: 496726 - DNA, 128 bp, Homo sapiens
  misc_feature (123)..(123): n is a, c, g, or t
  misc_feature (125)..(125): n is a, c, g, or t
tattcatctatggccaaccagcattgtcaactcacctactcgaccgcgtaccatagagcgcctatgagacagcaaggatttgcatgccgtaggctccgttaacgcgctttccctgaacgctancnggg

SEQ ID NO: 496727 - DNA, 563 bp, Homo sapiens
cggctccgcgcggtgaggttgtctagtccccgctcggaggccactgtccgtcccagggtcccctgccaatcggtccaggtcttcggaccccagtagtcctcgaccactttggccgccctgccaacccggccaatggtcttccatccaggtgaacgggcggcccctggagatgattgagccgccgccccgctcccagtaccagcgtgctggaggcccgttctgcttcttccggccaggagccgatttgctggtgtagacctcccgtgtcccgtgtaaagggtggtggtcacgtggccccagatttatgctatccgtccgtccatctcccaagccctggtggcctattacccagaaatatgtggatgaggcttcccagaaggagatccaagacatcctcatcccgtatgaccggaccctgctggtagctgaccctcgtcgctgcgagtcccaaaagtttggaggccctggtgcccgcgctcgctaccagaaatcctaccgataagcccctcgtgactccaaactcacttgtataataaaccgtttttgagggattttaaagttta

SEQ ID NO: 496728 - DNA, 723 bp, Homo sapiens
ccacagatggtgctctgcgccgcgccgctgctccgcgcgccgcgtactacccgccgtggcacacactaatagttgccccccgtcgcgagtattattattcgcgcgcgcactctctctcggcgcgcgcgcgcgtgttcactactccccctcgctgctacacacacactgctctccacacagatatacttttaggacaaaaataaagagcttctcacacacctcgggagggggcaatatatgtcgcagcacacatactctctctcagtgcgctcgtacaagataccattgacatataggatagcaaaacatatgtgcgagagcaccatcgttcctgccgctgctagatttttctacaaaggaccatcccctgggagaagatgttgtgtcatgtacccttccatggagagatatctcattgtcggtgagagagcggcgagggctccccggcgcggtttctatatgcccgtgtgagagatatctagacacacggtctcgtaccaacacacttctcgcgcacgtatgtgtgggtaacacacacaccgcgacagtacgtatgtgtgacatagtaggtgctcccgccacgcagctgtgcgccacagtctctatgtagtattgctggtagtagatctcatcctacttggtgcacactcgtactccgcggcactcagcgtgggcgcacgcattgacccgccagttattaacacaagaaaaatacaataaaca

SEQ ID NO: 496729 - DNA, 532 bp, Homo sapiens
  misc_feature (2)..(2): n is a, c, g, or t
  misc_feature (68)..(69): n is a, c, g, or t
  misc_feature (85)..(85): n is a, c, g, or t
  misc_feature (127)..(127): n is a, c, g, or t
  misc_feature (143)..(144): n is a, c, g, or t
  misc_feature (194)..(194): n is a, c, g, or t
  misc_feature (211)..(211): n is a, c, g, or t
  misc_feature (231)..(231): n is a, c, g, or t
  misc_feature (242)..(242): n is a, c, g, or t
  misc_feature (256)..(256): n is a, c, g, or t
  misc_feature (270)..(270): n is a, c, g, or t
  misc_feature (285)..(285): n is a, c, g, or t
  misc_feature (288)..(288): n is a, c, g, or t
  misc_feature (311)..(311): n is a, c, g, or t
  misc_feature (321)..(321): n is a, c, g, or t
  misc_feature (323)..(323): n is a, c, g, or t
  misc_feature (327)..(327): n is a, c, g, or t
  misc_feature (329)..(329): n is a, c, g, or t
  misc_feature (333)..(333): n is a, c, g, or t
  misc_feature (346)..(346): n is a, c, g, or t
  misc_feature (352)..(352): n is a, c, g, or t
  misc_feature (356)..(356): n is a, c, g, or t
  misc_feature (365)..(365): n is a, c, g, or t
  misc_feature (368)..(368): n is a, c, g, or t
  misc_feature (385)..(385): n is a, c, g, or t
  misc_feature (390)..(390): n is a, c, g, or t
  misc_feature (395)..(395): n is a, c, g, or t
  misc_feature (403)..(403): n is a, c, g, or t
  misc_feature (407)..(407): n is a, c, g, or t
  misc_feature (413)..(413): n is a, c, g, or t
  misc_feature (421)..(421): n is a, c, g, or t
  misc_feature (426)..(426): n is a, c, g, or t
  misc_feature (431)..(431): n is a, c, g, or t
  misc_feature (435)..(435): n is a, c, g, or t
  misc_feature (466)..(466): n is a, c, g, or t
  misc_feature (470)..(470): n is a, c, g, or t
  misc_feature (487)..(487): n is a, c, g, or t
cntggggggggctttggtttttcaggggggggggggggggggggcttggggggtgggttgggggtttnngggggagttgggagtnggtgttcgcgggggtttgggccaacagctttttgtgaaaagnttttgtgttggggggnngggggggtattggtggtggggtggggttttgtgagggtgtttattttttnttaacagagccccagantttttttttcagttacagcntcagggaaacnaggttctggttggngggttctgcagggntctttccaccactgngcntctagttccaaaccttttttgtnaaaatacccncnctcncnattncctttccaaaatncccccnaaanccccccccnaanaccaacaaaacaaaatnaaatnaaatnaaaaaaantatnaatagntaagtttngtttnaaaanacantaaagagaaagttgaggtgaatgtgtgtttngganagaaagagatagtgtanaaatgtgaaataagaaatggggaagtaaaatggaagagaaaatgg

SEQ ID NO: 496730 - DNA, 651 bp, Homo sapiens
  misc_feature (524)..(524): n is a, c, g, or t
  misc_feature (551)..(551): n is a, c, g, or t
  misc_feature (557)..(557): n is a, c, g, or t
  misc_feature (582)..(582): n is a, c, g, or t
  misc_feature (586)..(586): n is a, c, g, or t
  misc_feature (588)..(588): n is a, c, g, or t
  misc_feature (598)..(598): n is a, c, g, or t
  misc_feature (601)..(602): n is a, c, g, or t
cagtcgtgacccatgtcaaaggtatatgcagctggatgtaagttaaagtggagaaaacagattttattcagtcgctgctgacagcaggggacagagctgagctcctttcagtataatgaagagtcctggacattatctatggaatgagcatagtgagcctctgcgggatggaggcagggcttgggctcggaacagcctggcggggagctgcccaggtttcctcgtctgcctctttcatcccagacttggagctaaggaagcacatccccaaaatgccgacgctccccagcaaaggactaggtaaatagcagctgggaagacagaaaatgtagttaatgcctagcaataatggaaagaaaaacttaatggatataaggtcagcagcagaatggaggcgacaggagcgcgttcgtgaactcagagatggaccgataggaactgcccatctgcccattctgaacagcagagagaatacgatggaataaaatgagcaaagttcccgacaccgatgagacctgggaatncgatggaataaaaggaacaaagtcccngtgccngtggggccacaacacaagatccgcnttcnanttgtgggganttnngggggtccgagagcttagttggagcccaaaggcagcaggcagcgtcttc

SEQ ID NO: 496731 - DNA, 919 bp, Homo sapiens
tacgtgtctcccactgaaggcatccgtggttgtttttaatgccacaaaaaagccaacccaagatcaactgacacccaccctgtcaagtgtccatgatgctgggccctgagggcggtgaaggctttgtgggtcaagctccgtggcctgccctggtcctgctctgttgaggccgtgcagaacttcctctctgacttgcacgtattcatgatggggccgcaggtgtccatttcatctacactagacgatgggccggcagagtggtgccggctttgttgagccttggcctcgcgcacgcatgctgctcaattggccctgacacactgcaccgggaaatgctgtgggaacaccgtgttacccttggagggtgttcacgtgtccccacagaagccgagtaatggcttgggtgtgcacgccagtggttcccaccagtgccgacagtgcccaacgtactggcttcggtgcggcttcgcaggacctccccatttgtggcttgctcaacggaacgcacactgtgttcagtccttctcaggtcgcccacttgttggcacaaccgggcatctcattgcctgtggtacccccgacggcgagtatccggggaacgccgtcgtgccggttgcctcgcaggagtagctgaaaaggtctagtcgccactccacggagagcctaggccccggacattggcgtggcttagagcgccggggggaggtaggcatactcgaatcccctctgagtcttgtccttcgcgtcaggcctatgccggcggcaatgcggggccttgtctgactcgcgcctgctacttggctgtgcccccagccggccgtgtctggcccgtgtcgtcgccgtcgcactgtgctggtgccgggtcgcgtccgcccgggtggggcccctccctcgggggctctctctccttcggtggggc

SEQ ID NO: 496732 - DNA, 139 bp, Homo sapiens
gcacgaggttactttattcatcctcctactcctactactactcttcttactcctactcttcttcatcttactcttacacctttttccgggcaactttagcaggaccctgtgcaccatcaaactttcctttggacttata

SEQ ID NO: 496733 - DNA, 129 bp, Homo sapiens
taggccattggccccgggggggggttaagggccagccaccattcccacacttccccactaataacatttgggattacggttccttttaggccctataaataaaacaaggccagatatttaacattggca

SEQ ID NO: 496734 - DNA, 392 bp, Homo sapiens
tgtaaaactatggatggtctgataaggcttttactgacccccctgacttcagagttatactctgtttgctacctcataaagctggttttgccgcccttttgtttttttatatatttataaaaaaagaaaaagttggtgattgccttgggaaattccccgggtattactggacctatgtggtgtattgtttaaccagtggtccctgtgaaactgttgctcttgatgttcctgatacaggtaaggaaaccgttggtcccctctgatcccaagtatatataccgttccgtattgtctctgttccttttgtttttatttcattgccaaaatccaacccgccttcccccttgggtaaataaatgattttgctgaataaagtaaagtctttaattcca

SEQ ID NO: 496735 - DNA, 725 bp, Homo sapiens
  misc_feature (725)..(725): n is a, c, g, or t
cggacgcctgaagatatggccactcagcctatgtctcgggtggattgcctaggaaagcaagtgatatggccatggatagttctcatgtaattagtttggctcacgcactagtacacgagtgacccgttgtagcacgtgggttcccgtcggaagccctcctcaacgagtagcgtggtgtgagagacataatgtcagtagagttaggaaaagctttataaccgggtgtgtcatatgcgttgctatttgaaagcgtagtagtgttggttttagtcctttctgcacacatgcactagtttgtgaactcatcatattttccaacacaagtgaagagagagatacatagaaacaagagctagaacacaccacaaaagaacatagaagacaaacaagagcaataagacaatcacatagaaagaaacaacaagacaaaacgaataagaacgagggcgaggtcggcaaggctagcactggccccaggggcgtcgactctgagtgtgggagccgacacagttccgttccaaggggaccctgggcaccacgagcgaagcaggctggcagtgacgtaagcggagggagcaacccgtgggaggttacccggagtacaccctgtcacgaggacgaaccataacatattggacgcaaccccgtggaagccttggatgccctaccatagccagcgccttgactcgactggggcttgccgaaccgacggagcacgggataan

SEQ ID NO: 496736 - DNA, 462 bp, Homo sapiens
gaggatccctggcaggtggaaatcaggataacagcaattgttcagggaataagagataccttaaactctgactgccagtgagccaagcggaacagagccatatttctcttctttcaaaagcaaatgggagaaatatcgctgaattttctcagcaaggaacatccctgggaaacagaatacaagcctgggggaataggcctatagacagcccccctgggtgtggccgtctcctatggtctgtaggctgtaggggtgaaatagaccccagtctcccatagttctcccaggcttattaggaagaggaaattcccacctaataaattttggtcagaccggttgctctcaaaaccctgtctcctgataagatgttatcaatgacaatggtgcccaaaacttcattagcaatgttaatttcgcaccggtcctgcggtcctgatttccaccttgccagggtaccgagct

SEQ ID NO: 496737 - DNA, 1219 bp, Homo sapiens
ggtggcatactgacctttgctccggcctcgctcgtgaagacacagcgcactctccccgctgtaggcttcctcccacagaacccgctttcgggcctcagcagcgctctggctgagcactgctgttgccgctgctgctgctgctacccatgtgctgggccgctggcaggctcaagcaggccccggggcgctctccctcaccaactcatcacttctacgcactgagctccaagccttctcacctgccctggacggtctcgcgccaccatcccatttgatcaggtcaacgactgactacttgcgactgcaaaagatggctctgaccgagccagcgcacggctgcctgctcctaactggcagcttccactgcaccaacactggctactaagcccctgctatatcccctccaaccgggtcaacgatgcgctgttccgtgactgcctgcgcactgcgaacagcacgagctacacacacgcggcgctcactctgtgcagaacaccatgcaagcagaagggccgtaccggcagcagcagagtccctgcccccagactggcccgaccgctcacccgccgaacgcggctcccgctctgaccgcaagatcccttatcgacggactgccaaccaaggcaccggccacgcgcgcacgcacccaacccaccctcactccgacacttacaccgctggcgaccaccaccgctctccctgcgcacagcacccacgtgcgcacgactgccgccgcacccgccgcacacgcaagcaagcctggagcaagccccacaagcacaccgcccccacacccacccccccccaccccgccgccacacagcccccgcctgctgccaccggccccaccacaaaccaagaaaccccgcgacgccccactccgcacctacgaccccgcaccgcacccacggcacgcacaccggccctcaacacccgacacgcacaccaaccccgctcaacgcgccacccgactgcccgcatcgccaccacaccgactcacagcgggacaaggcaggcacgccacgacactcgaccaccacaaccataaccccccctctgccccccgcgcgctcgcgacagcctccggcccagcaccgccgaggccacgaccgaccattacacccacgaacacctagtgcgcacagcaaccaccgacgccgctccccacacaaaccacccacaccagcccatcatccccgcccccccccgtcacacaccc

SEQ ID NO: 496738 - DNA, 785 bp, Homo sapiens
  misc_feature (541)..(541): n is a, c, g, or t
  misc_feature (543)..(543): n is a, c, g, or t
  misc_feature (646)..(646): n is a, c, g, or t
  misc_feature (767)..(770): n is a, c, g, or t
  misc_feature (772)..(772): n is a, c, g, or t
gtgacatcctgtagtccttcctgcacatatgctagttgagttcatgctagtccagatggtcgttgactaggactcactgagactcatgtctcgagacacgttaagactgacagagtgtctagcccgagtgcatagaactcttcacactccactatactatgcagtgaatatccatcaaggaaccactcccttacaaggtatgcaatcaagtccccataggcacgcgctcaccttccctccgaggctagccactggtgaactactcccaacaatgcatgtgctccatcatctgggttccgagcaggcgtccagcgaaaagtctttcatgactattccgtcttgtcgttggacaattttgaattctattcagattactgcgacagtaacattactagactttttacaaaagaaacaaacattgtctgtacaggtttcatgctagagctaatgggagatgtggccacactgacttccattttaagctttctaccttcttttcctccgaccgtccccttccctcacatgccatccagtgagaagncntgctcctcagtcttgtaaatgtatcttgagaggtaggagcagagccactatctccattgaagctgaaatggtagacctgtaattgtgggaaaactataaactntcttgttacagccccgccaccccttgctgtgtgtatatatataatactttgtccttcatatgtgaaagatccagtgttggaattctttggtgtaaataaacgtttggttttatttatcaannnnanatttaagttcccg

SEQ ID NO: 496739 - DNA, 866 bp, Homo sapiens
  misc_feature (622)..(622): n is a, c, g, or t
  misc_feature (624)..(624): n is a, c, g, or t
  misc_feature (727)..(727): n is a, c, g, or t
  misc_feature (848)..(851): n is a, c, g, or t
  misc_feature (853)..(853): n is a, c, g, or t
gtgacatcctgtagtccttcctgcacatatgctagttgagttcatgctagtccagatggtcgttgactaggactcactgagactcatgtctcgagacacgttaagactgacagagtgtctagcccgagtgcatagaactcttcacactccactatactatgcagtgaatatccatcaaggaaccactcccttacaaggtatgcaatcaagtccccataggcacgcgctcaccttccctccgaggctagccactggtgaactactcccaacaatgcatgtgctccatcatctgggttccgagcaggcgtccagcgaaaagtctttcatgactattccgtcttgtcgttggacaattttgaattctattcagattactgcgacagtaacattactagactttttacaaaagaaacaaacattgtctgtacaggtttcatgctagagctaatgggagatgtggccacactgacttccattttaagctttctaccttcttttcctccgaccgtccccttccctcacatgccatccagtggactgcttgctggtcgcttacatcactttactccataagcgcttcagtggggttatcctagtggctcttgtggaagtgtgtagaagncntgctcctcagtcttgtaaatgtatcttgagaggtaggagcagagccactatctccattgaagctgaaatggtagacctgtaattgtgggaaaactataaactntcttgttacagccccgccaccccttgctgtgtgtatatatataatactttgtccttcatatgtgaaagatccagtgttggaattctttggtgtaaataaacgtttggttttatttatcaannnnanatttaagttcccg

SEQ ID NO: 496740 - DNA, 909 bp, Homo sapiens
gtgcgccctgagtcactgcctggcagttccggcgcgtgtccccatatagtcgccgatattgggagttctacaacatgcagacaggacaaaaagaaagtgtgaatggatcaagatggatgatgtgaagaagtagaagaagaggaactggtgaagaaacaaaactcaaagcacgtcagtaccgtgtcagatgatgcaaagatcctcagattctttgcacgcccttcaagaaagatgtgatggtcttgttagaaacaccaacgaggataccatgtgaagagcctgcctagggtagttaaaagaaggaggtgagtgcttctaaaaaacctgcgaagttaaaagtgtgcacagatagaagccaaattctatgaggcaagtcacggatcttgaggggaagtatgcgtgtctctaatcagcctctattgtgatacgcgatgtggaaattattagtgcattttatgaacctacggaagaagcatgtgagtggcaacccagatgaagaagatgcagatcggggaaggaatcgaacgaaaggcagattgaagttgacaccaggtgaagaaagagaagaccccaagggaattccgtgaatgtgataactgtttataagaattgtgacttggtcaagtgatttggttcaggacaggaatgaacctattgtggaggcagtgaaagatataaaggggaggttctcagatggtggcagcatagaggtttgccttagcaattccatttgaaccatgaatcttcaaatgagggtgcgagagacaacaggaggggagacaagtgagttgtccttttttcggggacaaaatatgtgtgaggggcaatatggaaagaaatcatgactataacaaacaacggggcgggaagagagccctactcgcgtcagtggggagagagagggactca

SEQ ID NO: 496741 - DNA, 720 bp, Homo sapiens
  misc_feature (466)..(466): n is a, c, g, or t
  misc_feature (633)..(633): n is a, c, g, or t
  misc_feature (659)..(659): n is a, c, g, or t
  misc_feature (670)..(670): n is a, c, g, or t
cgcctctcctgcttgtgtaacagagggggagacctcttccgcctatgaggagccaccggttccgcttgcgctttttggtggttgtttcttgttcggccgtcgtctttgtgttaggttgcgccctctctccgtttgagggtgtctctggcgagggggcccctgtttttgaggtttcgcgtattttcgggtcgcgcatttttgtcttcctcactggggcctcgtgtgattgtttacacgccagccctgggacatggtctgcacgtcctgttgtcgatcaggggcttcaaactgaagtgtagcagagttaattccgagtgtgttccacgcctcgttgtgttatggttgtggtagtggtatgcagggcccggccttcgggtgtaaggaattatgccaggctccgtggtgagtgtcccgctgcttattctcgcggggtacggacacgtctttggtcttagggaacgctgtncctcggccatcgcaagtgtcgtcgtgtgcgttcctagacgtcctttgccttgtctgtacagtgcggtcgcgtatgcacagcgtctagttgtcggtccccttgaattgtcatatagagacgatatagagtagattagagagaagagagcacagatcatagagagtgancgatagacacaacgccaagaatagantagaaacagangaaacacaaacacagagtaacaaagacaaaacagataagaagaaaagaat

SEQ ID NO: 496742 - DNA, 512 bp, Homo sapiens
  misc_feature (463)..(463): n is a, c, g, or t
  misc_feature (471)..(471): n is a, c, g, or t
cacatttcattgtgaaaaccttctaattcataccttcaattatttaaaagcctttaaaagacctatgtaacaaacctgtatgttctgcacatgtatcccagaacttaaagtaaaatttaagaaattaaaattaaattttaaaaaacacttcaaggttaaaaaatatatatgagctcctgttactgttaatgtatattgggtttaatattcttttatacagaattatgatgctttctgttttgcgtaacaccaaaacaccagtgaaattctggttgctaaaaaattatctctcaccgacatttaaagaagtaattcctcacatggctaaagagtatggattccgatatgaactagttcaatataggtggccccgttggcttcgtcaacagactgaaagacagaggattatttggggttacaaaattcttttccttgatgttcttttcccactagcagtggacanaatcattnttgttgatgctgaccagattgtgagacatgatctaaaagaa

SEQ ID NO: 496743 - DNA, 555 bp, Homo sapiens
  misc_feature (10)..(10): n is a, c, g, or t
  misc_feature (34)..(34): n is a, c, g, or t
  misc_feature (46)..(46): n is a, c, g, or t
aaacctttcnttagtcccctcgggtattcatgancatttcaatggntttttagtcatattacccaatgattatttttttctcatcttaaaaggggtattttcaattaaaagcaaacccaggtgcttggatactgaggttacaccaaggaaaatctgaagatatttatcaaatagttgggtgagttatgcaggctgcttttaaatttttacacataaatacgtttttagtgtaatacaaccaagagaatcaaaacaacaattaaaatgttaagattggcctggcgcagtggctcaagcctataatcccaacactttggtaggccgaggcaggcagatcacaaggccaggagttcaagacctgcctggccaacatggcaaaaccccatctgtactaaaaatacaaaaatttgccagacatggtggcgcacacctgtaacttcagctattcaggagactgaggcccaagaattgcttgaatcttcgggaggcggaggttgcagtgagcagactgcaccactgcactccagcccaggacagagagcaagactctgtctc

SEQ ID NO: 496744 - DNA, 541 bp, Homo sapiens
  misc_feature (124)..(124): n is a, c, g, or t
  misc_feature (130)..(130): n is a, c, g, or t
  misc_feature (136)..(136): n is a, c, g, or t
  misc_feature (160)..(160): n is a, c, g, or t
  misc_feature (181)..(181): n is a, c, g, or t
  misc_feature (267)..(267): n is a, c, g, or t
  misc_feature (294)..(294): n is a, c, g, or t
  misc_feature (312)..(312): n is a, c, g, or t
  misc_feature (335)..(335): n is a, c, g, or t
  misc_feature (478)..(478): n is a, c, g, or t
  misc_feature (480)..(480): n is a, c, g, or t
  misc_feature (512)..(512): n is a, c, g, or t
  misc_feature (514)..(514): n is a, c, g, or t
  misc_feature (519)..(519): n is a, c, g, or t
  misc_feature (524)..(524): n is a, c, g, or t
ccagtgttagctcacccggcctcatcatagcgccccactgtgtgctaacatggcctcatcatagtgtcccaacgtgcgatcacctggcctcaccatagagtcccagtgtgcactcacctagccncatcanagtgcncagtgtcactcactagctcatcanagtgtcccattgtgtgctcanctagcctcatcacagtgccccagtcggcgctcacctagcctcatcatagtgccccattgttcgctcacctagcctcatcatagtgncccagtgggcactcacctggcctcatnatagtgtcccagtgtgcnctcaccgtgcctcatcatagtgncccagtgtgcgctcacctagcctcatcatagtgtcccagtgtgcgctcacccggcctcatcatagtgtcccagtgtgcactcacctagcctcatcatagtgccccagtgtccgctcacctagcctcatcatagtgccccagtntncactcacctagcctcatcatagtgtcccagtntncactnacctngcctcatcatagtgtcc

SEQ ID NO: 496745 - DNA, 890 bp, Homo sapiens
  misc_feature (841)..(841): n is a, c, g, or t
  misc_feature (849)..(849): n is a, c, g, or t
gcacaggaaatattacttccagaagggtggttgggtgaaacagtgcacagcaactgtgaccttgataatattcacttaaaggatactgagaaaactgttacagcagaatatgaactagaatacttactactggaaggacaatgctttgataaaagtgacagaacagcctcctcggggtctgcagttcacactaggcacaaaaaataaacctgctgtggttgatacaatagtgatggcacatcatgggtattttcaattaaaagcaaacccaggtgcttggatactgaggttacaccaaggaaaatctgaagatatttatcaaatagttgggcatgaaggaactgactctcaagcagacctagaagatatcattgttgtattaaacagcttcaaaagcaagatactcaaagtaaaagtgaaaaaagaaacagacaaaattaaggaagatatccttaccgatgaagatgaaaaaacaaaaggactgtgggattccattaaaagtttcacagtaagcttgcataaagaaaacaaaaaggaaaaagatgtcctaaacattttttcagttgcttctggtcatttatatgaacgttttatacagaattatgatgctttctgttttgcgtaacaccaaaacaccagtgaaattctggttgctaaaaaattatctctcaccgacatttaaagaagtaattcctcacatggctaaagagtatggattccgatatgaactagttcaatataggtggccccgttggcttcgtcaacagactgaaagacagaggattatttggggttacaaaattcttttccttgatgttcttttcccactagcagtggacanaatcattnttgttgatgctgaccagattgtgagacatgatctaaaagaa

SEQ ID NO: 496746 - DNA, 993 bp, Homo sapiens
ggtggaggcgcctgaacacactgcagcattacaaggtcccagtatggagcgaactgtggccctcgtcccctgcctcaccaagcatgtgctccgggaaaaccaggattatgtccctggagagcggaccccgaatgctggaggatgtagatgaggggggcatccggtccctggcacctggtgaagccaaagtgatgagccggagccgcccaggcctcggagtgggcagtgctttcgtgggccggggtagcgtgagcgcgtccgagaggtcctactccctgagcatctacctgacccgtcctgactgtccagtgaagggcatcctgcagagaggttcgtggatgacctgttccaggtgattctcagtaccagccgccccgtgccggtcgcgtgtgaagtacttctttgacctgtctggacttcgagcacggcccagaaacgtcatggccaatcgtcgcagaccaaggacaccagtccacattctaggaaagaccaagaagcttgccatctgagggttctggagactcaagtagtaagtaataaaaccccgcaggtggtgttccgatggtacaaaccattcttggataacattgaatgctgtgcgccttgtcattgcaacatgaccttccatggactgcctgcatccctggcctgaccacaagctggggcgggagtccccgatcaggcgaattttctgtttgcacgggatcattccccggtacaagcggatggtggaaaggtactgatgcatgacatcagacatgaactgtcccatgccagcgatcactgagatgaactctgttctggtgaaatgtgctggaactagctccggagaactcgggggggagtggcctgtatgaactctacaagtaatcaagtagttctttgaccacgattgtcctgcccggggaggatggccggcaaaaaatgggtgggcatcggtcacagatgggcggtgggaacagggccatcttgacccgagccgctgcgtgttcc

SEQ ID NO: 496747 - DNA, 415 bp, Homo sapiens
  misc_feature (68)..(68): n is a, c, g, or t
agtgaaaaatggtttaaatgcaaagggcctttttgagcaggtagagtcacgatccgggcagggggggnaagctcccctttgttgggggcagggtggggaaaaggggcagggacctcggaaaaggggtgaagtggcgcgctggttccccggggcactggcaattagaaggattatttaaactaagaaaggtcctgggtggtttaagtgaataaggaaactgaaaaggtgacgtgcacaactgcctattactcccaggagtggaggataatttcatatttcatggaaataaactcagggcccggagcggtggctcacacctgtaatcccagcactttgagaggccaaggagggaggatcgcttaagcccaggaattcgaaatcagcctaggcaacatagtaagacctcatctctgct

SEQ ID NO: 496748 - DNA, 707 bp, Homo sapiens
gcacaggaaatattacttccagaagggtggttgggtgaaacagtgcacagcaactgtgaccttgataatattcacttaaaggatactgagaaaactgttacagcagaatatgaactagaatacttactactggaaggacaatgctttgataaaagtgacagaacagcctcctcggggtctgcagttcacactaggcacaaaaaataaacctgctgtggttgatacaatagtgatggcacatcatgggtattttcaattaaaagcaaacccaggtgcttggatactgaggttacaccaaggaaaatctgaagatatttatcaaatagttgggcatgaaggaactgactctcaagcagacctagaagatatcattgttgtattaaacagcttcaaaagcaagatactcaaagtaaaagtgaaaaaagaaacagacaaaattaaggaagatatccttaccgatgaagatgaaaaaacaaaaggactgtgggattccattaaaaggtaattactaatgaatattttaatacatcactagattgatccagaagtctagtatgtggaagttccacaggtagtgaaaatttaagtaaggcaaaggtcctctaatctaggagggataagataaatacataaatgttactactgtgtacaagataggaaactagagctataagacagatgaaaataaaatactatcaaccagtgaa

SEQ ID NO: 496749 - DNA, 659 bp, Homo sapiens
tgatgctctcgcacgatgtctggatgctcatggtgtgctgtcgtgtgttgcttgtggctgctgtgccctgagtggcgacgtgcggctgtgtagctgctggtggtgtggctgctgctgcggtgtgtgatggatgatgtgagctgtgcctggcccgcctggcccaggagcttttttacctgtatggaattggggagcatactgcagtcatttaccacatgccagctttgtgactacaattaagtatcttttacaaaagtgactggctaccactcccccgcacaggactcaacagatgttgacttctcatccccgagttctttcatggccaaaaagcaaatggatatccacctgacaaatcttcggtgatccaagaagcagaaacaatatcagctggattctggaaggagaagcctcaacaacacaacttcacccaccagactcctggcttgcagctcttgaatgatgccacatgctgtggaacatatactttgcactggactttagcagcaatggcaaatacctggctaccttgttgcatgatgatctcaccatccagcatctggagcaccaaggacttcctagcatgctgatgatcacctgcatgcatgatagccaactgtggagctggacaacgccaccctggtgcgcttcatccctgg

SEQ ID NO: 496750 - DNA, 101 bp, Homo sapiens
ctatcgattggcgggcacttatttgaattccagtatagctcagtaaacatcaagtcactaccttcaaccccacgccgaagtttctttctttatttcttttt

SEQ ID NO: 496751 - DNA, 211 bp, Homo sapiens
tacaggatccctttacaggctgatgccaacacaccaggctaatttttgtatttggtagggacagagtttcgccatgttggccaggctgatctcgaactcctgacctcacgtgatccgcccgcctcggcctcccaaagagctgggattacaggtgtgggccaccgtgcccggccaagtgatttactttgtcattgcaaagctgtacttcttt

SEQ ID NO: 496752 - DNA, 108 bp, Homo sapiens
ctgtaagcacctccttgggcctgggagctccatggggagtaagacttgtagtctcccaccatctctgcaacacccactgcatggtacactagtagctggcagctttgt

SEQ ID NO: 496753 - DNA, 210 bp, Homo sapiens
agttcagggaccagcctggccaaagtgatgaaaaccccggctctactaaaagtataaaaaaattagttgggcatggtggcgcatgtctgtattcccagctactcaggagactgaggtaggatcgcttgaacctaggaggtggaggttgcagagagtcgagatgggaccactgcactccagcttgggtgacagggagaccccatttcagga

SEQ ID NO: 496754 - DNA, 233 bp, Homo sapiens
ttttgcccccccgggggggttttgggcccgcccccccccaaattaggtgccgcccccccaaaaggggtttggccggcccccaggaaacagggccccgccttccggggccccaattccggccagcccctcccccctttgggtcccgcccctttacccccggctttgctggccctggggaggaccaaattggtcccgcccgccccttattccattaaaccgttttggggggtgga

SEQ ID NO: 496755 - DNA, 316 bp, Homo sapiens
ccaggtgatttccaggaccttcagcaggaaagcaggctctaagagcagatcttctcattgatgggcccaggcaaacagcagtggctactcattgtctgtcttgctgctttttttcctcttgtggcccagtcatctagcttttcccttcttcagagatcttagtcactcttcttttccgtagtctcctttgttgataagaaacagaggtagtgctcaattcatgatagttcattgagtgaccaactgaatgaatgaaggaagaaatagccttccaaggtgtctcctgttcatactactcttactgtgtatctacact

SEQ ID NO: 496756 - DNA, 510 bp, Homo sapiens
  misc_feature (1)..(1): n is a, c, g, or t
  misc_feature (380)..(380): n is a, c, g, or t
ntaggcccaggagactcagcacagccacgtgcaggaagatttatggactgaaaaaggaaagtgacatacagaaaacgaaagtgaggtacagaaatagccgaatggttacagcttggcatctgccttattttaacacagtttgaacagttggccacctttgaccacaactcagtaactggctcaagagtaggctagagtctaactccctttaggttatagttcaccatgtacagagaaacctggaggctgaacttaaagtatgtaaggaggcagctttaggctaaacttgatttaacattgctaaaatttagaagacataaatttaaaaactgaagtagagggctaggcgcggtggctcacacctgtaatcccagcatttngggaggccaaggcgggcagatcacgaggtcaggagttcgagaccagcctggccattatggtgaaacccaatctctactaaaaatacaaaaattagctggatgtggtggtgcatgcctatagtcccagcta

SEQ ID NO: 496757 - DNA, 1502 bp, Homo sapiens
cggacgcgtgggtcgacccacgcgatcgccttcccaagcccccttccttcatcctatgggggtctcaggctgcccccatcatgggggatctgggacccggcccaacccatacctgaccacatcccccagaccaccgtggcatgcatattttgaagactgcactggacccacaggggcccatgaacactgacactctactcacatctccacctcaaccctccatgaccccatgagcacacatgaaaggagtcagagcaggcggagaacgaaacgaggccatcagtgcatgacatccacagagactagcatgaggacctgcggcatcgagaaaaagctcccattgaacagatggaacaacggaaataacaacggaaacccacagggagacagagaacaacaaaaccacccaaaatccaaaagccaagggggcataccccaccgacaagacaaccccatagagcatagacatcaccagaagacccaatgcgaacaccggaccagacgagaaaaccatagcaacaaaaacgcaatagaccgcacggtacacccggatcacaaaagacaccatgggcaccctacagtgacccccttggcaacaatccacgagggaacaacagcaaatggggaccagcccacgcagaccatgtggggaccccactacgggactgaccacggcgcgggggaccacgccacgaagcggggggagatcccccgaaacgccaacacccaaagggaccataagaccatacccgtgagataggacgtaagcaccagcacaacaagggagaagccacccagagagaaaagaggggaaacacacaactaggaagcgcaccccctagcactggaaggcaaagctagcgaagaacgaccacgaccagatggagcacacatagagacagcgcagccaagcagcataagagaccacccaacgggcccccacgagtacgcaagtgagccagtgagagcccaaccctgagaaagaggccaacaaatgaactagagagaaaagcacagagagaaagccaagcagacacgcagcacgacgacaagcatacaaagcggaggaccgagcaacagcggccacacaaaaacacaaagaaagacgcgcccgaagacacaccggtggatagcaccgccgccagcggcaaagccacagcgacgcaaggggagcgagcacccaatcgccgagccgtgcagaccacacacagtgggatcagcggtcagaaacccacggggggatcacacaataggtaggacgtagaagcaagtagatgcagcacacgagcaagcgagccgcagacacacacaacacaacgagggcccgagaggcggaaccaggaatatcagtcggaaagtcggaggttcgacgaagcacgccacacccgggggctgggccacctagcagcacgcaccccacgagagatgcggcacgccgagcactcacaagccaacagactggcccgagagcagcagaacagcgaagtacgagcagagcacaa

SEQ ID NO: 496758 - DNA, 320 bp, Homo sapiens
agcacgctggagtcaggagcattgcaggcggaactagaggagaatttaatccatgatatgcatgtgtgtggtggagggtgccggcgaggtgctaaaggtcaccatttccctgatacctcaagttcattcagaggcaggaatgagacagctgtcactgaccacacttcccctccccctatctgcagtcctcagcgtcgccaaatagtctgacatgcgcatgacagacccccacagtgcagaagctgctagaaacctcaagccttggagcccaaccccttttttgacagatgctatgagtggagacatgacttatcaagatc

SEQ ID NO: 496759 - DNA, 862 bp, Homo sapiens
  misc_feature (647)..(647): n is a, c, g, or t
gaatgcggctctccaaacaacgggggggattctcccccgggttaccccaggacgccaagctccctgggcgccgtggtgatcccccccccgggtttggtgcggccggccaccaactcgcaacgtgctccttccttgtgggaccccccgcttgtgcgcgggacccccccacgtggttcgacgagccgagtcccatgccaaaggtgtgcaccaccaactggcagtctccataaaacgggcccttaactttcccgtgtttccccaccagcgtttgacacatccccgtgttcttcctcccgcgccgtcgttcccgggtcccggatatcagggcccacaaagaggtaggcattatccatcttctgtgtgtgcggtgcgtcgcccccgtacgacaatacatagagacattcttcttgtccagcaccaccacacgtcaccagaacccctccagtatatgtggtgacgccgtacatagtcgtatgcaaggacagcatctcctccttttgccgacgcctcctaagtacagaaaatacgtgaggtcttctcggccagaattgcaaggactaagcaccccccgcaaggaaatcaataacaatttctcttccacccacgatctccctccttctcgagacacacattgtgtgcaaaccgcnaacgcagcggcgcacccacgtcgtcgtgacccccccctcacatcctcctcgtgaaaccaccatgagtggttcctccaggtgataatccccgctcggttgcgggtaccgtcttcaaagccccaggggtcgtgttatcacagacgaaccactttcatcgtcttcgagaccaagcccccccggtaaaaaggggaaacacccaaaaacccaacaaaaca

SEQ ID NO: 496760 - DNA, 138 bp, Homo sapiens
agcgacctacggtcgggtagctgggactgtaggttgtgcacatgctggtaattttttatttttagtaaagatgaggtctccctgcattgcccaggctggtctgaaactcctgaacgcaagcaatcctcctgcctcagc

SEQ ID NO: 496761 - DNA, 227 bp, Homo sapiens
cgccgatgggttgaccacaacctcgtacatcagtcctgcttcggtcaaactttaaaaagggaaaaaatacatgcaaagaaggcagccggccggttctcctgtgcgcagagggctggctgcttctccccctccttagcttttactgagccgcccttcctgccgggggtcctgcctccagtggaggtttggccatttaattgctcagagcttatgaaatgcctcccgcc

SEQ ID NO: 496762 - DNA, 125 bp, Homo sapiens
tactgaacctatctatactacgtatctatcgacgcatctatacgctctatactgacttatctatactacctatctatactaccccctaattgtcggcgcggaggggggtagtatagactggtcag

SEQ ID NO: 496763 - DNA, 1295 bp, Homo sapiens
  misc_feature (233)..(233): n is a, c, g, or t
cactaattcgccaaaatgacgaacacgaagggaagggagagagaggctagccgactatattgttctctaccgccttctatacgtagacaaatcactgcgtacgcttagtgtccttctcgcgtgcacatagtaatggcgaaaatcctcatagagggaagacggtgcactattcgtgaggacagtcgacacgcgggcatactgtggctatcggtggtttgcaacaacacgaatgncccctagcaacgtcgcttgaccactggacgaaaagctgggatagtagatcatacaatggtgtagcccaagcagtgctggtaaggacattgtgcttggtacatagcaaaaccacaggtttacacgtggctaatgatttctttgctcaacgtatgaatctaattgttgccgttattgatgcagcagtttgaagagcagctttcctatgcgaagccggacgcatacgcctttcgcgtgagagagccagtgtggatagggaaatagtcgagtcaagaagataaggaaaggaacgtcgaaaacgagtaaatagggataccatggggtgcgagaacgtataaacgtctgccgacgcctcatgcgtccagcccacgaaaggagaaggcacaagtgatctgctcgagacagccgaatctgggatacggagccctgtagtcctgcttgtgatagcccctattcctcgtacctgaacttcagtggctattaacttacgggtgtcaccaaagggaccattgcatgacacgggcataggtttcgtaggggcttcatatgaaaagtagagagagcgagcgcaggcgggggaggaacctggcaaaggggcggcttccggggggaccagagaacaagcacagcaacgaagggccagggggcccggatggaacacgcgaaaggcccttcccccgacacagtgcggacggacggcggcttggtaccattccccagtttggttgaaaggttaaaaccccttttggtttgtgtggaaaaagtgggtccccccctgtagaggccatccgggagcggagcacccccctcccccggggaggagaccgtagagccctgatgagcaggggcttatttgaacggcccgggcggcgatagatcacacacaagaggcgcagaaccaagacctgtagttctattcatagacaacccaaatctttagtgagagacgagtagaaccaaacagcaggggcgcggatcactataatcacgcgtgatgaccctcgttgggagtcagtccatagtcaaagatgtactagtagaacaactaagcgagtagcgagcgt

SEQ ID NO: 496764 - DNA, 200 bp, Homo sapiens
gggaaactgttttaggtggtggaaccagggaagcagagagcagagcatgcagttatggaagaagcaggaaaagcaagaagaaaagacagcagcatcaagaggaggaggacatttttggatgtaagggattagaaggatagccgggctagggaagcagaaagcagagcacacactggctcaagcagcacacggtaagagga

SEQ ID NO: 496765 - DNA, 545 bp, Homo sapiens
agctgcatcagtgtccccagacgagaatacaagccaagggctgtgaaaaggagttctagtgagctcaatggagtttccaccactctgtagtgaagacgacaggttctaacatttcccattagaacaggccttgttgtcggtggtctctatgaactttgaggccaggaaaaccaaggaggaattacggatttaaacgaaggggacatcacttacgattaaccacatcaaatacgatgaaaactggctatgaacggaatgatacacggagcaatcggggattcttccccaattaatttacggtggaacgtgattcgtgcactttaccttcagtaaaatgtgttaccacagaactcttggacataactttctgtaacttgaaattgaattcacaaccagtgtggctctcagatgcgagtgtttcttgtgacatcctttgggtctctgaccaacttaatgactttcgtatgtgtgctctctttataatgtattttataccactttaatttggtttaatgaatttcttgtccgtgctacatgaaaatatg

SEQ ID NO: 496766 - DNA, 163 bp, Homo sapiens
tgatgggtgacactgattgtagccggcgacagtactgtgtcaaccaccctggacatcctatctactgtgtcaaccacacagtgctctgtgcagatggctatatcctcaatgcgcacaggaagtgcgtggcacatcaacgcgtgtgtgatggacgcgctgccat

SEQ ID NO: 496767 - DNA, 356 bp, Homo sapiens
agaacctaattacgcataggtaaaggtatcgtatcagtccctcaagctgctgcaggtttagttgatctagcagatgcaggtgctcaattcgttactggacaagatgttcaaggtggacgctttactaaagcattagaagacgcaggcgtacgctttaaagatactaaagatattatgtctggttggtttagtgaaggcactcaacgtcagctgcaaggaattagctgcattacctggaatgagtactcaaaagtctctcggtgggaaccttagttcactgggtcaaactgcaggctacgtataagataatccttcattagcgtcgtaattagggtttgaaaccctaattagggtta

SEQ ID NO: 496768 - DNA, 614 bp, Homo sapiens
gaactatggagtggtggagccggatgactctatgatgtgtacttgtctatgcttgaatacctaaatggagaactgttcctgggtgaccctccagagaagctgacattggaggaagcacgggcgtactgcagagagcggggtgcatagattgccacacgggcaactgtatgcagctgggatggtggcctggacactgcaatccatgatggctactgatggcagtgtgctgctaccccatcgtgacacccagccagtgcatgtggtgggggcttgcctggtgtcaagactctcttcctcttccccaaccagactggcttccccaataagcacagccgattcaacgtctactgcttccgagactcggccagcctactgtccatccctgaggcctccaaaccatgctccaaccagcctctgatggactagaggctatcgtcacagctgacagatgacctggaggaactgcagctgcctcaggaatgccacagagagtgactcccgtgggggccatctagatccatccccatcagtggaggacggatggaggtggaagctccatccagaagaccaagagaggtgccctaaggacgcttctagaattgaaccagaatccg

SEQ ID NO: 496769 - DNA, 683 bp, Homo sapiens
ccagtacgtcactatttattcttttttatttgagttcttaaatagtagcgtttaaatgggcagctgcccacgaggagaagtcaaagtctggtctgcccccggagcaggaggcttgggcttggagggcccatcccagcaaaacctaaccatccacctccttccattgaactgaggccaggaaagtgcggattaccatgggttaccagcgatgatgttggccgggtccagctaggtacgtgagttagggtggggttgtaggggcctcgtagatatggttcgtaccacttgaccctggatggtctgctctcgcgaagctggttggccaccagcgagtggatctccttggcagagcgggttgagtggttaaaagggtggaaaaacaggttcccttcaagtttcaaggtataaccgggggtcgcctcaggtcttacgtatccggtaattccttctcacatagcggacaacccgtgggtgcctccaacgcgcagcccagaccccattttcggggaccccagccgtggccagccgtgagccgaggtgacaccagagggacggcacaggatcccttgcgccagaccacgtgaaaaactggctgtgcgcgaaaggagccccgaagatgtgtagggcggaagccgccacccggggccagaaaccccgtgaggggccggaaccacctggtccgg

SEQ ID NO: 496770 - DNA, 268 bp, Homo sapiens
  misc_feature (2)..(2): n is a, c, g, or t
  misc_feature (5)..(5): n is a, c, g, or t
cncanacaatgaaacaatgcaaatatttgtgaataaatatatatgtgatatatacatacactggaatgggtattttgcttcaataaggaatgacaaatgttgatacatattacaacaacggataaatcttgaagatatgaccttagtgaaataatccagaaacataagcataaatattggatgacttcaataatatgagggactttgactagttaaatttatagataaagacagtagaaggttggtcactaggtgtgctaaagttatt

SEQ ID NO: 496771 - DNA, 224 bp, Homo sapiens
tcgatacttcctacaggagcacggcagattataccacgtgaggcattcctcagtgcacagcgcaattttgtgcaaacgtcgtgctgggtactgctcggtctgctacctgctgcaagtcaaggagagacgtgactgtaatatcccttgggggatggacagagaattgatcaatgtctgacattcatgccactatcagggcgaaatcagcaacatagtctcgtatg

SEQ ID NO: 496772 - DNA, 326 bp, Homo sapiens
acaggagtctttgctttgggacggcgggctgagcaacttaaactatttgaaatgctagtgagcgaagctcgccagccactgttgcggcatggtccagttcgtgaggctctgctcaccctgctggatgcctgtggcagccctgtgcccagtaagcccagcaactggatagaaggcttggtgctacttcctcagccagctgtgtgtttgtggtggcccaaggagccttcataggctcgaagttcttcgcagcagaccacctccttgagccttaggagccgctcccccggtcttctttctctatttctacgccgtccccaatgcacaag

SEQ ID NO: 496773 - DNA, 872 bp, Homo sapiens
tggtgcctgttgtgttgcggcacattagttgtgccgtgcaatcattgtggccgcccttatgagttgccccctcgacaatatgggcaaccaggtacagttctcggggattgccttgtactttacgcgcctatccgagtttcttgtccgtgaccactactagccggcctgttggtggcccgcatgacccgtggccccgcccatattggtgaccgatagcgtgtcttttaaaggccgccgtgcggggttccccctcgctcctcggtctaggtatccgctcgcccggcggtctgtccgcccggtcactggctcgcctcgcggtaagtttttgtgaacctgtgcttgtgcgcgtccatcagcactgacaacctatgtcttccgggccgttcttggcgtgccccagacactgttttcgtactggtgccagcccccgtggaacttccccctcccccgccgcttctcggtgccccggtgtaattaggttcctgcttctcggccaacaacacaatctttctcgacgacgttgtctgtacccaatgtcatggggggggtctctgtcgcctgattcattatcagcctgccgttcgcggcccaataccatcccctgctcttcactatagtcgcctgcaccccgcgacgaatgatgttcgcgccccgtgacgccctccctccgtgattgtgatgccctggcctcgggacccctccctggtggtttacccggatggtggccggggcaccccgcaaggacgcgcgcttggcccctcctcgggcaaaagatccaccggctgggatgctgtctccgccccaagtctgtgaggtccttaaactgcaccgtattcccccttgaacccaaaaccccatggccccaaaaaaac

SEQ ID NO: 496774 - DNA, 106 bp, Homo sapiens
agcagtgtgtatcttcatcttcctgcagtatggactcattggcaatgtagtcttgatgaatggagatacaacttcccttttgaaactccagcgatactccgccggt

SEQ ID NO: 496775 - DNA, 277 bp, Homo sapiens
tcttgacggttgaatgtttgctgcctctgggataagtaagtaggagagggtataagaaggacgctgacaccaggctttcctgtagatacttattcacagagccaggatgcttgagtactggtggtggtgtggaagggattgtccattgatcctccttgacctttgccataagagaggccttatttatgggctactggctttctctcatttgttatgtgtttattttattcttttcatgcagtgatcagaatataatgtccaaacattcaagccgtca

SEQ ID NO: 496776 - DNA, 322 bp, Homo sapiens
gcaatctcggctcactgcaacctccgcctcccagcttcaagggattctgcctcagcctcctgtggagctgggattacaggcgtgtgcaccatgcctggataatttttgcatttttagtagagatggggtttcactaagttggccaggctggtctcaaactcctgacctgaagtgatctgcccacctcggtgtccaaagtcctgggattacaggcgtacaaccccgcccttgctttctctaatactgagctcacccgtgctatctagtaggtgccctccagccacccaccgtttcttggggaacatcatgtcgtgtgtggctt

SEQ ID NO: 496777 - DNA, 409 bp, Homo sapiens
  misc_feature (1)..(1): n is a, c, g, or t
  misc_feature (63)..(63): n is a, c, g, or t
  misc_feature (67)..(67): n is a, c, g, or t
  misc_feature (69)..(69): n is a, c, g, or t
  misc_feature (79)..(79): n is a, c, g, or t
  misc_feature (83)..(84): n is a, c, g, or t
  misc_feature (131)..(131): n is a, c, g, or t
  misc_feature (133)..(133): n is a, c, g, or t
  misc_feature (151)..(151): n is a, c, g, or t
  misc_feature (158)..(158): n is a, c, g, or t
  misc_feature (202)..(202): n is a, c, g, or t
  misc_feature (240)..(240): n is a, c, g, or t
  misc_feature (297)..(297): n is a, c, g, or t
  misc_feature (334)..(334): n is a, c, g, or t
  misc_feature (347)..(347): n is a, c, g, or t
  misc_feature (359)..(359): n is a, c, g, or t
  misc_feature (362)..(363): n is a, c, g, or t
  misc_feature (365)..(368): n is a, c, g, or t
  misc_feature (370)..(370): n is a, c, g, or t
  misc_feature (375)..(375): n is a, c, g, or t
  misc_feature (396)..(396): n is a, c, g, or t
  misc_feature (403)..(403): n is a, c, g, or t
  misc_feature (405)..(405): n is a, c, g, or t
nttgctgtagactggacaggcatgagttagattctctggggcttctgcagagactggtttggnaaantnggtgctaggnaaannatctgctccctgcaacctccccattttaatctttcagtattgaaaantngagaggaaccggattcantttgctngggacagaggcagtggggtgtggaggtgctcagagcagcctttnggaaggtgttggggaagctggattcccaatttttagcntccaggcctgggatggacctaggatgctgagaaagggcatacactgctgatttagtnacctgctagttaccagctcactgaggaaccagaagantgtacagttcttngtttgaaggcanttnntnnnngnggggngggagggatgggagctgaatnttttccngncccc

SEQ ID NO: 496778 - DNA, 135 bp, Homo sapiens
gagaaattttgagaagcatctaaaaaaatccacaattagtgcaaaaagaggggacaatactttaagttatttgagctatatgaagatcttaagtgtattgtaacgtagagaattgtcctacattgtctctcaacg

SEQ ID NO: 496779 - DNA, 173 bp, Homo sapiens
cttgggcaatcgtgactattctctacataaccacaaagacattggatcaccataccttattattctgcgcttgagactgtcagtcctaggcacagcatctatgcctccttattcgagccgatctgggccagccaggcgaccttctaggtaacgaccacatctacaacgttatc

SEQ ID NO: 496780 - DNA, 231 bp, Homo sapiens
cttagaggatccccctgcaaccagtaacctattcttcatagccgaatacacgaacattattataatatacatccctcaccactacaatctatcctaggaaccaacatatgacgcactctcccctgaactctacacaacatattttctcacctagaccctgcttctaacctccctgttcttatgaattcgatacagcatacccccgtattccgctgctaacgaataccgctg

SEQ ID NO: 496781 - DNA, 326 bp, Homo sapiens
cgttttgggggggggcttttaaggcccctgcccccggggttaggggccattaaattattttttcccggggcgggggaaagccgggaactagggattgctttgggaaaaaaccatgggggccttcccaaagattgttttttttggaggggggaaaaccccttttaattttgcgggccctcccccaaagagggggttgggggttttcccgggggggaaaaaagaggtttttccccacccgccagaggggggggaaagggtgaaaattcccaaacccgcccgggggggcctttttccttaaaaaaaattggaaggtttttaaattccca

SEQ ID NO: 496782 - DNA, 214 bp, Homo sapiens
ctctagaggatcttccccgactagccgacgggcagaaggagctgaagcttggccaggcgtgtagcgggcgcactacgggcacgctgggcggggcacgggctgtgtggagaagtgagcgcgctcgtttgacccccgtgcccgccaccccgagccactagcggcgatctcccaaggcctgcccgaggcctctgtcctctgtcgggctagtcggggg

SEQ ID NO: 496783 - DNA, 759 bp, Homo sapiens
  misc_feature (684)..(684): n is a, c, g, or t
agcgggttttaatttgtctcaggagaaataatgtctaacatagccacccagctttgaatatgaagtatatagaagcagctaaaataataagcttagataatttaattcattccagaacatttgctacataccagctattttgctctactctgcagatataaaaggcaaagaaggtatggcttctactctcaaattgcctaaagtctgtgttgaaaagcataattaactagcatcctagagtggaatttagtattaaggcaaagcctgtttatttaacaaatatttattcatcaagtgctttctgtgtgccaggcacatttctaaggctgtgggaatacagtgatgaactaaacagacaaaaccctcccctcttgtctaaaaggaaagatggacaatacatgagtaattaagcttagaaggcaagtggcttcgttttgctcactgctatatccccagcatctactgcagtgcctggcacatagtatgcactcaaatatttaggaatgtgaatcaaattaattagtacaatatttccatattttaaatggtcatggaggactgagaagggaatagttcattctggctacaagagctagaaaactccagcccaaccttgaacggtctataggaaattgaaaagtgatgtgagtaaacatagcaatgccagatagaagatagaaaatnctgcgcaaagtcatagaggtatgaaaagagcataagaattgggcaatacttggaaattcagtgtaggccaaagat

SEQ ID NO: 496784 - DNA, 826 bp, Homo sapiens
ggcagaaatggcggctgcggcggctcgagtggtgttgtcatccgcggcgcggcgtgcggctctggggtttcagcgagagtcttctaatccgaggcgctgcgggacggtcattatattgttggcagagaacagattaagaagtacacaggcatgcgtacccaagttgttctgaatgttcctgaaacaagagtaacatgttgtatgaacagtggactcagagtagcttcggaagactctgggctctcaacatgcacagttggactctggattgatgctgggaagctagatacgacacatgagaagaacaatggaagcagcacactttctggcagcatatggctttcaatgggcaccaaggaagagcatcccagtgtagatctggaagcgttgcagattgaaatatatgggtgctcatctcaatgcctatagcctccagtagagtcagtactgtatactatgccaaagcgattctctaagagacttgccacacgtagctgtgagaatattcgttgctgcagtatacatacaagaacgagcacacttgggcagaagcagagcattgacacgtgagcgtggacgtacatccttagagagtatagcagcgaaaggttggaaactcaaattgtacagatgcagagtatgtggctcgcgattgactctctccattgtccagccactgctttcacttcgaccaaattagctagacacgtttgcgcgaacggtgaccaaagttggagcggaagccaaacttggagtagcttattccaatattcttaggtacatctcctggacagtggacttccaggttggcctttcatgatacacc

SEQ ID NO: 496785 - DNA, 847 bp, Homo sapiens
  misc_feature (250)..(250): n is a, c, g, or t
ggtgacgaccccgggtttgagggacaacgaggcaagcctgggggtcccaaggacataagggagaagccaggagatcctggaacgagccgtaggagctcggatctgctagcgagtaccagggcagactgcagagggggagaacagaagcgagccgggagcggagaccgggcatccgagggcgacgcacagatgggtcaactgaggagtcataatcaaggagcgaagtcgctagggcatacgatcggaggangcgaacaggtagctgacacggggcgcatgatgcgggtacccaaggccctagccagggctgcacagggcctcgacccgggctttgacgggcatttcaacggaaccctccttgagccccaaggggcagaccccaggttggcctttggcactgcaacaggacgaaacaggcgcgacgcctgcgatgctggacgcgggcaggcgcggcgagacctagggaagctcggcgacgcactctggagcacgaggcgccagctcggcgagacgcctgtggccccaccggtagagacacaggagacggcgcggcgacgactgggacacccatggacctgcacggatgcccccgtgggagcgggcgtgcgccctgcgacgagagacggacccacggggagacccccaaggcactgctggtggaccaagcaggacgaccctgggtgaaggctgtgccggcacgggtgatcacgcgcaagagacaggccacgtaggctgtccctgggagatccgggcgatggctgggccttatcggacctaagggctaccgaggcgatgagggtaccccaggtccgagggggcagaaggagcccaggacctgcggacccct

SEQ ID NO: 496786 - DNA, 105 bp, Homo sapiens
gggacctagagagcgtggactttagtaaaagaattatgagtggttcaacatgcaggccctgagtccgccatgggatacgcgggagctaggtactaaatggcagtc

SEQ ID NO: 496787 - DNA, 807 bp, Homo sapiens
gccatatggtctcaaaggaatgaggtgtaggtggtggaaaagcattgtaggaggtcagatttgaatatagacaaggtgggttatcacgtgagaatgtattggaagaatgcctgtgaagccaggtgtgggttctactcagtgccatagatagatgagtcttctctcgtaggtcaccattacatagtaatttggattctgaatttcacattaaattatttgagtttatacagacctaaattttaaaatctgtacatatattattggatgtataagatgaatatggctgatttaaattttatttatgcacatacttaaaggacagaaatgtctgggaaagtaatctgtcaaaataatgatatgtacctttttaactttttaaataaataacaagattttaatgtgtgtctccctcagggttgtccaaagttttttttctccctcaagtataactagtggtacctatatgtcgtatcttctagcaccaactgtgtagagcaatggtgcaaataatgcttgaatacaagtggtaagccaaaacagaataatactttatagtagttaattaatcctgaaattcggaaagcttccccaatttgccctgtgcatcctaaaccaaactgttgcaggtcttctaccctatttattgtgggcccatgtgttatgaacggccctgcaccgtttcaaaggcgggcaccacacatatcacacgcccagtggcgcgtacagaaaccggtttgaatacttacccgcgggggccaaatacgcgtctgaaaatatcacgcgggcggcggcaactccaaacagcgg

SEQ ID NO: 496788 - DNA, 844 bp, Homo sapiens
agccccccactggtgcctatcggggcaaaaactggggccccgctgatagtgtcaccaacgggtgcccctggtgggggctttgtcccatccgcgcgcctttttcaatccgagagagtttcaatcaccccgtgaagaccctttttgtcgccactggcagaatacacaaatttgttgcagacacccgagataattggttgtttctccccgcaagcgtctttgccacctcgttctctctggtagacagatggtgcttctcgccctcactgtgcggggtatcacatgtcccctgtgatacacccctcgtgggggggccacgcgtttggcaccccgggctctcgagactttgtctgcttgtacctcacgacgttttctgtagggggtgcttgaatcttcatgatgactcggtcgctaatctaacatctaatcctttgtccaatacgggagacaccggggaaccccctgtgggatcacatgggggcgggaatttttcggacggatgccctgagggtgtcctcacagtgcagatcgccgctcaaccactccacggggggagagcgcacccaccctcgaacctcacgaagcgctcccacacccacgagagattcctgcttccgtggattgaaggcgcgggaagctggagggccacaccactccactcggcgagagtgggtaaaagggcattcccacggcgtgaggtcagcaagccacactcctgcgtggggggccccactcacactttgagacccaggactggtaggggtttcaaagctcctcatggattggggcttcactcagccactggcggcagagggaaggggctgaattaacacctggaagcctggca

SEQ ID NO: 496789 - DNA, 142 bp, Homo sapiens
caaccagagccaccaaaaaacgcacggagataacgtaagaggacgtcatcgtttagataatggcgcaaatccggccgtactacatttgtaggtcctgatgtatcgccgcgcttcacgtggcgggacgtgtgggatctgggga

SEQ ID NO: 496790 - DNA, 508 bp, Homo sapiens
tttcccggacagtttccgcctaaattccgggaaagtttgtaccccgaaattgttcctagggggtcccaccccaatggagggcctgggggacctgaaagcgttaaggggtgtttgggccatttcacctttggcctggaaagtacagacctttttttttttttaaaccaaaaaagccttgtaacttatggacctttacatcccggtaggtttcccgttacgggacagtttcccggacccctgggtcccaggtgggcaggtgatgcccccggggcctttgtagccccttccccttttttcctttccccgccctgggatagcatatgtttttgtaagtttttgcctaccgtaatttttaggaatttccgaagaaattctgcaagcttttccaaattgggctttaaatcttattccaactaataggattaatgggatatgttaatagaaacgtgtttattttttttggaacatttccgtttggggttttttaataaaggatttttaaactcca

SEQ ID NO: 496791 - DNA, 534 bp, Homo sapiens
gcaagccctgcgtaaggcctcaggttgtgaccttcggctgttttgccctgattcaagaaggctgactcgccttacgtatggctgttccaagggtggcatgttcattcctaaagactcactgtgctgaaggagatatttccttttgcttaactttgtaagtgtgaaaaactttgaaggacttttcagggaatagaaatcaatcatcattaatccttctcatatgacaaactgtttcattttttataacagcttctgttcattgtcaaaatacgttcatattttacacagtgtacatataatatttgtatgctgctttttattcagcataatgttacatacattttattattttgtattattatgtattattactacaaagtctttatagctatcattgtatgtaacgacacaattagatcttccaaaatacttcttttttttgagactgtctgcctctgttgcctaggctggagtgcagtggcacaatctcagctcactgcactactccagcctgggctatcagatggagactct

SEQ ID NO: 496792 - DNA, 136 bp, Homo sapiens
cctctgagatgcaaagtgtccaatgaataactgtctatgggactcattgcgaaaggaatggagcggcactgggatgcttgtagagcatcatgccctgtaaatcactaagcaactctatgggcatgcactactcgca

SEQ ID NO: 496793 - DNA, 719 bp, Homo sapiens
aatcatggtaaagctctaaatagtaacacgaaacactgaagattgagaatagtgaaaaaaaaaaaggcaaagaaataaatatcaccaaagaaaaaagatataattgtagctaaaatataaaactaaatcaccagttaattaaactatacagatctaatacaaaccaaaaccagcctgaaagacccaaccttaaaaaatgctaaaaaataaggcataaatctgcataatatagagtttaatttccattctctcttttccctctactatgtatgcttaacctgatctgcctctagggacttacaagaaaacggcttccggtatcccgtttcaatttgacctcaaatgtcctgagcaaagtttttgatatcctgctgagggatcaaagagtaggtaagctttagacatcattatttctactaattcagtagttatgatcgtagcgccaaattaaaattcttccactggttcttctggaaggaattaaaactttaacagtgccttggctgcacagtataatgtttttaaaaaagaaacccaagcaaatctattgctaaacgaggttcttattatttaacaaaaagaattattttgacaatttaaaccttgggagaacagtcatagaatcatttcttacgtgagaataaactaaaactgtctgagcctggttattctctcccaggtaaaaagccttagaagcttgtgtgcggaaatttggtttc

SEQ ID NO: 496794 - DNA, 860 bp, Homo sapiens
  misc_feature (5)..(5): n is a, c, g, or t
  misc_feature (100)..(100): n is a, c, g, or t
  misc_feature (187)..(187): n is a, c, g, or t
  misc_feature (196)..(196): n is a, c, g, or t
  misc_feature (209)..(209): n is a, c, g, or t
  misc_feature (216)..(216): n is a, c, g, or t
  misc_feature (257)..(257): n is a, c, g, or t
  misc_feature (263)..(263): n is a, c, g, or t
  misc_feature (269)..(269): n is a, c, g, or t
  misc_feature (280)..(280): n is a, c, g, or t
  misc_feature (307)..(307): n is a, c, g, or t
  misc_feature (322)..(322): n is a, c, g, or t
  misc_feature (330)..(330): n is a, c, g, or t
  misc_feature (375)..(375): n is a, c, g, or t
  misc_feature (398)..(398): n is a, c, g, or t
  misc_feature (419)..(419): n is a, c, g, or t
  misc_feature (431)..(431): n is a, c, g, or t
  misc_feature (453)..(453): n is a, c, g, or t
  misc_feature (633)..(633): n is a, c, g, or t
  misc_feature (679)..(679): n is a, c, g, or t
  misc_feature (733)..(733): n is a, c, g, or t
  misc_feature (853)..(853): n is a, c, g, or t
gtttncgggacttccacttctgttgcgttaggtcgagaggagccggagacgagtatccagaggccgaactcggtgtttctgacaatatgtgtctctgtcnctgccccgcagattcattctataggaaacccagcgttttgtccggcagaaccagtccccggcatcaaagccgaaccagatgagagcnacgcccgtnattttcatgtggncattgcnggccctcaggattccccctttgagggagggactttaaaacntgaacnattccntccagaagaanacccaatggcagcccctaaagtacgtntcatgaccaaaattnatcatccnaatgtagacaagttgggaagaatatgtctagatattttgaaaganaagtggtccccagcactgcaganccgcacagtcccgccatcganccaggccttgtnaagtgcccccaatccagatganccattagcaaatgatgtagcggacagtggaagaccaacgaagcccaagccatagaaacagccagagcatggaccaggccatatgccatgaataaaattcaaattgatacgaacatcaagtgtgcatcactccccccgtcccgccaagacttcctcctctttgtttgcatttaatggacanagttttagaaacattacagaataaaaaagcccagacatcttcagtnctttggtgattaaatgcacattagcaaatctatgttttgtcctgattcactgtnataaagcatgagcagaggctagaagtatcatctggattgttgtgaaagtttaaaagcagtggcccctccctgcttttattcatttccccatcctggtttaagtataaagcactgtgaatnaaggtag

SEQ ID NO: 496795 - DNA, 114 bp, Homo sapiens
taccgttatgtctgtaggccagcgcgttagaaggagcaggaagcgcagcagggagaagtaggactccgtgccggcgccaaactggcccccgatcctcttcagtgtccacgccca

SEQ ID NO: 496796 - DNA, 580 bp, Homo sapiens
cgtctagtgtacgaggcctgtgtggttagagctgagtgtagggccgctgagctggagtcttgctgagcgggcgccgagctcccgccatggccctggaacacgctgtcctcgcgcttcctgccggtgtggacatctgacgaatttgacgatgaacaaatttgtggacgagcagtgatggaggctggctgtgcgtgctggctgtgcggagccaggcctggacccgagctgaggtggacgggctcctgctggcaaggtggacatgcttcgtggcattccatgcagccttgctgtgaactctccctgtcaacaccaagaatcaagctgtgaatggagctgagcccagtggcgtggtgctgaaagtgctcacaaacttcaagagcagtgagattgagcaggctgtgcagtcactggacatgaaacggcgttgacttgttaatgaagtacatttataaaggctttgagaagcccacatgaacatacgcatgcgcagtgttactccagtggcacgaaaatggccttagcagtatggaggactagtgctccattataatgagttcttacagcaatgaaagactgttta

SEQ ID NO: 496797 - DNA, 5542 bp, Homo sapiens
ggactttagaagccgttgctgccctctctgtcacctgaagcggggccctctcccatcccacccttgccccgcctccctgcccccaccgggccggccctgcccgccgccggaccctggcatgtcaagacctggtccgcgcctgcctgcccagcccgcggaaccccggcggccccgcgagctaggatgaggggccaggccgccgccccgggccccgtctggatcctcgccccgctgctactgctgctgctgctgctgggacgccgcgcgcgggcggccgccggagcagacgcggggcccgggcccgagccgtgcgccacgctggtgcagggaaagttcttcggctacttctccgcggccgccgtgttcccggccaacgcctcgcgctgctcctggacgctacgcaacccggacccgcggcgctacactctctacatgaaggtggccaaggcgcccgtgccctgcagcggccccggccgcgtgcgcacctaccagttcgactccttcctcgagtccacgcgcacctacctgggcgtggagagcttcgacgaggtgctgcggctctgcgacccctccgcacccctggccttcctgcaggccagcaagcagttcctgcagatgcggcgccagcagccgccccagcacgacgggctccggccccgggccgggccgccgggccccaccgacgacttctccgtggagtacctggtggtggggaaccgcaaccccagccgtgccgcctgccagatgctgtgccgctggctggacgcgtgtctggccggtagtcgcagctcgcacccctgcgggatcatgcagaccccctgcgcctgcctgggcggcgaggcgggcggccctgccgcgggacccctggccccccgcggggatgtctgcttgagagatgcggtggctggtggccctgaaaactgcctcaccagcctgacccaggaccggggcgggcacggcgccacaggcggctggaagctgtggtccctgtggggcgaatgcacgcgggactgcgggggaggcctccagacgcggacgcgcacctgcctgcccgcgccgggcgtggagggcggcggctgcgagggggtgctggaggagggtcgccagtgcaaccgcgaggcctgcggccccgctgggcgcaccagctcccggagccagtccctgcggtccacagatgcccggcggcgcgaggagctgggggacgagctgcagcagtttgggttcccagccccccagaccggtgacccagcagccgaggagtggtccccgtggagcgtgtgctccagcacctgcggcgagggctggcagacccgcacgcgcttctgcgtgtcctcctcctacagcacgcagtgcagcggacccctgcgcgagcagcggctgtgcaacaactctgccgtgtgcccagtgcatggtgcctgggatgagtggtcgccctggagcctctgctccagcacctgtggccgtggctttcgggatcgcacgcgcacctgcaggcccccccagtttgggggcaacccctgtgagggccctgagaagcaaaccaagttctgcaacattgccctgtgccctggccgggcagtggatggaaactggaatgagtggtcgagctggagcgcctgctccgccagctgctcccagggccgacagcagcgcacgcgtgaatgcaacgggccttcctacgggggtgcggagtgccagggccactgggtggagacccgagactgcttcctgcagcagtgcccagtggatggcaagtggcaggcctgggcgtcatggggcagttgcagcgtcacgtgtggggctggcagccagcgacgggagcgtgtctgctctgggcccttcttcgggggagcagcctgccagggcccccaggatgagtaccggcagtgcggcacccagcggtgtcccgagccccatgagatctgtgatgaggacaactttggtgctgtgatctggaaggagaccccagcgggagaggtggctgctgtccggtgtccccgcaacgccacaggactcatcctgcgacggtgtgagctggacgaggaaggcatcgcctactgggagccccccacctacatccgctgtgtttccattgactacagaaacatccagatgatgacccgggagcacctggccaaggctcagcgagggctgcctggggagggggtctcggaggtcatccagacactggtggagatctctcaggacgggaccagctacagtggggacctgctgtccaccatcgatgtcctgaggaacatgacagagattttccggagagcgtactacagccccacccctggggacgtacagaactttgtccagatccttagcaacctgttggcagaggagaatcgggacaagtgggaggaggcccagctggcgggccccaacgccaaggagctgttccggctggtggaggactttgtggacgtcatcggcttccgcatgaaggacctgagggatgcataccaggtgacagacaacctggttctcagcatccataagctcccagccagcggagccactgacatcagcttccccatgaagggctggcgggccacgggtgactgggccaaggtgccagaggacagggtcactgtgtccaagagtgtcttctccacggggctgacagaggccgatgaagcatccgtgtttgtggtgggcaccgtgctctacaggaacctgggcagcttcctggccctgcagaggaacacgaccgtcctgaattctaaggtgatctccgtgactgtgaaacccccgcctcgctccctgcgcacacccttggagatcgagtttgcccacatgtataatggcaccaccaaccagacctgtatcctgtgggatgagacggatgtaccctcctcctccgcccccccgcagctcgggccctggtcgtggcgcggctgccgcacggtgcccctcgacgccctccggacgcgctgcctctgtgaccggctctccaccttcgccatcttagcccagctcagcgccgacgcgaacatggagaaggcgactctgccgtcggtgacgctcatcgtgggctgtggcgtgtcctctctcaccctgctcatgctggtcatcatctacgtgtccgtgtggaggtacattcgctcagagcgttctgtcatcctcatcaacttctgcctgtccatcatctcctccaatgccctcatcctcatcgggcagacccagacccgcaacaaggtgatgtgcacgctggtggccgccttcctgcacttcttcttcctgtcctccttctgctgggtgctcaccgaggcctggcagtcctacatggccgtgacgggccacctccggaaccgcctcatccgcaagcgcttcctctgcctgggctgggggctccctgcactggttgtggccatttctgtgggattcaccaaggccaaagggtacagcaccatgaactactgctggctctccctggaggggggactgctctatgccttcgtgggacctgccgctgccgttgtgctggtgaacatggtcattgggatcctggtgttcaacaagctcgtgtccaaagacggcatcacggacaagaagctgaaggagcgggcaggggcctccctgtggagctcctgcgtggtgctgccgctgctggcgctgacctggatgtcggctgtgctcgccgtcaccgaccgccgctccgccctcttccagatcctcttcgctgtcttcgactcgctggagggcttcgtcatcgtcatggtgcactgtatcctccgtagagaggtccaggacgctgtgaaatgccgtgtggttgaccggcaggaggagggcaacggggactcagggggctccttccagaacggccacgcccagctcatgaccgacttcgagaaggacgtggatctggcctgtagatcagtgctgaacaaggacatcgcggcctgccgcactgccaccatcacgggcacactgaagcggccgtctctgcccgaggaggagaagctgaagctggcccatgccaaggggccgcccaccaatttcaacagcctgccggccaacgtgtccaagctgcacctgcacggctcaccccgctatcccggcgggcccctgcccgacttccccaaccactcactgaccctcaagagggacaaggcgcccaagtcctccttcgtcggtgacggggacatcttcaagaagctggactcggagctgagccgggcccaggagaaggctctggacacgagctacgtgatcctgcccacggccacggccacgctgcggcccaagcccaaggaggagcccaagtacagcatccacattgaccagatgccgcagacccgcctcatccacctcagcacggcccccgaggccagcctccccgcccgcagcccgccctcccgccagccccccagcggcgggccccccgaggcaccccctgcccagcccccaccgcctccgcccccaccgccaccacctccccagcagcccctgcccccaccgcccaatctggagccggcaccccccagcctgggggatcccggggagcctgccgcccatccgggacccagcacggggcccagcaccaagaacgagaatgtcgccaccttgtctgtgagctccctggagcggcggaagtcgcggtatgcagaactggactttgagaagatcatgcacacccggaagcggcaccaagacatgttccaggacctgaaccggaagctgcagcacgcagcggagaaggacaaggaggtgctggggccggacagcaagccggaaaagcagcagacgcccaacaagaggccctgggagagcctccggaaagcccacgggacgcccacgtgggtgaagaaggagctggagccgctgcagccgtcgccgctggagcttcgcagcgtggagtgggagaggtcgggcgccacgatcccgctggtgggccaggacatcatcgacctccagaccgaggtctgagcgggtgggcggcggccacgcactgggccacggaggagggatgctgctccgcccgctcctgccgcagacgggcacagacacgctcgcgggcagcgggccaggcccgcaccccggcctcagggcgctcagacggcggccaggcacagggcccgcagtgctgggaccagagccagatgcaggacaggaggcggcccggccagcgggcacagggcaccagaggccgaaggtgcctcagactccgccctcctcgggccgaggcccagcgggcagatgggcggacggctgtggaccgtggacaggcccagcgcggccagcgtcccagggtacccgcctgagctcctgctgcggaggagctgcctgcttggcccggccggcctggcaccgttttttaaacacccccatccctcgggaagcagccagctccccacaccttccagggccctaggcccctcctagacccaggtggagggcacagccctccgaccctcatggcccccaggggcaggactgagtcccctccaggaagaagcaggggggaatctattttttctctccttttcttttcttcaataaaaagaattaaaaacccaaaaaaaaacacaac

SEQ ID NO: 496798 - DNA, 186 bp, Homo sapiens
ttcgcttgatgctcaccatatggtggccctggcattcagctattacacgtctcctaagatgtctcgggtagtgtattagttcctttctcatactgctatgtaagacatactggcaactgggtcatttctaactgaaccagaggtttattgtactcacagttccaccaggctggagaggcctccgaa

SEQ ID NO: 496799 - DNA, 423 bp, Homo sapiens
cgtgtcgcaaatgatccagatagagaggtaacatgcatataaaatcatctgcccttatgggagagacattcatatgattcggccatgaatatcttccattgggcagctggtcctttggtatcacacttcaccaaataaaccaaaaatttatcccgaatagcttgctacctatagccatcaactgagtgcctttttttttttcttgggtttggagatgggagtctggctctgtcacccaggcgggagtgcaggggtgcaatctcagctcacgtgcaacctcggccatggcactccagccggggcaacagagtgaacctcggtctcaaaaagaaaaaaaacacaaaacaaaacccacgtgaggggagcggggagaggccccaccggccgggaaactccagacaagccacagattcaaccagggga

SEQ ID NO: 496800 - DNA, 520 bp, Homo sapiens
  misc_feature (39)..(39): n is a, c, g, or t
  misc_feature (211)..(211): n is a, c, g, or t
aggcttccactgcaatgcaagtcacctgcctgcctcacnccggttgtgcagacacacttgcacccatgggctcaacactcaagcccatgatgtctgctcatgctctgtaaaccctgagccctaagagcacctggtgtccctgcaccccagcaactagatccgtaaccaaaccccaacctcccaggcccaaacaccctgggtcatccagtcntgaacgctggcctggcagcatggctcaggtgctcctgctcccccacacccctgcaccagcctggcttgtagtgctgagggcctggggaatggggatgctagggaggaaaatggggaagcagccagctccccacaccttccagggccctaggcccctcctagacccaggtggagggcacagccctccgaccctcatggcccccaggggcaggactgagtcccctccaggaagaagcaggggggaatctattttttctctccttttcttttcttcaataaaaagaattaaaaacccaaaaaaaaacacaac

SEQ ID NO: 496801 - DNA, 167 bp, Homo sapiens
cttttggggtctttgctctatctcagccgcagaccgcttatctcctacacaccaacgaagagcctcatgccagccagccccggagcgcttgagagcagccccagggacccaggcctctgtgcctggacacccctctggcctgaacccggaggcgccagcgctcatgc

SEQ ID NO: 496802 - DNA, 2424 bp, Homo sapiens
ggactttagaagccgttgctgccctctctgtcacctgaagcggggccctctcccatcccacccttgccccgcctccctgcccccaccgggccggccctgcccgccgccggaccctggcatgtcaagacctggtccgcgcctgcctgcccagcccgcggaaccccggcggccccgcgagctaggatgaggggccaggccgccgccccgggccccgtctggatcctcgccccgctgctactgctgctgctgctgctgggacgccgcgcgcgggcggccgccggagcagacgcggggcccgggcccgagccgtgcgccacgctggtgcagggaaagttcttcggctacttctccgcggccgccgtgttcccggccaacgcctcgcgctgctcctggacgctacgcaacccggacccgcggcgctacactctctacatgaaggtggccaaggcgcccgtgccctgcagcggccccggccgcgtgcgcacctaccagttcgactccttcctcgagtccacgcgcacctacctgggcgtggagagcttcgacgaggtgctgcggctctgcgacccctccgcacccctggccttcctgcaggccagcaagcagttcctgcagatgcggcgccagcagccgccccagcacgacgggctccggccccgggccgggccgccgggccccaccgacgacttctccgtggagtacctggtggtggggaaccgcaaccccagccgtgccgcctgccagatgctgtgccgctggctggacgcgtgtctggccggtagtcgcagctcgcacccctgcgggatcatgcagaccccctgcgcctgcctgggcggcgaggcgggcggccctgccgcgggacccctggccccccgcggggatgtctgcttgagagatgcggtggctggtggccctgaaaactgcctcaccagcctgacccaggaccggggcgggcacggcgccacaggcggctggaagctgtggtccctgtggggcgaatgcacgcgggactgcgggggaggcctccagacgcggacgcgcacctgcctgcccgcgccgggcgtggagggcggcggctgcgagggggtgctggaggagggtcgccagtgcaaccgcgaggcctgcggccccgctgggcgcaccagctcccggagccagtccctgcggtccacagatgcccggcggcgcgaggagctgggggacgagctgcagcagtttgggttcccagccccccagaccggtgacccagcagccgaggagtggtccccgtggagcgtgtgctccagcacctgcggcgagggctggcagacccgcacgcgcttctgcgtgtcctcctcctacagcacgcagtgcagcggacccctgcgcgagcagcggctgtgcaacaactctgccgtgtgcccagtgcatggtgcctgggatgagtggtcgccctggagcctctgctccagcacctgtggccgtggctttcgggatcgcacgcgcacctgcaggcccccccagtttgggggcaacccctgtgagggccctgagaagcaaaccaagttctgcaacattgccctgtgccctggccgggcagtggatggaaactggaatgagtggtcgagctggagcgcctgctccgccagctgctcccagggccgacagcagcgcacgcgtgaatgcaacgggccttcctacgggggtgcggagtgccagggccactgggtggagacccgagactgcttcctgcagcagtgcccagtggatggcaagtggcaggcctgggcgtcatggggcagttgcagcgtcacgtgtggggctggcagccagcgacgggagcgtgtctgctctgggcccttcttcgggggagcagcctgccagggcccccaggatgagtaccggcagtgcggcacccagcggtgtcccgagccccatgagatctgtgatgaggacaactttggtgctgtgatctggaaggagaccccagcgggagaggtggctgctgtccggtgtccccgcaacgccacaggactcatcctgcgacggtgtgagctggacgaggaaggcatcgcctactgggagccccccacctacatccgctgtgtttccattgactacagaaacatccagatgatgacccgggagcacctggccaaggctcagcgagggctgcctggggagggggtctcggaggtcatccagacactggtggagatctctcaggacgggaccagctacagtggggacctgctgtccaccatcgatgtcctgaggaacatgacagagattttccggagagcgtactacagccccacccctggggacgtacaggtgggctcccgaggggcatcttggaagagggtgtcgggaaggtgtctggggagccctcctcgaccttagagatggatcaccaaccctagccacagcacacgcaactgaggg

SEQ ID NO: 496803 - DNA, 838 bp, Homo sapiens
ggacgcgtgggtcgacccacgcgtcgcggacgcgtgggtccggacgcgtgggcgcccaacaagaggccctgggagagcctccggaaagcccacgggacgcccacgtgggtgaagaaggagctggagccgctgcagccgtcgccgctggagcttcgcagcgtggagtgggagaggtcgggcgccacgatcccgctggtgggccaggacatcatcgacctccagaccgaggtctgagcgggtgggcggcggccacgcactgggccacggaggagggatgctgctccgcccgctcctgccgcagacgggcacagacacgctcgcgggcagcgggccaggcccgcaccccggcctcagggcgctcagacggcggccaggcacagggcccgcagtgctgggaccagagccagatgcaggacaggaggcggcccggccagcgggcacagggcaccagaggccgaaggtgcctcagactccgccctcctcgggccgaggcccagcgggcagatgggcggacggctgtggaccgtggacaggcccagcgcggccagcgtcccagggtacccgcctgagctcctgctgcggaggagctgcctgcttggcccggccggcctggcaccgttttttaaacacccccatccctcgggaagcagccagctccccacaccttccagggccctaggcccctcctagacccaggtggagggcacagccctccgaccctcatggcccccaggggcaggactgagtcccctccaggaagaagcaggggggaatctattttttctctccttttcttttcttcaataaaaagaattaaaaacccaaaaaaaaacacaac

SEQ ID NO: 496804 - DNA, 187 bp, Homo sapiens
acttctaggcctgctatcgttggacctggctgcgcgccacatgctacgtgtctcgggtagcgcataaccatgtcacacggatgttcactagtatcttaatgtcttacgtgataaaaatcatccagaggaattgcgtaaaatactcattgatcctaagatggtagaacttgcacctgataatgattta

SEQ ID NO: 496805 - DNA, 106 bp, Homo sapiens
  misc_feature (5)..(5): n is a, c, g, or t
gtganctagaggacccggtcacttgctacacctttgattggagaatagtattagaaactaccatctgggcgctgacttacttttttacagaatcactctggctgtt

SEQ ID NO: 496806 - DNA, 315 bp, Homo sapiens
cctgtctttgatgctaatctctcttccttttcatccgtctgtactacatttctctttacctagtcatatcatttattgtcccttatttgatttacctttttctaatgatgacattttgttttttttttttttttttttttttgtttttttttttttttttttttttttttttttttttttttttttttttttttttttttttttttttttttttttttttttttttttttttttttttttttttttttttttttttttttttttttatagtaaatatttaattgtttccatcagcaattccagcacaagttttcc

SEQ ID NO: 496807 - DNA, 168 bp, Homo sapiens
ggggggccccccccccccctttggggggtaacccctttttccccgggggggccccccctttgggggggcccgggggtttttttcccccccccccccccccccccctggggttttttttttttttgggggggggggggaaaataataaaggggttttttggccccccca

SEQ ID NO: 496808 - DNA, 209 bp, Homo sapiens
ggatttttttccccggggaccagctctgtgaaggaaataaaaagccccatgtgtgttaaaaaaaaaaattaaaattaaaatgaaaaaaagctttttttcttttctttttaaaaggatttaaaatctgtttctctcttctgttactttacacggaagaaagctctgctcttctgtggtcttaaaaccaaatgaaataaacgtgcaaagga

SEQ ID NO: 496809 - DNA, 153 bp, Homo sapiens
gaggatcccggcagaggcagctggccatcagctgagagatcagaggtggagcagggataggagcggaagcagcgcactcttggcctgtggctgcccgcaagaagctggagggagagctggaggagctgaaaggctcagtatgtgcctctgcct

SEQ ID NO: 496810 - DNA, 280 bp, Homo sapiens
  misc_feature (118)..(118): n is a, c, g, or t
  misc_feature (123)..(123): n is a, c, g, or t
  misc_feature (148)..(148): n is a, c, g, or t
  misc_feature (161)..(161): n is a, c, g, or t
  misc_feature (210)..(210): n is a, c, g, or t
  misc_feature (219)..(219): n is a, c, g, or t
  misc_feature (255)..(255): n is a, c, g, or t
ttaaggccatcccttatatcttacatccggcgcttacactctatggaaaccgctaccatatcctgcaccacccttccactggtatacaaagccgcacatgcctccacatgccacgaangcaangaccccgtacgcctaaccgcgttgngtacccactacgnaatgcacccacccccttcctctcctcttcccctccggttccgcaccaanggggccttngtcatatcttcgaccaccaaaatatagtagtcctangcacccgaaacgttccttactgatc

SEQ ID NO: 496811 - DNA, 363 bp, Homo sapiens
atgtagttaggacctcgagggctggagtgatctgtgtgcccgggagacgtgaacttgttgtactgggagtacatcaagcgggagggatatcatgtccggaagcacacgagccaaggtctcggatcccacgtctcagatgctggtattgtacaagcttagcctgagctgggatgcaggtgagcgaaggcatggcctcgtcgatattgtgtaggcagccaggtcagtgatgttgtgctgggacatactataagtcccagtggtttgggaagctgagttgatgagattccttgaggccaggaggtcagggcggcagaggtattatcatagcattatattctagctttgtgtgacacaagcgatccc

SEQ ID NO: 496812 - DNA, 611 bp, Homo sapiens
  misc_feature (29)..(29): n is a, c, g, or t
  misc_feature (42)..(42): n is a, c, g, or t
  misc_feature (79)..(79): n is a, c, g, or t
  misc_feature (86)..(86): n is a, c, g, or t
  misc_feature (125)..(125): n is a, c, g, or t
tatgattcaccagttagccacagtagtanaacagcaaagtcnaatggcatgaaggatgcagggccaagcagcccagcgnacgtgcnttcaaatagttctcatggttatcctaatgacactgtttntttggcttcctccatagccactcagccagaactcataactgttcatattgtcaaagggccaatgggctttggttttactatcgcagacagtcctggtgggggtggccaaagagtgaaacagattgttgacagcccaaggtgccgaggcctgaaagaaggggatctcatagtggaagttaataagaagaacgtgcaggccctaactcacaaccaagtggtggatatgctggttgagtgtcctaagggaagtgaggtcacattgttggtgcaacgaggaggtcattgggatcctgggcagagtcaagtgcagtaaaagataactatggtgaaaccttgctgattccaattaactaagaaggtctctctgaattaggagaaaatatgaatttaaagatgtcatcttatataattttgaagtttatacagtgacccacacttatacaacctaataaaatttcttaagggaatcatattaataagccaaaa

SEQ ID NO: 496813 - DNA, 576 bp, Homo sapiens
  misc_feature (29)..(29): n is a, c, g, or t
  misc_feature (42)..(42): n is a, c, g, or t
  misc_feature (79)..(79): n is a, c, g, or t
  misc_feature (86)..(86): n is a, c, g, or t
  misc_feature (125)..(125): n is a, c, g, or t
  misc_feature (414)..(414): n is a, c, g, or t
  misc_feature (419)..(419): n is a, c, g, or t
  misc_feature (439)..(439): n is a, c, g, or t
  misc_feature (459)..(459): n is a, c, g, or t
  misc_feature (480)..(480): n is a, c, g, or t
  misc_feature (493)..(493): n is a, c, g, or t
tatgattcaccagttagccacagtagtanaacagcaaagtcnaatggcatgaaggatgcagggccaagcagcccagcgnacgtgcnttcaaatagttctcatggttatcctaatgacactgtttntttggcttcctccatagccactcagccagaactcataactgttcatattgtcaaagggccaatgggctttggttttactatcgcagacagtcctggtgggggtggccaaagagtgaaacagattgttgacagcccaaggtgccgaggcctgaaagaaggggatctcatagtggaagttaataagaagaacgtgcaggccctaactcacaaccaagtggtggatatgctggttgagtgtcctaagggaagtgaggtcacattgttggtgcaacgaggagggctgccagtncccangaagagcccaaagtcgcaancactggaaaggaaagacagncagaatagttctcagcacagngtttccagccacngaagcctgcacacagcatccccaagccacacggagcacaggtgctccccgagtgcccacctgcagaggcccaagcttccagat

SEQ ID NO: 496814 - DNA, 272 bp, Homo sapiens
ggcgcgaattcactagtgattgtgagctgagatcgcaccactgcactccagtctagtgcgacaagagcgaaactccatctcaaaaaaaaaaaaaaaaaaaaaaaaagggaattaaggtcctgatacttgctacaaaatgatgcagggcccctgaaaacaacacgctaggttaaattggcccagacacaaaaagccaagttttacattgattcccagtttacattgaaattatctagacataagaaaatttcacagaaaacaaagattagatt

SEQ ID NO: 496815 - DNA, 107 bp, Homo sapiens
aaagagaaggaactgcggaaactgggaggaatcatataaaaagtataaatagccaccgggcacagtggctcatgcctgtaatcccagcactttgggaggctgagatg

SEQ ID NO: 496816 - DNA, 283 bp, Homo sapiens
ttggaaaatggacagatttctgaaccgctttcacctgggcgaacctgaagcaagcacccagttcatgacccagaactaccaggactcaccaaccctccaggctcacagaggaaggccagcgagcccaagcaccaaaccaggcggagctcgctgcctgctagatagaagcttcgccctccgcgcatgtggcaccactgctcaacaccgaagacacgactacggaaccccctttgcacaccgaccccactcttatcccacctcacaaaaacaataaaacaccacc

SEQ ID NO: 496817 - DNA, 378 bp, Homo sapiens
  misc_feature (280)..(280): n is a, c, g, or t
  misc_feature (300)..(300): n is a, c, g, or t
  misc_feature (332)..(332): n is a, c, g, or t
  misc_feature (336)..(336): n is a, c, g, or t
  misc_feature (352)..(352): n is a, c, g, or t
  misc_feature (355)..(355): n is a, c, g, or t
  misc_feature (359)..(359): n is a, c, g, or t
  misc_feature (365)..(365): n is a, c, g, or t
aagtcccccctcgggtgaaaaaattggggtttgggtgcgctattacttccggaacggcacccccaacatgttccgggaataccggggccttacccccccagggggtgttacccaatgcttcccaaacatggggggccggcccccgcgcccgagcccccccccttcagatcattaagggggaggagattccggccaacaaattcccccggccggctgtcaaacagtttcccgactccaaaatcaagtttcccctgcccccccgggttttgggccgtcagcncaaaccccgctttccccccnaaagggcccacccctttttttaggggcagggncctngtccgggggggccccnaanaaantcaggnacgccccggggga

SEQ ID NO: 496818 - DNA, 404 bp, Homo sapiens
  misc_feature (370)..(370): n is a, c, g, or t
  misc_feature (385)..(385): n is a, c, g, or t
  misc_feature (399)..(399): n is a, c, g, or t
ttaccccattgattggatataccacaattttttaatccgttcatcttgttgatggacatttaggttgttttttagcgtttagttttaccaataaagatgctataggcatccagataatagtgtttgtatggacacatgctttcatttttcttcagtaaataacccagcagtggaatgctgtcatctggtaggtatatatttaatcttttaagaaactgctaaactgttttccaaagtggttgtaccattttgcgctccctctaggcattgtatgaggagttccagtcattttattatctttgtcagcacttatatggtcagccctttttaattttaggcccttctagggggggtgtttagtgggtatccncttatggggttttangtggcctttcaccnatgga

SEQ ID NO: 496819 - DNA, 140 bp, Homo sapiens
  misc_feature (61)..(61): n is a, c, g, or t
gcatatcagaaacttaggctgggtgcaaaggcctctccttcttctctcttcacatccctgncgggactctaggtcactgtaatcccagctactcgggagactgaggcaggagaatcgcttgaactcaggatgcttcttga

SEQ ID NO: 496820 - DNA, 171 bp, Homo sapiens
tccagacgaaggtgtgtacagattatctcgaagcagacagctgatgtgtttgaaaatgaagaacgcttaagacaggcatgttgaattactaggaaatgcctccagactactagtacgagtacgttaggctatggtctttacaagacatattgctgcgatgtgttaacctat

SEQ ID NO: 496821 - DNA, 113 bp, Homo sapiens
tacatggagccccatttccatcaggcctctgtgagtctataccccatcagcccctgagccagtgagtctgtctgtccgcccacctgcccatggtggcgcctcatgttggtttc

SEQ ID NO: 496822 - DNA, 1388 bp, Homo sapiens
ggaaagttctgatcaagaatacacaaagacacaagccaggtccccaccgcgcttggcgatgcatccatagcagccttggtgctgtggacactccctggggcccagcgaaggggagagtttgctcccaaaggcgcaccaatgaccaacatttgccccccggaggaaagaactggaaccctgggtcaaggccaacctgtcagaggtgcttgtgtccagtgtcctgggggtcaacgtgaccagcactgaagtctatggggccttcacctgctccatccagaacatcagcttctcctccttcactcttcagagagctggccctacaagccacgtggctgcggtgctggcctccctcctggtcctgctggccctgctgctggccgccctgctctatgtcaagtgccgtctcaacgtgctgctctggtaccaggacgcgtatggggaggtggagataaacgacgggaagctctacgacgcctacgtctcctacagcgactgccccgaggaccgcaagttcgtgaacttcatcctaaagccgcagctggagcggcgtcggggctacaagctcttcctggacgaccgcgacctcctgccgcgcgctgagccctccgccgacctcttggtgaacctgagccgctgccgacgcctcatcgtggtgctttcggacgccttcctgagccgggcctggtgcagccacagcttccgggagggcctgtgccggctgctggagctcacccgcagacccatcttcatcaccttcgagggccagaggcgcgaccccgcgcacccggcgctccgcctgctgcgccagcaccgccacctggtgaccttgctgctctggaggcccggctccgtgactccttcctccgatttttggaaagaagtgcagctggcgctgccgcggaaggtgcggtacaggccggtggaaggagacccccagacgcagctgcaggacgacaaggaccccatgctgattcttcgaggccgagtccctgagggccgggccctggactcagaggtggacccggaccctgagggcgacctgggtgtccgggggcctgtttttggagagccatcagctccaccgcacaccagtggggtctcgctgggagagagccggagcagcgaagtggacgtctcggatctcggctcgcgaaactacagtgcccgcacagacttctactgcctggtgtccaaggatgatatgtagctcccaccccagagtgcaggatcatagggacagcgggggccagggcagcggcgtcgctcctctgctcaacaggaccacaacccctgccagcagccctgggaccctgccagcagccctgggaaaaggctgtggcctcagggcgcctcccagtgccagaaaataaagtccttttggattctga

SEQ ID NO: 496823 - DNA, 415 bp, Homo sapiens
  misc_feature (41)..(41): n is a, c, g, or t
ctgtaggaattcggcactagcgcctcgttaccccacacgcntttggcacactgaagtgggtaacctctatatccctcctctttctctctagctcggcttattccagaggtgtgtgtcgtcgagatgcacacacgagtgagggtgcgtcatagggttaaagatttgggagaagaaaatttcaaagccttggtggtgagtggctttgcgtcagaatcttcagcagtgtgcatttgaagatcatggaaattagtgagatgagaggaccggatttgcacctttttggagacaaattatgcacaggtgcgactcttcgtgaaacctatggtgaaatggctgactggtgtgcacaacaagaacctgagagaaatggatgcgttttgcgacacaaagatgaccccccttccccgagtggtgg

SEQ ID NO: 496824 - DNA, 1710 bp, Homo sapiens
ggaaagttctgatcaagaatacacaaagacacaagccaggtccccaccgcgcttggcgatgcatccatagcagccttggtgctgtggacactccctggggcccagcgaaggggagagtttgctcccaaaggcgcaccaatgaccaacatttgccccccggaggaaagaactggaaccagcctctgacctgtccaggtgccctgtccagctgactgcaaggacagagaggagtcctgcccagctcttggatcagtctgctggccgaggagcccggtggagccaggggtgaccctggagcccagcctgccccgaggaggccccggctcagagccatgccaggtgtctgtgatagggcccctgacttcctctccccgtctgaagaccaggtgctgaggcctgccttgggcagctcagtggctctgaactgcacggcttgggtagtctctgggccccactgctccctgccttcagtccagtggctgaaagacgggcttccattgggaattgggggccactacagcctccacgagtactcctgggtcaaggccaacctgtcagaggtgcttgtgtccagtgtcctgggggtcaacgtgaccagcactgaagtctatggggccttcacctgctccatccagaacatcagcttctcctccttcactcttcagagagctggccctacaagccacgtggctgcggtgctggcctccctcctggtcctgctggccctgctgctggccgccctgctctatgtcaagtgccgtctcaacgtgctgctcgacgggaagctctacgacgcctacgtctcctacagcgactgccccgaggaccgcaagttcgtgaacttcatcctaaagccgcagctggagcggcgtcggggctacaagctcttcctggacgaccgcgacctcctgccgcgcgctgagccctccgccgacctcttggtgaacctgagccgctgccgacgcctcatcgtggtgctttcggacgccttcctgagccgggcctggtgcagccacagcttccgggagggcctgtgccggctgctggagctcacccgcagacccatcttcatcaccttcgagggccagaggcgcgaccccgcgcacccggcgctccgcctgctgcgccagcaccgccacctggtgaccttgctgctctggaggcccggctccgtgactccttcctccgatttttggaaagaagtgcagctggcgctgccgcggaaggtgcggtacaggccggtggaaggagacccccagacgcagctgcaggacgacaaggaccccatgctgattcttcgaggccgagtccctgagggccgggccctggactcagaggtggacccggaccctgagggcgacctgggtgtccgggggcctgtttttggagagccatcagctccaccgcacaccagtggggtctcgctgggagagagccggagcagcgaagtggacgtctcggatctcggctcgcgaaactacagtgcccgcacagacttctactgcctggtgtccaaggatgatatgtagctcccaccccagagtgcaggatcatagggacagcgggggccagggcagcggcgtcgctcctctgctcaacaggaccacaacccctgccagcagccctgggaccctgccagcagccctgggaaaaggctgtggcctcagggcgcctcccagtgccagaaaataaagtccttttggattctga

SEQ ID NO: 496825 - DNA, 630 bp, Homo sapiens
gatacagccatttccactgcaccctattactcgacagaggcagttccgaacgactacttatatacgacagccagacgacatccttactttaattccgagcaactccagttcttcagctaaaaggtataaagctgcttttacagaatgttgccaagctgctgataaagctgcctgcctgttgccaaagctcgatgaacttcgggatgaagggaaggcttcgtctgccaaacagagactcaagtgtgccagtctccaaaaatttggagaaagagctttcaaagcatgggcagtagctcgcctgagccagagatttcccaaagctgagtttgcagaagtttccaagttagtgacagatcttaccaaagtccacacggaatgctgccatggagatctgcttgaatgtgctgatgacagggcggaccttgccaagtatatctgtgaaaatcaagattcgatctccagtaaactgaaggaatgctgtgaaaaacctctgttggaaaaatcccacttgaatgccgaaatgcctgaggaatagcttcttgatttgcctcattaggtgcctgatcttgctgatgttatttgacggatatgccacaaagctttctggctctgtcagccggtccaggctcg

SEQ ID NO: 496826 - DNA, 1946 bp, Homo sapiens
ggaaagttctgatcaagaatacacaaagacacaagccaggtccccaccgcgcttggcgatgcatccatagcagccttggtgctgtggacactccctggggcccagcgaaggggagagtttgctcccaaaggcgcaccaatgaccaacatttgccccccggaggaaagaactggaaccagcctctgacctgtccaggtgccctgtccagctgactgcaaggacagagaggagtcctgcccagctcttggatcagtctgctggccgaggagcccggtggagccaggggtgaccctggagcccagcctgccccgaggaggccccggctcagagccatgccaggtgtctgtgatagggcccctgacttcctctccccgtctgaagaccaggtgctgaggcctgccttgggcagctcagtggctctgaactgcacggcttgggtagtctctgggccccactgctccctgccttcagtccagtggctgaaagacgggcttccattgggaattgggggccactacagcctccacgagtactcctgggtcaaggccaacctgtcagaggtgcttgtgtccagtgtcctgggggtcaacgtgaccagcactgaagtctatggggccttcacctgctccatccagaacatcagcttctcctccttcactcttcagagagctggccctacaagccacgtggctgcggtgctggcctccctcctggtcctgctggccctgctgctggccgccctgctctatgtcaagtgccgtctcaacgtgctgctctggtaccaggacgcgtatggggaggtggagataaacgacgggaagctctacgacgcctacgtctcctacagcgactgccccgaggaccgcaagttcgtgaacttcatcctaaagccgcagctggagcggcgtcggggctacaagctcttcctggacgaccgcgacctcctgccgcgcgctgagccctccgccgacctcttggtgaacctgagccgctgccgacgcctcatcgtggtgctttcggacgccttcctgagccgggcctggtgcagccacagcttccgggagggcctgtgccggctgctggagctcacccgcagacccatcttcatcaccttcgagggccagaggcgcgaccccgcgcacccggcgctccgcctgctgcgccagcaccgccacctggtgaccttgctgctctggaggcccggctccgtgactccttcctccgatttttggaaagaagtgcagctggcgctgccgcggaaggtgcggtacaggccggtggaaggagacccccagacgcagctgcaggacgacaaggaccccatgctgattcttcgaggccgagtccctgagggccgggccctggactcagaggtggacccggaccctgagggcgacctgggtgtccgggggcctgtttttggagagccatcagctccaccgcacaccagtggggtctcgctgggagagagccggagcagcgaagtggacgtctcggatctcggctcgcgaaactacagtgcccgcacagacttctactgcctggtgtccaaggatgatatgtagctcccaccccagagtgcaggatcatagggacagcgggggccagggcagcggcgtcgctcctctgctcaacaggaccacaacccctgccagcagccctgggaccctgccagcagccctgggaccctgccagcagccctgggaaaaggctgtggcctcagggcgcctcccagtgccagaaaataaagtccttttggattctgaaaaaaaaaaaaaactaaaaaaaaaaactccggggcctttttcgggggcggacaaacgggggtttggaaggggccatgggcaaagttttcctggacccgttttttttgccaaggggaaatcgggggcgcccctaatgggggcgatattcgaaaagccggttaacccgtttcgggaaaaggt

SEQ ID NO: 496827 - DNA, 1761 bp, Homo sapiens
  misc_feature (2)..(3): n is a, c, g, or t
  misc_feature (1118)..(1118): n is a, c, g, or t
  misc_feature (1129)..(1129): n is a, c, g, or t
  misc_feature (1135)..(1135): n is a, c, g, or t
  misc_feature (1258)..(1258): n is a, c, g, or t
  misc_feature (1293)..(1293): n is a, c, g, or t
  misc_feature (1342)..(1342): n is a, c, g, or t
  misc_feature (1349)..(1349): n is a, c, g, or t
  misc_feature (1370)..(1370): n is a, c, g, or t
  misc_feature (1412)..(1412): n is a, c, g, or t
  misc_feature (1431)..(1431): n is a, c, g, or t
  misc_feature (1443)..(1443): n is a, c, g, or t
  misc_feature (1455)..(1455): n is a, c, g, or t
  misc_feature (1499)..(1499): n is a, c, g, or t
  misc_feature (1502)..(1502): n is a, c, g, or t
  misc_feature (1505)..(1505): n is a, c, g, or t
  misc_feature (1513)..(1514): n is a, c, g, or t
anntcccctttcactgttgccgtagtgctagcttttctcttctgtcaaccccacacgcctttggcacaatgaagtgggtaacctttatttcccttctttttctctttagctcggcttattccaggggtgtgtttcgtcgagatgcacacaagagtgaggttgctcatcggtttaaagatttgggagaagaaaatttcaaagccttggtgttgattgcctttgctcagtatcttcagcagtgtccatttgaagatcatgtaaaattagtgaatgaagtaactgaatttgcaaaaacatgtgttgctgatgagtcagctgaaaattgtgacaaatcacttcataccctttttggagacaaattatgcacagttgcaactcttcgtgaaacctatggtgaaatggctgactgctgtgcaaaacaagaacctgagagaaatgaatgcttcttgcaacacaaagatgacaacccaaacctcccccgattggtgagaccagaggttgatgtgatgtgcactgcttttcatgacaatgaagagacatttttgaaaaaatacttatatgaaattgccagaagacatccttacttttatgccccggaactccttttctttgctaaaaggtataaagctgcttttacagaatgttgccaagctgctgataaagctgcctgcctgttgccaaagctcgatgaacttcgggatgaagggaaggcttcgtctgccaaacagagactcaagtgtgccagtctccaaaaatttggagaaagagctttcaaagcatgggcagtagctcgcctgagccagagatttcccaaagctgagtttgcagaagtttccaagttagtgacagatcttaccaaagtccacacggaatgctgccatggagatctgcttgaatgtgctgatgacagggcggaccttgccaagtatatctgtgaaaatcaagattcgatctccagtaaactgaaggaatgctgtgaaaaacctctgttggaaaaatcccactgcattgccgaagtggaaaatgatgagatgcctgctgacttggcttcattagctgctgattttgttgaaagtaaggatgtttgcgaaaactatgctgaggcacaggatgtgttnctgggcatgtntttgtntgaatatgcacgaaggcattctgagtactctgtcgtgctgctgctgagacttgccaagacatatgaaaccactctatagaagtgctgtgccgctgcagatactcatgaatgctatgccaaagngttcgatgaatttaaacctcttgtggaagagcctnagaatttaatcaaacaaaattgtgagctttttgagcagcttggagagtncaaattncagaatgcgctattagttcgntacaccaagaaagtgccccaagtgtcaacttcaactcttgtngaggtctcaagaaacctangaaaagtgggcngcaaatgttganaacattctggagcaaaaagatggcctgtgcacaagctatctatncgnggncctgccanntatgtgtgttgcctgagaaaacgccacgtagtgacagagtcaccaaatgctgtacagaatactttgtgaacacgcgaacatgcttttcagatctggaagtcgatgaaacatacgcttcccaagagagtaatgctgaaacattcacctttcatgcagatatatgcacactctctgtgaaggggagacacatcttgaaacacactgcgcttgttgagcttgtgaaacacaagcgccaggcgacatgcaa

SEQ ID NO: 496828 - DNA, 552 bp, Homo sapiens
caataattatgttttataatatctgcctaaaaatgctttccacaatctttttggtaacttgcaatcttaaaattatgctaagtaatacatattcattaactatctagattatttctaagtcagataaaccactgaaaatttatttttaagcataagtttaattttatatacttttggcttcttatttttatatcatatagagaggctacatatatttaggtctgttactaaacattctttttgccacattaaaacaattgtattacgaggaagcacatacctataaaaattgtgagatggtatattcataaaatttgctgatctgctacagaatgttggtacttgacagacaactcacaattgtctataacctagttttttctgttaccaaaaaaagaggttacttatggttaaaaattttaatcaacatatgtaaataaagctactagaactaataaagataaagggaaatgacttgcaagcacaatttgcaaagcaggaagaatgtgtttttgtatgggaaaaataaaaatacctgtcttaaaaaaaaaa

SEQ ID NO: 496829 - DNA, 1766 bp, Homo sapiens
ggaaagttctgatcaagaatacacaaagacacaagccaggtccccaccgcgcttggcgatgcatccatagcagccttggtgctgtggacactccctggggcccagcgaaggggagagtttgctcccaaaggcgcaccaatgaccaacatttgccccccggaggaaagaactggaaccagcctctgacctgtccaggtgccctgtccagctgactgcaaggacagagaggagtcctgcccagctcttggatcagtctgctggccgaggagcccggtggagccaggggtgaccctggagcccagcctgccccgaggaggccccggctcagagccatgccaggtgtctgtgatagggcccctgacttcctctccccgtctgaagaccaggtgctgaggcctgccttgggcagctcagtggctctgaactgcacggcttgggtagtctctgggccccactgctccctgccttcagtccagtggctgaaagacgggcttccattgggaattgggggccactacagcctccacgagtactcctgggtcaaggccaacctgtcagaggtgcttgtgtccagtgtcctgggggtcaacgtgaccagcactgaagtctatggggccttcacctgctccatccagaacatcagcttctcctccttcactcttcagagagctggccctacaagccacgtggctgcggtgctggcctccctcctggtcctgctggccctgctgctggccgccctgctctatgtcaagtgccgtctcaacgtgctgctctggtaccaggacgcgtatggggaggtggagataaacgacgggaagctctacgacgcctacgtctcctacagcgactgccccgaggaccgcaagttcgtgaacttcatcctaaagccgcagctggagcggcgtcggggctacaagctcttcctggacgaccgcgacctcctgccgcgcgctgagccctccgccgacctcttggtgaacctgagccgctgccgacgcctcatcgtggtgctttcggacgccttcctgagccgggcctggtgcagccacagcttccgggagggcctgtgccggctgctggagctcacccgcagacccatcttcatcaccttcgagggccagaggcgcgaccccgcgcacccggcgctccgcctgctgcgccagcaccgccacctggtgaccttgctgctctggaggcccggctccgtgactccttcctccgatttttggaaagaagtgcagctggcgctgccgcggaaggtgcggtacaggccggtggaaggagacccccagacgcagctgcaggacgacaaggaccccatgctgattcttcgaggccgagtccctgagggccgggccctggactcagaggtggacccggaccctgagggcgacctgggtgtccgggggcctgtttttggagagccatcagctccaccgcacaccagtggggtctcgctgggagagagccggagcagcgaagtggacgtctcggatctcggctcgcgaaactacagtgcccgcacagacttctactgcctggtgtccaaggatgatatgtagctcccaccccagagtgcaggatcatagggacagcgggggccagggcagcggcgtcgctcctctgctcaacaggaccacaacccctgccagcagccctgggaccctgccagcagccctgggaccctgccagcagccctgggaaaaggctgtggcctcagggcgcctcccagtgccagaaaataaagtccttttggattctga

SEQ ID NO: 496830 - DNA, 1537 bp, Homo sapiens
  misc_feature (2)..(3): n is a, c, g, or t
  misc_feature (1172)..(1172): n is a, c, g, or t
anntcccctttcactgttgccgtagtgctagcttttctcttctgtcaaccccacacgcctttggcacaatgaagtgggtaacctttatttcccttctttttctctttagctcggcttattccaggggtgtgtttcgtcgagatgcacacaagagtgaggttgctcatcggtttaaagatttgggagaagaaaatttcaaagccttggtgttgattgcctttgctcagtatcttcagcagtgtccatttgaagatcatgtaaaattagtgaatgaagtaactgaatttgcaaaaacatgtgttgctgatgagtcagctgaaaattgtgacaaatcacttcataccctttttggagacaaattatgcacagttgcaactcttcgtgaaacctatggtgaaatggctgactgctgtgcaaaacaagaacctgagagaaatgaatgcttcttgcaacacaaagatgacaacccaaacctcccccgattggtgagaccagaggttgatgtgatgtgcactgcttttcatgacaatgaagagacatttttgaaaaaatacttatatgaaattgccagaagacatccttacttttatgccccggaactccttttctttgctaaaaggtataaagctgcttttacagaatgttgccaagctgctgataaagctgcctgcctgttgccaaagctcgatgaacttcgggatgaagggaaggcttcgtctgccaaacagagactcaagtgtgccagtctccaaaaatttggagaaagagctttcaaagcatgggcagtagctcgcctgagccagagatttcccaaagctgagtttgcagaagtttccaagttagtgacagatcttaccaaagtccacacggaatgctgccatggagatctgcttgaatgtgctgatgacagggcggaccttgccaagtatatctgtgaaaatcaagattcgatctccagtaaactgaaggaatgctgtgaaaaacctctgttggaaaaatcccactgcattgccgaagtggaaaatgatgagatgcctgctgacttggcttcattagctgctgattttgttgaaagtaaggatgtttgcaaaacttagcttaggccaaaggatggcttcctgggcctgtgttttgtttgaaatttcccagaagggttcctggttaacctttgngggctggttgtgtgaactttgccaaaactttttaaaccccctttagaaagggtggggcccttgggaacctcctttaatggtttgcccaaagggttgggggagatttacccctttttgggggagacccccaaatttatttaacccaaatttgggggttttttgggggcctctggaggacgaaatttccaagagccctctttgttttttcaccacacaaggacccccagggggaccccccccttttgtggggtgctaaaaaccctcgaaaatggggggcaatatgtgtatccttccgacatcgcccttgggaagacagctccccattgtgacatattctggggaacagcaccagcttttcctttggg

SEQ ID NO: 496831 - DNA, 1612 bp, Homo sapiens
ggaaagttctgatcaagaatacacaaagacacaagccaggtccccaccgcgcttggcgatgcatccatagcagccttggtgctgtggacactccctggggcccagcgaaggggagagtttgctcccaaaggcgcaccaatgaccaacatttgccccccggaggaaagaactggaaccagcctctgacctgtccaggtgccctgtccagctgactgcaaggacagagaggagtcctgcccagctcttggatcagtctgctggccgaggagcccggtggagccaggggtgaccctggagcccagcctgccccgaggaggccccggctcagagccatgccaggtgtctgtgatagggcccctgacttcctctccccgtctgaagaccaggtgctgaggcctgccttgggcagctcagtggctctgaactgcacggcttgggtagtctctgggccccactgctccctgccttcagtccagtggctgaaagacgggcttccattgggaattgggggccactacagcctccacgagtactcctggccctacaagccacgtggctgcggtgctggcctccctcctggtcctgctggccctgctgctggccgccctgctctatgtcaagtgccgtctcaacgtgctgctctggtaccaggacgcgtatggggaggtggagataaacgacgggaagctctacgacgcctacgtctcctacagcgactgccccgaggaccgcaagttcgtgaacttcatcctaaagccgcagctggagcggcgtcggggctacaagctcttcctggacgaccgcgacctcctgccgcgcgctgagccctccgccgacctcttggtgaacctgagccgctgccgacgcctcatcgtggtgctttcggacgccttcctgagccgggcctggtgcagccacagcttccgggagggcctgtgccggctgctggagctcacccgcagacccatcttcatcaccttcgagggccagaggcgcgaccccgcgcacccggcgctccgcctgctgcgccagcaccgccacctggtgaccttgctgctctggaggcccggctccgtgactccttcctccgatttttggaaagaagtgcagctggcgctgccgcggaaggtgcggtacaggccggtggaaggagacccccagacgcagctgcaggacgacaaggaccccatgctgattcttcgaggccgagtccctgagggccgggccctggactcagaggtggacccggaccctgagggcgacctgggtgtccgggggcctgtttttggagagccatcagctccaccgcacaccagtggggtctcgctgggagagagccggagcagcgaagtggacgtctcggatctcggctcgcgaaactacagtgcccgcacagacttctactgcctggtgtccaaggatgatatgtagctcccaccccagagtgcaggatcatagggacagcgggggccagggcagcggcgtcgctcctctgctcaacaggaccacaacccctgccagcagccctgggaccctgccagcagccctgggaaaaggctgtggcctcagggcgcctcccagtgccagaaaataaagtccttttggattctga

SEQ ID NO: 496832 - DNA, 1703 bp, Homo sapiens
  misc_feature (2)..(3): n is a, c, g, or t
  misc_feature (1200)..(1200): n is a, c, g, or t
  misc_feature (1235)..(1235): n is a, c, g, or t
  misc_feature (1284)..(1284): n is a, c, g, or t
  misc_feature (1291)..(1291): n is a, c, g, or t
  misc_feature (1312)..(1312): n is a, c, g, or t
  misc_feature (1354)..(1354): n is a, c, g, or t
  misc_feature (1373)..(1373): n is a, c, g, or t
  misc_feature (1385)..(1385): n is a, c, g, or t
  misc_feature (1397)..(1397): n is a, c, g, or t
  misc_feature (1441)..(1441): n is a, c, g, or t
  misc_feature (1444)..(1444): n is a, c, g, or t
  misc_feature (1447)..(1447): n is a, c, g, or t
  misc_feature (1455)..(1456): n is a, c, g, or t
anntcccctttcactgttgccgtagtgctagcttttctcttctgtcaaccccacacgcctttggcacaatgaagtgggtaacctttatttcccttctttttctctttagctcggcttattccaggggtgtgtttcgtcgagatgcacacaagagtgaggttgctcatcggtttaaagatttgggagaagaaaatttcaaagccttggtgttgattgcctttgctcagtatcttcagcagtgtccatttgaagatcatgtaaaattagtgaatgaagtaactgaatttgcaaaaacatgtgttgctgatgagtcagctgaaaattgtgacaaatcacttcataccctttttggagacaaattatgcacagttgcaactcttcgtgaaacctatggtgaaatggctgactgctgtgcaaaacaagaacctgagagaaatgaatgcttcttgcaacacaaagatgacaacccaaacctcccccgattggtgagaccagaggttgatgtgatgtgcactgcttttcatgacaatgaagagacatttttgaaaaaatacttatatgaaattgccagaagacatccttacttttatgccccggaactccttttctttgctaaaaggtataaagctgcttttacagaatgttgccaagctgctgataaagctgcctgcctgttgccaaagctcgatgaacttcgggatgaagggaaggcttcgtctgccaaacagagactcaagtgtgccagtctccaaaaatttggagaaagagctttcaaagcatgggcagtagctcgcctgagccagagatttcccaaagctgagtttgcagaagtttccaagttagtgacagatcttaccaaagtccacacggaatgctgccatggagatctgcttgaatgtgctgatgacagggcggaccttgccaagtatatctgtgaaaatcaagattcgatctccagtaaactgaaggaatgctgtgaaaaacctctgttggaaaaatcccactgcattgccgaagtggaaaatgatgagatgcctgctgacttggcttcattagctgctgattttgttgaaagtaaggatgtttgcgaaggcattctgagtactctgtcgtgctgctgctgagacttgccaagacatatgaaaccactctatagaagtgctgtgccgctgcagatactcatgaatgctatgccaaagngttcgatgaatttaaacctcttgtggaagagcctnagaatttaatcaaacaaaattgtgagctttttgagcagcttggagagtncaaattncagaatgcgctattagttcgntacaccaagaaagtgccccaagtgtcaacttcaactcttgtngaggtctcaagaaacctangaaaagtgggcngcaaatgttganaacattctggagcaaaaagatggcctgtgcacaagctatctatncgnggncctgccanntatgtgtgttgcctgagaaaacgccacgtagtgacagagtcaccaaatgctgtacagaatactttgtgaacacgcgaacatgcttttcagatctggaagtcgatgaaacatacgcttcccaagagagtaatgctgaaacattcacctttcatgcagatatatgcacactctctgtgaaggggagacacatcttgaaacacactgcgcttgttgagcttgtgaaacacaagcgccaggcgacatgcaa

SEQ ID NO: 496833 - DNA, 284 bp, Homo sapiens
tttagaactattgcgaggataagttatagatattttatctctccttgggagaactactcatccatttacgatagaagatacagctgaatttcttgtgtgttgttttagaagatgagaatcagataaaagagagttgcaaatctacattacaacccttgaagaaatgtgaggtaagccttaacaacatttgaataatttaaatggttactattagagaaggcttttttagtaacacaattggagtgccggggccaatgtgaatagagaaatgtgtgagagtagtg

SEQ ID NO: 496834 - DNA, 98 bp, Homo sapiens
gcatgttttgtgtatataaaagggggggtttttttaaaaatatattcccagattatccttgtaatgacccgaatttgcaataaaacccatcagggtta

SEQ ID NO: 496835 - DNA, 1578 bp, Homo sapiens
ggaaagttctgatcaagaatacacaaagacacaagccaggtccccaccgcgcttggcgatgcatccatagcagccttggtgctgtggacactccctggggcccagcgaaggggagagtttgctcccaaaggcgcaccaatgaccaacatttgccccccggaggaaagaactggaaccagcctctgacctgtccaggtgccctgtccagctgactgcaaggacagagaggagtcctgcccagctcttggatcagtctgctggccgaggagcccggtggagccaggggtgaccctggagcccagcctgccccgaggaggccccggctcagagccatgccaggtgtctgtgatagggcccctgacttcctctccccgtctgaagaccaggtgctgaggcctgccttgggcagctcagtggctctgaactgcacggcttgggtagtctctgggccccactgctccctgccttcagtccagtggctgaaagacgggcttccattgggaattgggggccactacagcctccacgagtactcctggccctacaagccacgtggctgcggtgctggcctccctcctggtcctgctggccctgctgctggccgccctgctctatgtcaagtgccgtctcaacgtgctgctctggtaccaggacgcgtatggggaggtggagataaacgcgactgccccgaggaccgcaagttcgtgaacttcatcctaaagccgcagctggagcggcgtcggggctacaagctcttcctggacgaccgcgacctcctgccgcgcgctgagccctccgccgacctcttggtgaacctgagccgctgccgacgcctcatcgtggtgctttcggacgccttcctgagccgggcctggtgcagccacagcttccgggagggcctgtgccggctgctggagctcacccgcagacccatcttcatcaccttcgagggccagaggcgcgaccccgcgcacccggcgctccgcctgctgcgccagcaccgccacctggtgaccttgctgctctggaggcccggctccgtgactccttcctccgatttttggaaagaagtgcagctggcgctgccgcggaaggtgcggtacaggccggtggaaggagacccccagacgcagctgcaggacgacaaggaccccatgctgattcttcgaggccgagtccctgagggccgggccctggactcagaggtggacccggaccctgagggcgacctgggtgtccgggggcctgtttttggagagccatcagctccaccgcacaccagtggggtctcgctgggagagagccggagcagcgaagtggacgtctcggatctcggctcgcgaaactacagtgcccgcacagacttctactgcctggtgtccaaggatgatatgtagctcccaccccagagtgcaggatcatagggacagcgggggccagggcagcggcgtcgctcctctgctcaacaggaccacaacccctgccagcagccctgggaccctgccagcagccctgggaaaaggctgtggcctcagggcgcctcccagtgccagaaaataaagtccttttggattctga

SEQ ID NO: 496836 - DNA, 1025 bp, Homo sapiens
  misc_feature (2)..(3): n is a, c, g, or t
anntcccctttcactgttgccgtagtgctagcttttctcttctgtcaaccccacacgcctttggcacaatgaagtgggtaacctttatttcccttctttttctctttagctcggcttattccaggggtgtgtttcgtcgagatgcacacaagagtgaggttgctcatcggtttaaagatttgggagaagaaaatttcaaagccttggtgttgattgcctttgctcagtatcttcagcagtgtccatttgaagatcatgtaaaattagtgaatgaagtaactgaatttgcaaaaacatgtgttgctgatgagtcagctgaaaattgtgacaaatcacttcataccctttttggagacaaattatgcacagttgcaactcttcgtgaaacctatggtgaaatggctgactgctgtgcaaaacaagaacctgagagaaatgaatgcttcttgcaacacaaagatgacaacccaaacctcccccgattggtgagaccagaggttgatgtgatgtgcactgcttttcatgacaatgaagagacatttttgaaaaaatacttatatgaaattgccagaagacatccttacttttatgccccggaactccttttctttgctaaaaggtataaagctgcttttacagaatgttgccaagctgctgataaagctgcctgcctgttgccaaagctcgatgaacttcgggatgaagggaaggcttcgtctgccaaacagagactcaagtgtgccagtctccaaaaatttggagaaagagctttcaaagcatgggcagtagctcgcctgagccagagatttcccaaagctgagtttgcagaagtttccaagttagtgacagatcttaccaaagtccacacggaatgctgccatggagatctgcttgaatgtgctgatgacagggcggaccttgccaagtatatctgtgaaaatcaagatttgaacttcatttagactgtaagtcttgagaacatcattattggaataatcggactatatttgcctaagttgtttgtt

SEQ ID NO: 496837 - DNA, 2133 bp, Homo sapiens
  misc_feature (1469)..(1469): n is a, c, g, or t
ggaaagttctgatcaagaatacacaaagacacaagccaggtccccaccgcgcttggcgatgcatccatagcagccttggtgctgtggacactccctggggcccagcgaaggggagagtttgctcccaaaggcgcaccaatgaccaacatttgccccccggaggaaagaactggaaccagcctctgacctgtccaggtgccctgtccagctgactgcaaggacagagaggagtcctgcccagctcttggatcagtctgctggccgaggagcccggtggagccaggggtgaccctggagcccagcctgccccgaggaggccccggctcagagccatgccaggtgtctgtgatagggcccctgacttcctctccccgtctgaagaccaggtgctgaggcctgccttgggcagctcagtggctctgaactgcacggcttgggtagtctctgggccccactgctccctgccttcagtccagtggctgaaagacgggcttccattgggaattgggggccactacagcctccacgagtactcctgggtcaaggccaacctgtcagaggtgcttgtgtccagtgtcctgggggtcaacgtgaccagcactgaagtctatggggccttcacctgctccatccagaacatcagcttctcctccttcactcttcagagagctggccctacaagccacgtggctgcggtgctggcctccctcctggtcctgctggccctgctgctggccgccctgctctatgtcaagtgccgtctcaacgtgctgctctggtaccaggacgcgtatggggaggtggagataaacgacgggaagctctacgacgcctacgtctcctacagcgactgccccgaggaccgcaagttcgtgaacttcatcctaaagccgcagctggagcggcgtcggggctacaagctcttcctggacgaccgcgacctcctgccgcgcgctgagccctccgccgacctcttggtgaacctgagccgctgccgacgcctcatcgtggtgctttcggacgccttcctgagccgggcctggtgcagccacagcttccgggagggcctgtgccggctgctggagctcacccgcagacccatcttcatcaccttcgagggccagaggcgcgaccccgcgcacccggcgctccgcctgctgcgccagcaccgccacctggtgaccttgctgctctggaggcccggctccgtgactccttcctccgatttttggaaagaagtgcagctggcgctgccgcggaaggtgcggtacaggccggtggaaggagacccccagacgcagctgcaggacgacaaggaccccatgctgattcttcgaggccgagtccctgagggccgggccctggactcagaggtggacccggaccctgagggcgacctgggtatgcccgcccagccccactccccaactggagaagctcagcacagggcggagtgggggcaggcacanggcacagggcctggaggggctccaggtgttgaggactcttcccggcaccgggagcccctgcacggcctctgccctggaggtgctcggccctcggtctgcctgggaacttcctgggcctcacaggccatcacagcagggggtgtccgggggcctgtttttggagagccatcagctccaccgcacaccagtggggtctcgctgggagagagccggagcagcgaagtggacgtctcggatctcggctcgcgaaactacagtgcccgcacagacttctactgcctggtgtccaaggatgatatgtagctcccaccccagagtgcaggatcatagggacagcgggggccagggcagcggcgtcgctcctctgctcaacaggaccacaacccctgccagcagccctgggaccctgccagcagccctgggaaaaggctgtggcctcagggcgcctcccagtgccagaaaataaagtccttttggattctgaaaaaaaaaaaaaactaaaaaaaaaaactccggggcctttttcgggggcggacaaacgggggtttggaaggggccatgggcaaagttttcctggacccgttttttttgccaaggggaaatcgggggcgcccctaatgggggcgatattcgaaaagccggttaacccgtttcgggaaaaggt

SEQ ID NO: 496838 - DNA, 1705 bp, Homo sapiens
  misc_feature (2)..(3): n is a, c, g, or t
  misc_feature (1062)..(1062): n is a, c, g, or t
  misc_feature (1073)..(1073): n is a, c, g, or t
  misc_feature (1079)..(1079): n is a, c, g, or t
  misc_feature (1202)..(1202): n is a, c, g, or t
  misc_feature (1237)..(1237): n is a, c, g, or t
  misc_feature (1286)..(1286): n is a, c, g, or t
  misc_feature (1293)..(1293): n is a, c, g, or t
  misc_feature (1314)..(1314): n is a, c, g, or t
  misc_feature (1356)..(1356): n is a, c, g, or t
  misc_feature (1375)..(1375): n is a, c, g, or t
  misc_feature (1387)..(1387): n is a, c, g, or t
  misc_feature (1399)..(1399): n is a, c, g, or t
  misc_feature (1443)..(1443): n is a, c, g, or t
  misc_feature (1446)..(1446): n is a, c, g, or t
  misc_feature (1449)..(1449): n is a, c, g, or t
  misc_feature (1457)..(1458): n is a, c, g, or t
anntcccctttcactgttgccgtagtgctagcttttctcttctgtcaaccccacacgcctttggcacaatgaagtgggtaacctttatttcccttctttttctctttagctcggcttattccaggggtgtgtttcgtcgagatgcacacaagagtgaggttgctcatcggtttaaagatttgggagaagaaaatttcaaagccttggtgttgattgcctttgctcagtatcttcagcagtgtccatttgaagatcatgtaaaattagtgaatgaagtaactgaatttgcaaaaacatgtgttgctgatgagtcagctgaaaattgtgacaaatcacttcataccctttttggagacaaattatgcacagttgcaactcttcgtgaaacctatggtgaaatggctgactgctgtgcaaaacaagaacctgagagaaatgaatgcttcttgcaacacaaagatgacaacccaaacctcccccgattggtgagaccagaggttgatgtgatgtgcactgcttttcatgacaatgaagagacatttttgaaaaaatacttatatgaaattgccagaagacatccttacttttatgccccggaactccttttctttgctaaaaggtataaagctgcttttacagaatgttgccaagctgctgataaagctgcctgcctgttgccaaagctcgatgaacttcgggatgaagggaaggcttcgtctgccaaacagagactcaagtgtgccagtctcatttcccaaagctgagtttgcagaagtttccaagttagtgacagatcttaccaaagtccacacggaatgctgccatggagatctgcttgaatgtgctgatgacagggcggaccttgccaagtatatctgtgaaaatcaagattcgatctccagtaaactgaaggaatgctgtgaaaaacctctgttggaaaaatcccactgcattgccgaagtggaaaatgatgagatgcctgctgacttggcttcattagctgctgattttgttgaaagtaaggatgtttgcgaaaactatgctgaggcacaggatgtgttnctgggcatgtntttgtntgaatatgcacgaaggcattctgagtactctgtcgtgctgctgctgagacttgccaagacatatgaaaccactctatagaagtgctgtgccgctgcagatactcatgaatgctatgccaaagngttcgatgaatttaaacctcttgtggaagagcctnagaatttaatcaaacaaaattgtgagctttttgagcagcttggagagtncaaattncagaatgcgctattagttcgntacaccaagaaagtgccccaagtgtcaacttcaactcttgtngaggtctcaagaaacctangaaaagtgggcngcaaatgttganaacattctggagcaaaaagatggcctgtgcacaagctatctatncgnggncctgccanntatgtgtgttgcctgagaaaacgccacgtagtgacagagtcaccaaatgctgtacagaatactttgtgaacacgcgaacatgcttttcagatctggaagtcgatgaaacatacgcttcccaagagagtaatgctgaaacattcacctttcatgcagatatatgcacactctctgtgaaggggagacacatcttgaaacacactgcgcttgttgagcttgtgaaacacaagcgccaggcgacatgcaa

SEQ ID NO: 496839 - DNA, 1369 bp, Homo sapiens
gagagttggttgtgtgttttgataagagtaagtgtggtggtactaaatctctattgtttgtagatttgcgatatgggtgttgtagatgaaagagggaatggttgtaaaattgttctgtcagaggaataatgtggggcatgataatagttggggtgtgttataaaggggtctgttgtagtagtatgtattaattcctatggctgtttatactattcttgtggattggcggcttaagacttgtgtgattatgaataactccttagtgtatgactcttcttgcggggaaaatgtctctaatgtgtgttgagagccggggtttgcccaatatctcccaactggggtgattatggatgtgccagcggaacttcttctgccgtgataattgtgggtattttactgccccggggtataatattctgccccccgtcgtagggcttccgacacaggagagtcactccacacgttttccacatcgtagattggaatcgttgttagagttgcgggttttccgttggggtggaatagcccacggttgttcccggtgtcccatcccccaagtgtgggggcggggcgtaatcttcggtcacattaatggagacgtctgccccgctgtagcaacggggttcttgcaaaatatgaagttgtagattgcggtggtgataatctcgctcacgatatagagctcagctctgggcgttcattctctcggggaaagctttgttgaagaagaaatagagatcactttggtgctgtatcgaataatgggggcgaccaatatgtgccccgcgagaaatggttgtctgtcgctaatcgggggtctcttggttatttgtggagctctctcacgtggcctttgtccacacatcgtgttaccctatatagcacacatgtctggtgaccacgggtacaccccacgttatagccgcgagagagtgtagatgtcctgataatactccgccatgggcgcgcagagatccacacagcccacgcggagattggagagaggttttgtggagaaaggtgcactgttctcctgtaaacgcgcacatgagagtgagacgctcgccgtggacaaagagagaacttagaattgtctctctgtgtaagtctcgaaagagaacacttcttcaccacgtgggaaaccccacgggttctatttcctacggctcctagcacctgagaaacatgcaaaatgcacaagccactttgaagtgccctttcttgagaattttaagccccaatatgagcacactggccactttttgtaaacgaggagcccccacggcctttttcactaagactttgtattcaacttagtttaaagtagatttgccattagcttttttgtaaaataaaagcacaggacaga

SEQ ID NO: 496840 - DNA, 1465 bp, Homo sapiens
cggcacgagggttgccgctgcgcacctggctcaggtgagctgccccgcccccgcccggcgcgagccccaggtcctggcagcagcctctgacctgtccaggtgccctgtccagctgactgcaaggacagagaggagtcctgcccagctcttggatcagtctgctggccgaggagcccggtggagccaggggtgaccctggagcccagcctgccccgaggaggccccggctcagagccatgccaggtgtctgtgatagggcccctgacttcctctccccgtctgaagaccaggtgctgaggcctgccttgggcagctcagtggctctgaactgcacggcttgggtagtctctgggccccactgctccctgccttcagtccagtggctgaaagacgggcttccattgggaattgggggccactacagcctccacgagtactcctgggtcaaggccaacctgtcagaggtgcttgtgtccagtgtcctgggggtcaacgtgaccagcactgaagtctatggggccttcacctgctccatccagaacatcagcttctcctccttcactcttcagagagctggccctacaagccacgtggctgcggtgctggcctccctcctggtcctgctggccctgctgctggccgccctgctctatgtcaagtgccgtctcaacgtgctgctctggtaccaggacgcgtatggggaggtggagataaacgcgactgccccgaggaccgcaagttcgtgaacttcatcctaaagccgcagctggagcggcgtcggggctacaagctcttcctggacgaccgcgacctcctgccgcgcgctgagccctccgccgacctcttggtgaacctgagccgctgccgacgcctcatcgtggtgctttcggacgccttcctgagccgggcctggtgcagccacagcttccgactccttcctccgatttttggaaagaagtgcagctggcgctgccgcggaaggtgcggtacaggccggtggaaggagacccccagacgcagctgcaggacgacaaggaccccatgctgattcttcgaggccgagtccctgagggccgggccctggactcagaggtggacccggaccctgagggcgacctgggtgtccgggggcctgtttttggagagccatcagctccaccgcacaccagtggggtctcgctgggagagagccggagcagcgaagtggacgtctcggatctcggctcgcgaaactacagtgcccgcacagacttctactgcctggtgtccaaggatgatatgtagctcccaccccagagtgcaggatcatagggacagcgggggccagggcagcggcgtcgctcctctgctcaacaggaccacaacccctgccagcagccctgggaccctgccagcagccctgggaaaaggctgtggcctcagggcgcctcccagtgccagaaaataaagtccttttggattctga

SEQ ID NO: 496841 - DNA, 1769 bp, Homo sapiens
  misc_feature (1126)..(1126): n is a, c, g, or t
  misc_feature (1137)..(1137): n is a, c, g, or t
  misc_feature (1143)..(1143): n is a, c, g, or t
  misc_feature (1266)..(1266): n is a, c, g, or t
  misc_feature (1301)..(1301): n is a, c, g, or t
  misc_feature (1350)..(1350): n is a, c, g, or t
  misc_feature (1357)..(1357): n is a, c, g, or t
  misc_feature (1378)..(1378): n is a, c, g, or t
  misc_feature (1420)..(1420): n is a, c, g, or t
  misc_feature (1439)..(1439): n is a, c, g, or t
  misc_feature (1451)..(1451): n is a, c, g, or t
  misc_feature (1463)..(1463): n is a, c, g, or t
  misc_feature (1507)..(1507): n is a, c, g, or t
  misc_feature (1510)..(1510): n is a, c, g, or t
  misc_feature (1513)..(1513): n is a, c, g, or t
  misc_feature (1521)..(1522): n is a, c, g, or t
aggcccctctttgtttttttctctctcttcttgtggcgaattccggaccaggtcaaccccacacgcctttggcacaatgaagtgggtaacctttatttcccttctttttctctttagctcggcttattccaggggtgtgtttcgtcgagatgcacacaagagtgaggttgctcatcggtttaaagatttgggagaagaaaatttcaaagccttggtgttgattgcctttgctcagtatcttcagcagtgtccatttgaagatcatgtaaaattagtgaatgaagtaactgaatttgcaaaaacatgtgttgctgatgagtcagctgaaaattgtgacaaatcacttcataccctttttggagacaaattatgcacagttgcaactcttcgtgaaacctatggtgaaatggctgactgctgtgcaaaacaagaacctgagagaaatgaatgcttcttgcaacacaaagatgacaacccaaacctcccccgattggtgagaccagaggttgatgtgatgtgcactgcttttcatgacaatgaagagacatttttgaaaaaatacttatatgaaattgccagaagacatccttacttttatgccccggaactccttttctttgctaaaaggtataaagctgcttttacagaatgttgccaagctgctgataaagctgcctgcctgttgccaaagctcgatgaacttcgggatgaagggaaggcttcgtctgccaaacagagactcaagtgtgccagtctccaaaaatttggagaaagagctttcaaagcatgggcagtagctcgcctgagccagagatttcccaaagctgagtttgcagaagtttccaagttagtgacagatcttaccaaagtccacacggaatgctgccatggagatctgcttgaatgtgctgatgacagggcggaccttgccaagtatatctgtgaaaatcaagattcgatctccagtaaactgaaggaatgctgtgaaaaacctctgttggaaaaatcccactgcattgccgaagtggaaaatgatgagatgcctgctgacttggcttcattagctgctgattttgttgaaagtaaggatgtttgcgaaaactatgctgaggcacaggatgtgttnctgggcatgtntttgtntgaatatgcacgaaggcattctgagtactctgtcgtgctgctgctgagacttgccaagacatatgaaaccactctatagaagtgctgtgccgctgcagatactcatgaatgctatgccaaagngttcgatgaatttaaacctcttgtggaagagcctnagaatttaatcaaacaaaattgtgagctttttgagcagcttggagagtncaaattncagaatgcgctattagttcgntacaccaagaaagtgccccaagtgtcaacttcaactcttgtngaggtctcaagaaacctangaaaagtgggcngcaaatgttganaacattctggagcaaaaagatggcctgtgcacaagctatctatncgnggncctgccanntatgtgtgttgcctgagaaaacgccacgtagtgacagagtcaccaaatgctgtacagaatactttgtgaacacgcgaacatgcttttcagatctggaagtcgatgaaacatacgcttcccaagagagtaatgctgaaacattcacctttcatgcagatatatgcacactctctgtgaaggggagacacatcttgaaacacactgcgcttgttgagcttgtgaaacacaagcgccaggcgacatgcaa

SEQ ID NO: 496842 - DNA, 1332 bp, Homo sapiens
  misc_feature (973)..(973): n is a, c, g, or t
  misc_feature (975)..(975): n is a, c, g, or t
ggaaagttctgatcaagaatacacaaagacacaagccaggtccccaccgcgcttggcgatgcatccatagcagccttggtgctgtggacactccctggggcccagcgaaggggagagtttgctcccaaaggcgcaccaatgaccaacatttgccccccggaggaaagaactggaaccagcctctgacctgtccaggtgccctgtccagctgactgcaaggacagagaggagtcctgcccagctcttggatcagtctgctggccgaggagcccggtggagccaggggtgaccctggagcccagcctgccccgaggaggccccggctcagagccatgccaggtgtctgtgatagggcccctgacttcctctccccgtctgaagaccaggtgctgaggcctgccttgggcagctcagtggctctgaactgcacggcttgggtagtctctgggccccactgctccctgccttcagtccagtggctgaaagacgggcttccattgggaattgggggccactacagcctccacgagtactcctgggtcaaggccaacctgtcagaggtgcttgtgtccagtgtcctgggggtcaacgtgaccagcactgaagtctatggggccttcacctgctccatccagaacatcagcttctcctccttcactcttcagagagctggccctacaagccacgtggctgcggtgctggcctccctcctggtcctgctggccctgctgctggccgccctgctctatgtcaagtgccgtctcaacgtgctgctccagggcacgtctttccagaattcaaagagagcgatgccatgtttgctgccgagagagtgagtgtgggcggccgccaggggttctggagtcgggctgctcaggaagcgtgaaggggagtgctgggagcccggcttgtttgagggttggtggctgagctctcgtctgtctgggacctgaggatgcctgtgtgtcctggncngagcgtacagctgtctctgcagggcgaggtggagacgtggcttgagggcctttagagtggctagggggctcgggaaaggaaaacaagcacctttgatgaggaaggaagtcccttcctcaggcctcggcagcttcaccccaggccacgccgctgggaagggccgcccggggcattgctctcgctcgtgctggggtcctctctgggtccgttgccttctgtggggcaggggaggctctgtgcctctggggctggtggggcgggaagcgtgtggtcctgactgctgcccctcctcaggccccagactgggtggacgctgaggaatgccaccgctgcagggtgcagttcggggtgatgacc

SEQ ID NO: 496843 - DNA, 1704 bp, Homo sapiens
  misc_feature (2)..(3): n is a, c, g, or t
  misc_feature (1061)..(1061): n is a, c, g, or t
  misc_feature (1072)..(1072): n is a, c, g, or t
  misc_feature (1078)..(1078): n is a, c, g, or t
  misc_feature (1201)..(1201): n is a, c, g, or t
  misc_feature (1236)..(1236): n is a, c, g, or t
  misc_feature (1285)..(1285): n is a, c, g, or t
  misc_feature (1292)..(1292): n is a, c, g, or t
  misc_feature (1313)..(1313): n is a, c, g, or t
  misc_feature (1355)..(1355): n is a, c, g, or t
  misc_feature (1374)..(1374): n is a, c, g, or t
  misc_feature (1386)..(1386): n is a, c, g, or t
  misc_feature (1398)..(1398): n is a, c, g, or t
  misc_feature (1442)..(1442): n is a, c, g, or t
  misc_feature (1445)..(1445): n is a, c, g, or t
  misc_feature (1448)..(1448): n is a, c, g, or t
  misc_feature (1456)..(1457): n is a, c, g, or t
anntcccctttcactgttgccgtagtgctagcttttctcttctgtcaaccccacacgcctttggcacaatgaagtgggtaacctttatttcccttctttttctctttagctcggcttattccaggggtgtgtttcgtcgagatgcacacaagagtgaggttgctcatcggtttaaagatttgggagaagaaaatttcaaagccttggtgttgattgcctttgctcagtatcttcagcagtgtccatttgaagatcatgtaaaattagtgaatgaagtaactgaatttgcaaaaacatgtgttgctgatgagtcagctgaaaattgtgacaaatcacttcataccctttttggagacaaattatgcacagttgcaactcttcgtgaaacctatggtgaaatggctgactgctgtgcaaaacaagaacctgagagaaatgaatgcttcttgcaacacaaagatgacaacccaaacctcccccgattggtgagaccagaggttgatgtgatgtgcactgcttttcatgacaatgaagagacatttttgaaaaaatacttatatgaaattgccagaagacatccttacttttatgccccggaactccttttctttgctctgttgccaaagctcgatgaacttcgggatgaagggaaggcttcgtctgccaaacagagactcaagtgtgccagtctccaaaaatttggagaaagagctttcaaagcatgggcagtagctcgcctgagccagagatttcccaaagctgagtttgcagaagtttccaagttagtgacagatcttaccaaagtccacacggaatgctgccatggagatctgcttgaatgtgctgatgacagggcggaccttgccaagtatatctgtgaaaatcaagattcgatctccagtaaactgaaggaatgctgtgaaaaacctctgttggaaaaatcccactgcattgccgaagtggaaaatgatgagatgcctgctgacttggcttcattagctgctgattttgttgaaagtaaggatgtttgcgaaaactatgctgaggcacaggatgtgttnctgggcatgtntttgtntgaatatgcacgaaggcattctgagtactctgtcgtgctgctgctgagacttgccaagacatatgaaaccactctatagaagtgctgtgccgctgcagatactcatgaatgctatgccaaagngttcgatgaatttaaacctcttgtggaagagcctnagaatttaatcaaacaaaattgtgagctttttgagcagcttggagagtncaaattncagaatgcgctattagttcgntacaccaagaaagtgccccaagtgtcaacttcaactcttgtngaggtctcaagaaacctangaaaagtgggcngcaaatgttganaacattctggagcaaaaagatggcctgtgcacaagctatctatncgnggncctgccanntatgtgtgttgcctgagaaaacgccacgtagtgacagagtcaccaaatgctgtacagaatactttgtgaacacgcgaacatgcttttcagatctggaagtcgatgaaacatacgcttcccaagagagtaatgctgaaacattcacctttcatgcagatatatgcacactctctgtgaaggggagacacatcttgaaacacactgcgcttgttgagcttgtgaaacacaagcgccaggcgacatgcaa

SEQ ID NO: 496844 - DNA, 854 bp, Homo sapiens
catcaatcgcccacatcactcgagacgtaaattatggctgaatcatccgctaccttcacgccaaatggcgcctcaatattctttatctgcctcttcctacacatgagggaggcctatatacgggatcatttctctactcagaaaccgtgaaacatcggcattatcctcctgctggcaaactatagcaacagccttcataggctaatgtcctcccgtgagcgccaaatatcattctgagggggccacagtaaattccaacattactatccgcatcccatacatggggacagaccttagtccaaatgaatctgaggaggctacctcaagtagaacaagtcccaccattcaacaggattcatttaccctttgagttcatctgtgcctttcattatggcagcctagaagaatccacctcctattctggcaacgaaaacgggatcaaaacagcccctaggaatcacctcccatcggataaaaatcacccttccacccttattacacaactcaaagacgccctcggataagtttctgctaccattcgctccttaaatggacgttaacatgtaatctcacacagaccctcccataggggaccccagacagattatacccctaagacaaagccctttaaaaaacgccctccccaaattaaagccggagtgattatttgcctattcccgcctaaacaaattcttccgatcggcctaacaagctaggagggggtcttgccgtattaataatcgatctgatcctagaataatcccaatctccatattccaaagaagaaggttatattgggccatagacaatatttatggcatctagggagactctattaaccggatgggaacacg

SEQ ID NO: 496845 - DNA, 1587 bp, Homo sapiens
  misc_feature (2)..(3): n is a, c, g, or t
  misc_feature (944)..(944): n is a, c, g, or t
  misc_feature (955)..(955): n is a, c, g, or t
  misc_feature (961)..(961): n is a, c, g, or t
  misc_feature (1084)..(1084): n is a, c, g, or t
  misc_feature (1119)..(1119): n is a, c, g, or t
  misc_feature (1168)..(1168): n is a, c, g, or t
  misc_feature (1175)..(1175): n is a, c, g, or t
  misc_feature (1196)..(1196): n is a, c, g, or t
  misc_feature (1238)..(1238): n is a, c, g, or t
  misc_feature (1257)..(1257): n is a, c, g, or t
  misc_feature (1269)..(1269): n is a, c, g, or t
  misc_feature (1281)..(1281): n is a, c, g, or t
  misc_feature (1325)..(1325): n is a, c, g, or t
  misc_feature (1328)..(1328): n is a, c, g, or t
  misc_feature (1331)..(1331): n is a, c, g, or t
  misc_feature (1339)..(1340): n is a, c, g, or t
anntcccctttcactgttgccgtagtgctagcttttctcttctgtcaaccccacacgcctttggcacaatgaagtgggtaacctttatttcccttctttttctctttagctcggcttattccaggggtgtgtttcgtcgagatgcacacaagagtgaggttgctcatcggtttaaagatttgggagaagaaaatttcaaagccttggtgttgattgcctttgctcagtatcttcagcagtgtccatttgaagatcatgtaaaattagtgaatgaagtaactgaatttgcaaaaacatgtgttgctgatgagtcagctgaaaattgtgacaaatcacttcataccctttttggagacaaattatgcacagttgcaactcttcgtgaaacctatggtgaaatggctgactgctgtgcaaaacaagaacctgagagaaatgaatgcttcttgcaacacaaagatgacaacccaaacctcccccgattggtgagaccagaggttgatgtgatgtgcactgcttttcatgacaatgaagagacatttttgaaaaaatacttatatgaaattgccagaagacaaaaatttggagaaagagctttcaaagcatgggcagtagctcgcctgagccagagatttcccaaagctgagtttgcagaagtttccaagttagtgacagatcttaccaaagtccacacggaatgctgccatggagatctgcttgaatgtgctgatgacagggcggaccttgccaagtatatctgtgaaaatcaagattcgatctccagtaaactgaaggaatgctgtgaaaaacctctgttggaaaaatcccactgcattgccgaagtggaaaatgatgagatgcctgctgacttggcttcattagctgctgattttgttgaaagtaaggatgtttgcgaaaactatgctgaggcacaggatgtgttnctgggcatgtntttgtntgaatatgcacgaaggcattctgagtactctgtcgtgctgctgctgagacttgccaagacatatgaaaccactctatagaagtgctgtgccgctgcagatactcatgaatgctatgccaaagngttcgatgaatttaaacctcttgtggaagagcctnagaatttaatcaaacaaaattgtgagctttttgagcagcttggagagtncaaattncagaatgcgctattagttcgntacaccaagaaagtgccccaagtgtcaacttcaactcttgtngaggtctcaagaaacctangaaaagtgggcngcaaatgttganaacattctggagcaaaaagatggcctgtgcacaagctatctatncgnggncctgccanntatgtgtgttgcctgagaaaacgccacgtagtgacagagtcaccaaatgctgtacagaatactttgtgaacacgcgaacatgcttttcagatctggaagtcgatgaaacatacgcttcccaagagagtaatgctgaaacattcacctttcatgcagatatatgcacactctctgtgaaggggagacacatcttgaaacacactgcgcttgttgagcttgtgaaacacaagcgccaggcgacatgcaa

SEQ ID NO: 496846 - DNA, 819 bp, Homo sapiens
ggtttgtttcgcatctacacaccagcgatggacggtccctgcaaatctgcaagggacccagtctccagctgagtttcaggtccaggaacacagcctgttagaaacgtccaagacacgtcccaaggataagaagaaaaatggagagctacagagcctaagacaatgggagttgcacgaatcgaaaactattactatcagaagcatttcccagccaccaaaaggaaaatgaaaacggaacgtgactttaaccactcaccagatggagactgtgattattaaagaaatcacaggtttcgcctcttgcaatctgcatctggtgagtgagtgaaggtgaccgcgtggagctggagagctttcttaggactggagcgcccctcaccccaaacctgtttcccgtgcgtgatgatgacttcacgaaacgcggtttcagttctaacctcagcattccactgtcggggatcctggcactgcgagccccgctgctcgatctggtgtcatcaccgggcagctagtcttgtatgtaagacaccagtgtcatgtatattaacgaaatacactaacaaaggttcggatggacgatatccatacaaaatcatcgtaaaggccagcctcagaaagcagaagtcccgggaccggtgctcccccggagggcagctgccgcccctgagcaaactgcttgcgggtctcacttccaacaccccggggattctgacatgcacacgggtgtgtcatccaggaacaggtgcggaatcaaggcgggcgctgaatcaggccgactcggagcactgcagcgacatgaccactaacacgtacccaaac

SEQ ID NO: 496847 - DNA, 149 bp, Homo sapiens
  misc_feature (67)..(67): n is a, c, g, or t
tacagtctgttaagatgttatcgggaccggcatcatgaggtgaaaggatacttgtaatgcagggatntctaacggtgccgggcgccatgatcgtgacactgcatccagcctgggtgacagaacgagaccctgtcaaacaaaaaaaaaaa

SEQ ID NO: 496848 - DNA, 568 bp, Homo sapiens
agcggatcgccaagaaaggtgggaagagaatttaggagggctccgatcctcccactgggcatcgggtgtgaaactggtgctgcctaacgcgctgggagtcacctggggaagcggggctgggcccaccatggtccaccctctctggccgctaaggcagagaaggaacgcagccaccctcgctcatggtgctcccccgcccgcctgaccctcgagaaggaggactgagagcctgaagggctgtgagctgtacgtgccaggtgcacgggatccagcaggttctcaaagactgtatcgtgcacctcttgcattctccaagccctgaacgccgccatgaagttcctccgggagcacttcgagaagctggagaatggaagaaaacaggcagattttggcgcgggcacaaagtcaatagctcacagtcgagactccccatgaatgcggaggtggtcgcacaggccccacacgaacgactggggcgaagaacgcgcccgcgggagagaaagcgcgtgactgccggagcgagaacaccgacagaagaagccgtgagctacgtccagaaagggaacca

SEQ ID NO: 496849 - DNA, 229 bp, Homo sapiens
gttgtgctgcggtgttatagaggatccccggttgtagttgttctagttggatatatattaaaggatataactaatatgagtatgttgaagagatatctgtactactatgttcattgcagcattattcacaatagctaagatatgaaatcaacctaagtgttttcattcattgatggatgaatggtgaaagaaaatgtggcgtacatacacaatagaacaactacaaccg

SEQ ID NO: 496850 - DNA, 521 bp, Homo sapiens
attttgatagtactcatttaactgtctcctccttcccctaaggaaacgtttacatgagtaagctttcagggcatctgaaattagcacctatttgttttaaaatgtaggtgaaaacttctttatttaattttaaactacttaagtgacaatagaagcagtgaaactacggattttgtgtccatctcatctagctcctttgtcattttgtagtgttgacagatctttccatcagtgtcacttctgcttgtaatctgctttatgtttacacagatctctaaatcagtgtgcctacgggttctaacctttcctacaaagtataaaccaccacaagcttcaacactgaagatgggctttctgcatgggctctatggtgttaattaatctcccctctttggtttctgtctgggttttacatctgtgttcagccgatgtggatcttttctgtgtataattttaatgttttagtcagtgtccactttatgaatcactcttagatattaaaaaaataccttgctttacaa

SEQ ID NO: 496851 - DNA, 329 bp, Homo sapiens
  misc_feature (166)..(166): n is a, c, g, or t
caaaaaacccccccccccccttgggggaaagaggcccggccctttgtttaaatcctgccccttgaaaaccaacccttatttgccaaaaccccccccagcctttaacgggccttttgaaaggaccccctgaaaatttttttttggttggttggtttaaaccaacccnggggggggggaccggaaccccccccccccattgggggttttgggaaagccagccctctttaaattgggaattgggttttttttttaaagggggaaccccgtttttttttttcccaaggggaccggggcccctttggtttttaaaaaaaccggtttccctccca

SEQ ID NO: 496852 - DNA, 166 bp, Homo sapiens
gtgtgtggcagccgccaggttgccctgggcgtcacggccaccgcgccgaccgtgccgaacttcttgtcggcatccagcggatcggccggtgcgggctggccgcgcgcgaccatggcctggccgtcgtgatccagcacggcggcttccggcgtttcgcgggtaccga

SEQ ID NO: 496853 - DNA, 237 bp, Homo sapiens
gtccagtgaggacctttggctggattgtctcacgctgagtcgggtcctgtacgtgccaggtcccccctaaggactcagatcagaatccgaggtggacactttccaggtcagggctgcggccctgtgatgggcctacttttcaatcaggcctccctccttgtagcttgaagctagaagaacttctcccgggtcgctggcacagcaggccgtagctcgcctgtccagggggagttcgta

SEQ ID NO: 496854 - DNA, 580 bp, Homo sapiens
  misc_feature (1)..(1): n is a, c, g, or t
  misc_feature (98)..(98): n is a, c, g, or t
  misc_feature (115)..(115): n is a, c, g, or t
  misc_feature (158)..(158): n is a, c, g, or t
  misc_feature (238)..(238): n is a, c, g, or t
ngccaggggtgtgttgtggcgccaaaccggggtttttcaagtgtgttccctccccccctttcccccataggggtgggggggtggggggggtttttatnccagagcctttttgtanccgccgttgctggggacgccccccgttgtttttgcccctttanaacaccggggcccgttccccccccgggtttttttttggggcgcggggggggtaccaattttcccccgggaaccccttttnccctttgggcctttttggggccccctttaaccccgttttttccaaaaaaccggggggggcccggccgggttttcccgggtttttttgccccccggggtcccccccggggtcccccccggggtcccccccggggcccccggtttttttaaggggtttttttgggggggaattttcaccccacccccccccccttcccccgggggttttaaaattttgggggggggggcccccctccccctaggggggggggtttttttttgggggcccggggtttttttccccgggtgggggttttttttttttcccccccggggccctttaggccccctttttgccccccca

SEQ ID NO: 496855 - DNA, 321 bp, Homo sapiens
  misc_feature (241)..(241): n is a, c, g, or t
  misc_feature (266)..(266): n is a, c, g, or t
aaaccctgtctctactaaaactacaaaaaactagccgagcgtggtggcagcgcctgtagtcccagctactcaggaggctgaggcaggagaatggcgtgaacctgggaggcagagcttgcagtgagtggagattgcatcactacactctagcctgggcgacaaagcgagagtctgtctcaaaaaaaaataaaaaaataaagatgtttgtcatctttttgctaaataaataattaaaaacctnaatgtattttgtgctgcaaatttgncaacagcaagaagggtggaaaaggcttttaccccacaagatggggggaaacattt

SEQ ID NO: 496856 - DNA, 859 bp, Homo sapiens
  misc_feature (186)..(186): n is a, c, g, or t
cttcctgacagagtcgtacagttccagccaggacggggatcaccacgctgcacattgtctgtgcgtcgtccagagtgtcctgtaattgacctcggtggcattaccgatgacgtatgacactacgggaggactatgatagcgtgtcgttcaatgcagctatgtcgcaaagattgttaggcccaagtnaaactacgacaattagctgccagaggttgtgcgagtcagccgtatacgatgtagccaagaccttggggaagcgtcaactctaggcccctgtgagcaggtgccttgagaagagcttgtgcacgcggacgtgctggctggtgaaagagacgcatagatgctggtgctagactggcgtgacccttgtgggcgcttcgccgagcactagagtgtgcagcaaccccgacgttacactcagagagtagacgatccaggcaagtttagctagcaccaaatattgcccgcatccgcttgaccatagcgtcacgaaggcgtcagagagaaagctgcgcagtgacctggggtcgttgtggagcccacaaagcgcttggatccatgaagtcgcacgatcccatcgcgtatatgaaatggttcgaaacaagagttccccaccgtgacgaatccctggcggaacttactcgttgaattacgaggataggccattgcgcagaacacatgattatggcccgcaagaccacttatcggggacattgaacaagggcatctttcaaggaaccaggaagccgtggcttgttgggctcgacgcaattttcccttgcacattcctttttacccagaggttccacccgaatacttcaacccacccagaagttcttcgggaggtaaaggaatccac

SEQ ID NO: 496857 - DNA, 869 bp, Homo sapiens
ggcacagaattcaattctgtggcgtcctctggtgttgagtggtgcggcctagtgtgtggtgtgcggaggagctccaggcccgtcggcgcttgagtggtctcacgtgtgaagacatggcgtacagatgggcatgggaagtatgtagatccatcaatctgtggagatagcttgagtgtgtctatcagaggatagagtgtaagctgtggacctttgtcagcaagaccatttctcatcagcccggcgttttccataatggaggtgaagtgtctgtgtgccagaaagtcaccgttcaggggaggtgacattacggagttataatttctggagataccatggacctggaagacaaccaacatttggagaccttcatcaaacagaattaggcccctctggtgctggctgccacgtgggcatcaatcagaatggcacaggcaagtctgtccaagaagccagctcttccagcagtggccccatcagaatatccctaagaggacagatgtgaagagccaggatgtggcgtacccccgcaggcagaaaccaggctcaaagagctatgtcgacaggcaccatggaatccttgagtcaagccaaaagttccgcgtacggacacaactccacggggtcaatactaacgtagcagggcaaccccaaaatcagggcaacccccaacaaaaagtggatacacagacacggcccgcacgacagcactcaccagatgaagagtggccccgggcatcacaccgcggaaacccgcaacagctctcgcacgaggaatcgagaccaggacaagcaccagaggagagagaggaccatacgaagggaacgaacggacccaaaaagccacgaccaagaagcggacgaaaatacca

SEQ ID NO: 496858 - DNA, 896 bp, Homo sapiens
  misc_feature (31)..(31): n is a, c, g, or t
  misc_feature (280)..(280): n is a, c, g, or t
  misc_feature (290)..(290): n is a, c, g, or t
  misc_feature (302)..(302): n is a, c, g, or t
  misc_feature (312)..(312): n is a, c, g, or t
  misc_feature (322)..(322): n is a, c, g, or t
  misc_feature (331)..(331): n is a, c, g, or t
  misc_feature (343)..(343): n is a, c, g, or t
  misc_feature (355)..(355): n is a, c, g, or t
  misc_feature (359)..(359): n is a, c, g, or t
  misc_feature (368)..(369): n is a, c, g, or t
  misc_feature (371)..(371): n is a, c, g, or t
  misc_feature (377)..(377): n is a, c, g, or t
  misc_feature (379)..(379): n is a, c, g, or t
  misc_feature (383)..(383): n is a, c, g, or t
  misc_feature (393)..(393): n is a, c, g, or t
  misc_feature (397)..(397): n is a, c, g, or t
  misc_feature (403)..(403): n is a, c, g, or t
  misc_feature (424)..(424): n is a, c, g, or t
  misc_feature (428)..(428): n is a, c, g, or t
  misc_feature (431)..(431): n is a, c, g, or t
  misc_feature (433)..(433): n is a, c, g, or t
  misc_feature (446)..(446): n is a, c, g, or t
  misc_feature (460)..(460): n is a, c, g, or t
  misc_feature (462)..(462): n is a, c, g, or t
  misc_feature (469)..(469): n is a, c, g, or t
  misc_feature (473)..(473): n is a, c, g, or t
  misc_feature (480)..(480): n is a, c, g, or t
  misc_feature (491)..(491): n is a, c, g, or t
  misc_feature (508)..(508): n is a, c, g, or t
  misc_feature (514)..(514): n is a, c, g, or t
  misc_feature (516)..(516): n is a, c, g, or t
  misc_feature (521)..(521): n is a, c, g, or t
  misc_feature (536)..(536): n is a, c, g, or t
  misc_feature (540)..(540): n is a, c, g, or t
  misc_feature (547)..(547): n is a, c, g, or t
  misc_feature (566)..(566): n is a, c, g, or t
  misc_feature (575)..(575): n is a, c, g, or t
  misc_feature (578)..(578): n is a, c, g, or t
  misc_feature (585)..(585): n is a, c, g, or t
  misc_feature (590)..(590): n is a, c, g, or t
  misc_feature (625)..(625): n is a, c, g, or t
  misc_feature (631)..(631): n is a, c, g, or t
  misc_feature (638)..(638): n is a, c, g, or t
  misc_feature (646)..(646): n is a, c, g, or t
  misc_feature (649)..(649): n is a, c, g, or t
  misc_feature (671)..(671): n is a, c, g, or t
  misc_feature (675)..(675): n is a, c, g, or t
  misc_feature (678)..(678): n is a, c, g, or t
  misc_feature (684)..(684): n is a, c, g, or t
  misc_feature (702)..(702): n is a, c, g, or t
  misc_feature (712)..(712): n is a, c, g, or t
  misc_feature (714)..(714): n is a, c, g, or t
  misc_feature (720)..(720): n is a, c, g, or t
  misc_feature (728)..(728): n is a, c, g, or t
  misc_feature (740)..(742): n is a, c, g, or t
  misc_feature (744)..(746): n is a, c, g, or t
  misc_feature (753)..(753): n is a, c, g, or t
  misc_feature (783)..(783): n is a, c, g, or t
gcctggagtctgcgaaggccgggacccggtnccccggcccacagtgggggtgtgcaaacccgagagaactggattgcgtacccactgcagagtgctgaagacggggtagccacgaggttgcaaattcgtgaagaatcagcatcatgtttggcagctgagtattggagccaggagcctgccatgaggttttgagaacagagtgctgttttagagctggcagcagcatctcagcccaagagaaggttatattcccagaggatgtcagtcccaaggaccagtngccgccatcngtttggattccnaaaacccacnggcaccaacnccgggtgcngaaacacgcctnccctatgtaccngagnacatgcccnncngacccnanaganatatttggcnaccnttcccngaaaaggcccattgggtaccncccntcncnccccccccccccnttgggttttttttntnttttganacantctcgcngtattgcccangctggagtgtggtggcncaatcncngcccntcgcacccccaatcncccngccctangcaaccccccccccctgtngctgggacnacngcccacngcacncctgcctaaaatttttttttgttgagacggattcnctatgntgcccangctggtcncangctcctgggctcagatggtccncctnccncagctnccaaaggcacaggccaanttgtagcttngncccttnccatcatncccaacaagagnnncnnnacctttnaatgaattgactttcataaattggttatgntggtgggcaagttctttaagctggaaattgtaaatccctcctgaaatgttttttcatgcagttaccatgaactaatactccaataaaggatggttttgggtgtcaaaaaaaaa

SEQ ID NO: 496859 - DNA, 158 bp, Homo sapiens
aaaaacattacttaaccaggcatggtggtggcatgagcctatccagctacttgagaggctggggtgggaggattgattgagccaggaggcaaggctgcagtgagccatgattgtgctactgcactccagcctgacttacaagagtgagaccctgtctc

SEQ ID NO: 496860 - DNA, 204 bp, Homo sapiens
tctgcgctaacttgatgatgtatgtcgtcgtctaggaccctgtgttgaatttgtttatccggcaaaaattgtttaaacaatatgaaatctgggcaccttgaaaaaagaacaggataacagtaatgttcagggaacaagggagataaccattaggtctggctgcctgagagctgggtggaacagagccatatttctcatctttca

SEQ ID NO: 496861 - DNA, 1419 bp, Homo sapiens
  misc_feature (877)..(877): n is a, c, g, or t
gcagtgcctctgtggtccagcgccatggcgccctccaggaagttcttcgttggtggaaactggaagatgaacgggacggaagcatgagtctgggggatgtctcatcggcattcttgaagacgcgggaccaaaggttgcctggcctgatcaacacggcagtgtaggtgtgtagtggctgccgcccataactaggcgtatgattcagactgttcggccacgcgccaagaacgctaggatacccaatgagttagctggtgagtgctgtcgcatgaactttggtacataagagttgacctacatgggaggcttattcactggggagaggattcaagctcgcttgggctattggatccgaaatgatcttggcgtggaagctcaccatttgggagtgtcgtccttgggtggggcaacatactaaagtaagtcagcacaatggcagttgttactacctgggggcgggagaattcctgacttagaagcctggagtagcgagtcgagaacacaacgttggtgggcgccattgcttacgttgccgtctaaaagggggcacctccctgccgatgtctaaaaatcccgaccgttggcaactttgtggggactaacacgcgtttcaacaagttcgatcggaggcggcgaaagcggctttagggacattctcagcgttggccagaaacggggttacgagcttaaacacgaagcaaggacgcagcccacgggtggcatttccggcaggaaattacccatcggtttcgcattaggggactcgttggggattaccccaggcgggggatgcgtggattcccgtaggggaccgcattgacttttagatgagacgcccttgggatgtctttgggcgcacgcaagcatttgtggcgtnaacagttggtgggaaaaaacggcaaccatttggacgaagaaggaggaccccacaattaacacagggtgccaccccacaaggatgggaagaggtagacatacgtgcacttaacaaacggcgtttcgcgcgggtacagaggggaactttgtggtcctctatggtatagagatacccgaacagacggatccattctcgtagagagctaagccgagatgtggtggaggagcattcacagagaagtgacaaagccacacaggagtaaggttaaaacttattgaaatagggagaatgaaggagcatacagtgtggtggggaaaacattggagtgcaggtacacaagcaccaaatttggataagagtatggtgtaacagacattgtagggagaagcgaacgtcggtctactgtgggatatgtgaaaattgtattgaggaagtagtagtcgtgttgaagacatcgatgtttggaggggattgtgtgttggtgagatggttatagaccgtattcataagagatctcgcgtgaggatgatattaacgggtat

SEQ ID NO: 496862 - DNA, 292 bp, Homo sapiens
  misc_feature (239)..(239): n is a, c, g, or t
tatacaaagtaggtttcaaaataggcatacaaagatgttcagtgcagaattatggtaatattttttaaaacccaccagttaaacgtaagcaacctcaggagatgtgagaaggtctaattttctttcttttttttttttttttggcctgaacatggcctcattctttagaatttaaaaaagtcatacctggcaaggaatcccgggtgactcgggtaggtggccttacatactggtccttnaaatatacatgtatatttcttcttcttcacccagttttagaaaagaggggatg

SEQ ID NO: 496863 - DNA, 336 bp, Homo sapiens
catggtcctggccctgttgtgccgtctgctctcgtcttacccagccccatgctgtgagtacttgtcatcatggcactccagcagggttagagggacaggtcctactcatctgaaattcctcggatatgccatctctgtctccctgggtgccagcagccctgcctgacatgttcactggggtggccctggagagccatggcagtcgtgacatatagtatgtcgtatgcacatgatcctgtgtgtatgtgcgtgctgtgcgtgtgtgtgtgtgtgtgtgtgtctctggctcattcagtttctggggtcaaatcagctccttctctccaagtgcactac

SEQ ID NO: 496864 - DNA, 570 bp, Homo sapiens
  misc_feature (129)..(129): n is a, c, g, or t
  misc_feature (143)..(143): n is a, c, g, or t
  misc_feature (162)..(162): n is a, c, g, or t
  misc_feature (181)..(181): n is a, c, g, or t
  misc_feature (202)..(202): n is a, c, g, or t
  misc_feature (207)..(207): n is a, c, g, or t
  misc_feature (213)..(213): n is a, c, g, or t
  misc_feature (223)..(223): n is a, c, g, or t
  misc_feature (229)..(229): n is a, c, g, or t
  misc_feature (238)..(238): n is a, c, g, or t
  misc_feature (243)..(243): n is a, c, g, or t
  misc_feature (246)..(246): n is a, c, g, or t
  misc_feature (249)..(249): n is a, c, g, or t
  misc_feature (254)..(255): n is a, c, g, or t
  misc_feature (264)..(264): n is a, c, g, or t
  misc_feature (266)..(266): n is a, c, g, or t
  misc_feature (280)..(280): n is a, c, g, or t
  misc_feature (294)..(294): n is a, c, g, or t
  misc_feature (305)..(305): n is a, c, g, or t
  misc_feature (307)..(309): n is a, c, g, or t
  misc_feature (313)..(313): n is a, c, g, or t
  misc_feature (317)..(317): n is a, c, g, or t
  misc_feature (327)..(327): n is a, c, g, or t
ccccagaggaactggcagtggtgcgttgccaagtggtcagaagctggaggagttgaaggcagaggagccagataacttcagcagcaaagtagtgcagaggggccgagagttctttgacagcaacgggancttcctgtacagantttgagtcggggcttggcntatggagatgcctcgtganacacagctgggcaagtattantgtanatggancagcctgganttctgnatatggatnagccnccntgnaatannaagaggtgntnagcctggactgtgngaggaaagagctgngtggatagatncnnncttnctgnggtagtgctnccagtctgacctttgtagaccttcagactcactgtttttgcttaggctatctgtgtgttcaaacccatccagggtgcatgagtggtcacgattttgtgtgatacttgcaatttatgtttgagaataagtgtaaagtttgcgttgtgacctcatttctctctcgatcagtgttactctaacatttgggggacggtgtagtcaactggttttcctgccatcaaaatgtagtatcgtgtagcagtc

SEQ ID NO: 496865 - DNA, 260 bp, Homo sapiens
gccccaaaaaaaaaaaaaaaacctttttttttaaaactttttttttgttaaaacccgtattaaaaatctccctttatcataagtccctttttttttttacccccaattttgggaaagtaccccataaaaaagttcagtcatgccaggtttgtttggggtggaaaggaccacccaggtagttaaaaatttttttttaaaaataaaaagctttttaacccctgtaaaacaccctgtattttaaaaccctctgttaaaccgta

SEQ ID NO: 496866 - DNA, 417 bp, Homo sapiens
acaagaaacattactcgtagtcatcaccagtattagatggtcaccgcctgcccgttgagcatcctgtttcacacggccgcggtacctgaacctgtgcaaaggtacgctatactcacttgtgccctcttaaggtagtggacctgtatgcctggctcctcgagggttcagctgtctcttacttctacccagtgagaattgacctgcccgtgaagaggcgggcatgacacagcaagacgagaagaccctatggagctttaatttattaatgcaacctgtacctaagaaacccacaggtcctaaactaccaatcctgcattagaaatttcggtgggggcgacctcggagcagatgcctaaactccgagcgagtacatgctaagacttcaccagtcaaagcgaactattatactctattgat

SEQ ID NO: 496867 - DNA, 393 bp, Homo sapiens
tcgcaacggccatgcaagtacattgagcgagaatgaccagcgtcaagaatggagctgctgttgacggaggcgatgttggatgtctcggaatgctgaagtcccgttggaggaagagaacaggagcctgaaggctgacctgcagaagctaaaggacgagctggccagcactaagcaaaaactagagaaagctgaaaaccaggttctggccatgcggaagcagtctgagggcctcaccaaggagtacgaccgcttgctggaggagcacgcaaagctgcaggctgcagtagatggtcccatggacaagaaggaagagtaagggcctccttcctcccctgcctgcagctggcttccacctggcacgtgcctgctgcttcctgagagcccggcctctcc

SEQ ID NO: 496868 - DNA, 106 bp, Homo sapiens
cggtcatcacgctggacgcgtgggagcaagggcgaggtggtgagccacatcgcttcggacaaccgcgtgggcggtaaaatggccggcgacttcatcgccaagaaag

SEQ ID NO: 496869 - DNA, 100 bp, Homo sapiens
  misc_feature (49)..(49): n is a, c, g, or t
caatcgagctcggccgagatctccttcaggatcgactgttattaaacanagcatcgcgaagggccgcgcgagtgtttgacgcgatgtgatttctggccca

SEQ ID NO: 496870 - DNA, 278 bp, Homo sapiens
acattggtccaacaccactcccagctaaaaattatatttttttgaggcgatagcatctccctatgggggcgcaagctagaaaaaaactcctcgattcaagcgatcctctcaaagggtggggattacaggcataagccattgcgcccagcctgaggaaattttttcaacagtcacattttcaaaagtgaggagggaaattagtattcttgagctcatagatcagagattgtaaactgtctgcctttggaccacatttgggtgtaaaaatattttatttg

SEQ ID NO: 496871 - DNA, 315 bp, Homo sapiens
  misc_feature (39)..(39): n is a, c, g, or t
  misc_feature (60)..(60): n is a, c, g, or t
  misc_feature (113)..(113): n is a, c, g, or t
  misc_feature (273)..(273): n is a, c, g, or t
  misc_feature (308)..(308): n is a, c, g, or t
  misc_feature (310)..(310): n is a, c, g, or t
ttaaatctcaatattaagacaatgagggctgggcacccnatgcacgcctgtaatcccaanacttcgggaggccaaggggggtggattgcttgagctcaggagtttgagaccancctgggcaacatggtgaaacccccatctctacaaaaaaccacacaaaaaaatcagccgggtattgtggtgtgtgcctgtggtcccagctactcgggaggctgaggtgggaggatgcttgagcctaggaggtggaagttgcagtgagctgattgagccacntgactccggcctgggtgacagagccagaccctaantntaaaa

SEQ ID NO: 496872 - DNA, 659 bp, Homo sapiens
ggcggggcgcggtggctcacgcctgtaatcccagctctcagggaggctaagaggcggggaggatagcttgagccccaggaggttcgaggacctgccgtggcgcaactatagccgagaaccccgttttctcccagaaacacggaaaacaacaacaaaaacccaaacggcaccataacatacaaaacacagacaaccacacacaccaccacaccacacacaactctttgtttctcgcagcgcggccactcgcagaccccccctctgggcagaaaaaacgatgtctctctatcaaaagaacacaccacccatcaagcggcgataatgtgacggccgccacagcgagcgccccccacaacggaggcatcaacagacgattggaacacaccatcgcggcggcccccccaccagaccacccaccgccggtgtccccccacacaaaggaggagcacaccaacccccggggggcccacacaggagccccaccaccgccgccgcgcacaccccccggaagcaagccacacaccccacccaaaacaccccgcaaccaaaaactaacaaagaaacaaacagcgccccccccccgcgccgcgcgcaaaacccccgcgcagcgccgcgcctcccccccccccagcgcacaccccccacacacccaccccccc

SEQ ID NO: 496873 - DNA, 552 bp, Homo sapiens
gagaattctgcagtttcctccgataaaagaacatgcatattgaagtgaacacgttgtagaagtggagctttgcttctgagatgagccggatggtgactgtacatggacccgagtgtacgttatactgttaagagaactcggtgggatgactatgaaatgtatatgggagaagtgtacatatgtaatatatggttttattgttttatatgtgccaaagttcacttatcacgagatactgcctgaaaggaaatggaagagaggatgtttgtgggcattttgcagtgctacatgcaatgcccagaacaggcacctggtgctgcatccgcagctactcaaaacgataaagccggaggatagttcaacaacatagcaagtctctgtctcagtaaaacaaacaaaaataataccccaaacaacatgacaatctgtggttggagaaagtttttgaaaaagtgtatattcaagagtgttctctcaccccagtcctatcccgtgtgaaataagagccctcagatcccactggacagaaaaacttagatagtttttctaact

SEQ ID NO: 496874 - DNA, 305 bp, Homo sapiens
ggagatgtagccgtggcgcccaaacttgcgatctttagcccagaatggcaacaggccatattgtccggtgagcacttctaaatcggaggtctgatcgtcgcaatcctcctccgatcgcattcggatgaaaggcccctctttcagcggccataaatcgaggggcatctgtgtttcgggtgccaccccaaaacctgccagcaagcgatcgttttctggtgcctcgtaatgggagcacatggtggggcccttctgtgttgattacaggatagacagcattcgccaggtaattgtttgttgtaaaagtg

SEQ ID NO: 496875 - DNA, 355 bp, Homo sapiens
taaaaccccccattttcccccccccccgccctccaaactggggggtttgggaagccccgctttaatgtttggccccccccaaggggggtatggggccggcccctggggccccctttgaattttaccccttttggggtccccgaattgtttttagggggcccgcccccctgttttttcccctcccttggaagggggcccaggggccgccctttattggcccccccgcccggggtttttttttttttggagggccccctttttttggttttttggggttttttttaatcccaccgggttttgcgggttttatgcccctttttccttgaaataaaaaatggaattttttggtttccca

SEQ ID NO: 496876 - DNA, 567 bp, Homo sapiens
  misc_feature (123)..(123): n is a, c, g, or t
  misc_feature (287)..(289): n is a, c, g, or t
gcacctgcaggctcctcttctatttctcctccaggggcagagattttcgacatactcaggtaggtggtagccacgatgtcattgtgagtcaggcggtcccagtctatgatacgaatcctcatntttttcgcacatggagggaaacatggcaggcagtgtgatgttctggttccactgagggttggccgtcttctccaagatcttgctgcacagcattttccccgcaaagctgacctccacaaaggggtccaccaagttcttcttgttactctcgaagccaaagatcnnnttcacgttgtccatcacggcatcgtccatctgcggcaagtcctcggcccggaagaccttcaggcagaagtgggctcctcgcagggctacgcctgtgggccggagcaggttgctttcaatgtcctccttgtcttcagaggggtcttttctctccagacgcgcttcgtccccaggccccagcacactaaggcttgttttcaggtagcctctggccccagcaagagaaattcatcgggtctgagagcaggcaaccaacttcctgaaattggccgttccggg

SEQ ID NO: 496877 - DNA, 641 bp, Homo sapiens
gcaaagtttgccatgtggccgtccccagactcttctgctatacctttatgaaccttctcaacaatacattgcatacactcggtcttatgcaagaaacttgcatgtctgtctctctgttaaatccaggtgtaccgactttgtaatctgggagtcagtgttgatgacccagttcagatactctgtgtgcctacaatgatagcaagtccataataaggttctgcatgtgattattgttcatgattacagatcgagaaggctccaattcatttccattgcttggctcgcatacaaggctctacatatctggtgccagatcttcatatcatctatcactcccttcattttgaacttgaaggagccgatgacttacattctaaaactttttggatgttttcattcagcctgtatagcactgcacttcccatttatcccaactagcattcttttttctttaatttttgagacagagtctcactctgtcgcccaggctggagtgcagtgacgcaatcttggctcactgcaacctccgcctccccaggttcaagcgattcctctgccttagactcctgagtagctgggataataggcgtgagcaccactcccagcctttcatttcttgtcacttatttgcggatgtataa

SEQ ID NO: 496878 - DNA, 387 bp, Homo sapiens
attctcgatacctagctgcatggagagtatacctcgcagagaatactatcgatactatggggatagctatactccagtagatcaaaagaattggcggcagagcacacacatggaactgtcctggaaggacaaatcagggtagagatgcacagtcaggtgactggaggtttcttccgcaaagcatgaccaccaggaaatcagaatcagccagtccctcagaatcaggaacaagatcattgcatgagaggagaaataagacagtacccataagagaacagtccagtaccgaatctgaaccctgagttcgtttggtagtcaatcccttcagggctgtgcgtgtgtagtgtgtgtgtgtagtgcgtagtaggagtgcgtgcctagcatgtg

SEQ ID NO: 496879 - DNA, 242 bp, Homo sapiens
acagttgaacctactttttgacacttccatagtctacaagtattcatggaacaaaaaaaccctatatgctatactgtgcacctagaagcttttatataacaacgtcttttggtttgtatagtatgggattctttaaatatatattattctcatttagtgccctctttagccagaatctcattactgcttcatttttgtaataacatttaatttagatattttccatatattcgccacgtgga

SEQ ID NO: 496880 - DNA, 168 bp, Homo sapiens
ttataatgggtggtgctgaccttcttggccatcccggtacgatgggcaggatgcaggaaccagcccgcgggccagggcctggatcacctggggggtggcgtacttggggtctgaggcaaagctctgggtggtgggcatggtcttcccaggtgagcttgagagccgggg

SEQ ID NO: 496881 - DNA, 272 bp, Homo sapiens
gaggacccatgcagttgacgttggggggcgcgcccgtgggcgcgggccccgtgttggccgccagcttgttttgggcgtgcgccgtgggcctctacatggggcagttggagttggacgtggagttggtgcccgaggacgacgggacggcctccgcggaaggccttgatgaggggggtcggccgccacccgagtgagcgacacggccgtggggcttggcaggcgttggacagggcccgaggattgggacattaaacctgccctcccctcctcca

SEQ ID NO: 496882 - DNA, 98 bp, Homo sapiens
  misc_feature (49)..(49): n is a, c, g, or t
gccagcacactcccagattgtcatcgaggctctggctctcgttggatgnaagcggcgctgcgagccatccagcaccagtgggggctcgcaggtacagt

SEQ ID NO: 496883 - DNA, 149 bp, Homo sapiens
agtgtcatggtacgcctggctgctccaccctactcccatggtagaccaagaagccttcatacatctcaagtaggagggacaaaaaagggggaagggggggcacgacacgctcatcattcaaatatcaaacaataataaataaagtatta

SEQ ID NO: 496884 - DNA, 157 bp, Homo sapiens
gcttaggaataaatcttaactaccatcatggtaattctgagtcactgaagaggaaacacaagagaaaaggatcaacaccgcttatacttgtgatggtgaccactatacattcccaacgcaagagctaggccttgtggagcgacttccgatattttat

SEQ ID NO: 496885 - DNA, 1200 bp, Homo sapiens
  misc_feature (488)..(488): n is a, c, g, or t
gtctacaagcaaggctgctgcctcttatcacagaggctgcggctgaggctgtttccgatctcctgtctcaactctgcactggctagcatctgacgcttggtatagcatttcattactcttccgctatcaatacatctagaaaacactgacttactgcatagtgacaaaggacaggggttgcgccggggtcgaggatgactcccccggagggcggctcacacccttccaagtcgattaggccgcgcgtctcttcagtgtggctacccaagaggggtgtgttcacctgataatatgaggcgagatgtccgtacaatgtatatgaggtattacacgtactagctggggccggacccgggagtttcccacaagaacgccaacggaacacgtggcggagatacaatacacgcgctggacagtgtggagccactcatctgtgagcaacaggcaatctgtttcaactctacatcggtgggggtaagcgtgacaanttgaagatgtagcgaactacatagtgtaaccataagagcgatatacttacaaaagtgcacgcccttagcgcgttgataggctatcccacagattgtggtatggccaaccgtccgtggttgacttgtgttggttcacagacgtgaacgccttcgccttagatcgcgcacgagatgggcgctaagcccgagccggacgaagggactagaccggcaaggaattcagatgttattggaggaacactattctaataaaccccgaggaccataggttacgaaaaaaagcgtaatctcaatgggctttgttgcttaattcccgcctggtaccagccctcttgggccggtaaccaactttcgggcaatcagtggatggaactcacggtggactgagggtccaccccacaaactggtgtcccattcttaaacgaaggggggtaattgccctacccccccaatagccaattccttgcagtcctgtaacccttgggactatggccgatggaaccttggactttgactaacctccatgaaagacatctctcacaccgagcgccggccttaaccgctttcacccaccaacggcgaaccgggaaattgctggcagttgacattaacgagaaagctgtgctaggttgctccttggactccaagcaaaaatggcagcgtggttcagacctctggggaagaactcaaacctgcctaacggccggtcttc

SEQ ID NO: 496886 - DNA, 326 bp, Homo sapiens
  misc_feature (4)..(4): n is a, c, g, or t
  misc_feature (324)..(324): n is a, c, g, or t
aatnaaatatatgaggttgtcattaatgactagaatgtctttcacagtccctttttatttatttattcagagacagacatgaacacggctcattgcagccttgaccgcctgggcccaagcaatcttcctgcctcagccttccgtgtagctgggaccaaacgtgcaggccaccacgtccagctaattttttgactgtgtgtagacaggggttcactatgttgcccaggctggtcttgaactcctgggctcaaatgatcctcctgccttgacctcccaaagtgctgggatgacaggcgtaagccactgagcctggccacagtcctntt

SEQ ID NO: 496887 - DNA, 441 bp, Homo sapiens
ataaacgtacactaattatacaaatactatacaatcaaatcaagaaacattaagaaaatattaatagcaaaaatgtcaaaaaaagattggaactggtcgggtatagtggctcacacctgtaatcccagcactttgggaggccaaggcgggtggatcacctgaggtcaggagttcaagactagcctagccaacttggtgaaaccccatgtctaccacataatacaaaaattaccgcaggtatggtggtgtgtgcctgtaatcccagctactagggaggctgagccaagagaatcgctataagccaggaggcagaggctacagtgagttgagatggcgccagtgcactccagccttggatgacagagcgagactccatctcaaaataaatatctctctctctctctatctatctgtctatccatctggagggctttgaatgct

SEQ ID NO: 496888 - DNA, 282 bp, Homo sapiens
cccattgcccagcagaaccgggttttgcagttggccaaaaaattgggcagcctggtggagaacaacgaacgggtgttttaccccaaacagggcccctacgggggttacttccaagaccaaaaggacggctcccgcaaaaacgaggggtacatgccccccggtggctacccccaacaacagtttcaaacggcctattgagctttccactttgtttcccgcctgggccatccacccttgaagtcttaaaccccccctcagtcactaaaggtttgtttaaagtta

SEQ ID NO: 496889 - DNA, 421 bp, Homo sapiens
ggactcccggggctcttatctacagaacagctgacgagagagttacgatcacagttcaaggacacacactgtcagattcctcgccggtgactcagccgaactttcctgctttctcccaggacatgacagttcatacaatcagcctgagggaactccttacattctaaacaagaataacaccaaaaatgtctgaggattgtcaatataactgctaagtcctccgcgagtagaaagaccagaagattcaacagacaccgtgagagtgtggccggcagcgacccgggcacggtcctcaagcagggagtgtgcgggacccttatccctcttccctttgcctggctctcccactcacctctgaagcctcagttctggggcgacaactccaggaagccttacctactctcaccctagcgccccgatg

SEQ ID NO: 496890 - DNA, 519 bp, Homo sapiens
  misc_feature (99)..(99): n is a, c, g, or t
  misc_feature (259)..(259): n is a, c, g, or t
gagcagaaggtggagccagccctctttccacccgtacctctttttacagcagtgccctcccggtcattcttcccacgaggcttcctttgggatgaaggnctttcagccagcgtggatgggttcaacgcgcgtggcgatccctccctcacccgggaagcccttgtgcactggctggggctgctaaatgctgatggctggattgggagggagcagatactgggggatgaggcccgagcccgggtgcctccagaattcctangtacagacggaggcaagttccgacgcccaagcccccaagcctactttgcctgtagcccatatgctagaggttggtgaccctgtacgacgttgggctttttccgttcctagacaggcccttggccccggcctgcatgcctggttttcctggctccatcagagccagtgcaggcccactggccaactaattctttaacccggctgggccggggacggggaccctgccttaccaaccttactggaacccaaggacctaccctg

SEQ ID NO: 496891 - DNA, 514 bp, Homo sapiens
  misc_feature (17)..(17): n is a, c, g, or t
  misc_feature (106)..(106): n is a, c, g, or t
  misc_feature (110)..(110): n is a, c, g, or t
gcatacagtgttgagtnctggtgaacgagtatgatgatatggagagggtatcatcttatttcgtccttcacatctcactaacaagtttgaggacaagactgtggcntatncagagcatataatgaccacgtggtcaataattacatacagtttatccagcgacataacattttaggtatctgccctcacatgacagaagacaataaagatttgatacagggtcaaggacttacttattgcttactatgatgtggactatgaaaagaacgctaaaggttccaactactggagaaacagggtaatgatggtggcaaagaaattcctggatgctgggcacaaactcaactttgctgtagctagccgcaaaacctttagccatgaactttctgattttggcttggagagcactgctggagagattcctgttgttgctatcagaactgctaaaggagagaagtttgtcatgcaggaggagttctcgcgtgatgggaaggctctggagaggttcctgcag

SEQ ID NO: 496892 - DNA, 661 bp, Homo sapiens
ggtacagcagttcgaggactgtcaccgtgctcaccatcgcccaccggtttcaacaccatcgatgtactacacaagggtgatcgtctgggatataggagaaatccaggagtacggagtctcatcggatctccggcagcagagaggtcttttctacagcatggtcgaagacgcaggcttggttgtgagcgccagagctggcatatctggtcagaactgctgggcctatatgccagagcacagggaggagtcagtacccctggtaaaccaagcctctcacacagaaaccaaaacataaaaaccaaaaccagagtacgaaaacatattcgaagcatcagccaccgtcatccggtccccttcctggaactggccgtgacatcacttgagagacagagatgcaaacctaccaaaacatgcacatcctgtgcctggtgcactgaaatagacacacagcctcacgcacccaggaatgcaagtggtttcctggcgcttcccacggaggagttttggcagccagacttctggaggaataggttgtatagaagatcctagtgaccaaattcagcctactgcctcggatctctccagccgaagtctgtggactgcaagtctttgagatgcttctggctcccatcacctctaacatccttgtctgggtctacaa

SEQ ID NO: 496893 - DNA, 380 bp, Homo sapiens
gagaacctcctgctgcatgtacagattgccacagaggggaccctagggctgagcaggagaggcttcatggagggggtgtgtgtgtgtgtgtttgtgcatctactatgtgtgtttgggtcaggttgggacactacacagaggtggatcacctgaggtcaggagttcgagaccggcacagccaacatggcgaaaccccatctactaaaaatacagaaattagccgggtgtgggtggcacacgcctgtaatctcagctattcaggaggctgaggcagaagaatcacttgaacctgggaggtggagattgcagtgagccaagattgcaccactgcactctagcctgggcaacagagtgagactccagagagtctccgtcgaact

SEQ ID NO: 496894 - DNA, 213 bp, Homo sapiens
  misc_feature (17)..(17): n is a, c, g, or t
  misc_feature (106)..(106): n is a, c, g, or t
  misc_feature (110)..(110): n is a, c, g, or t
gcatacagtgttgagtnctggtgaacgagtatgatgatatggagagggtatcatcttatttcgtccttcacatctcactaacaagtttgaggacaagactgtggcntatncagagcctgggagacagcaagaccattcccggagacactgcttggctcctctatgacacctatgggtttccagatggatctgactggactgacttgctgaaga

SEQ ID NO: 496895 - DNA, 1418 bp, Homo sapiens
  misc_feature (724)..(724): n is a, c, g, or t
agcggaggtctacccagtgaactgaccctgctctctcctttccctgttagacatgtgactgctgtgtactctcaatgaggaagatatagatgcgagaacagaacatagagccgcactctactactggcgtgacttctgcaatataccggagactctggattgagaggagcactccatcagacatgatgttcactttagtcacggtcagatgcaccggacacttcgctgacttggaagaaagcactgctgattatatcggcatcctagtgagctccatgacgagaagatgaattatgcagttaacttgtccttgtcttggatgctcattattgacgtagagtgagttggtcagtcctaatctggaggttcttgaacagatcatctggcaatctcacttgggtgaacaaactttcaatcggacattgtgacattacgacggtaagaagactccttggccaattgtactctaaagctccttggccaattgaatgcactttgttgggtaggcaagttaaccgttgctgagataattacgagtaccacttggaatcgcgtcccatgcgtattttactaccacttcgtctcatcttgactggtgcccaagcactttctttcaacggcattgctaattggaaccatggtaattgaagtcgctttatttcgacccgtaaagcatcaaacggtttggtcgcgaaatactggtcagagccgtgctctttactangatagaggaacaacgactgggcttcccttatttgcattggcaccgactacttctggcgaagaaggcgcaaactttgaccaccacaggaagttccgttccgtggcaggtgccgcccaggtggcgacaactgtcttgagccctttgggtagcggggaaaggcgtttgtagatggcttattccagaccttgtttgggaagtaaagggccaaatgcccgacaaatttcgtgggtcctctcaatccctggttaatttgaagacctcctggagccggggcgtccaatttttggcggttagccagaacccaaccggtatcgtcagatcccctcattggcctggggttgcgccagaaatacgtcatggaggccgacagcgaggggaacttttgcctgggccctaattgaccccatgtcgcacggttgggacattcccagggtacacacttttccctgaaatcttaacttcagaggctcgcgttggacttgtatggttggaagcgtacaccaatttgaaccccctcaaaggcggcagggggctgccacagtggggaagagggcccggagagacaaagttttgccgcacgaatggtgcttgggcgtaacccagaatggtgtggggcacctcaggactttcccctagacaaactaaatttgcgcaggaactcacagctggagagcttggcactacagacgacacc

SEQ ID NO: 496896 - DNA, 310 bp, Homo sapiens
cgtgaagcacttactagatttagctaaacatccatgtcatgcctcgctgcaatgtgacgtgtgttacacggcggcgcaatacttgagcatttagctacttctgtaatgctgtacagaactcaccaatttgtgcacaggtgtggcgagaacaccgtgcatgatgaaatcttcatcactgtgtcataaagcatgctggtgtatactgttactgtccgcctctttacacatgcaatatgtgacttctgtgaagcttgggtttgccatggtaggaaatgtctcagtacacatgcttgtgcctgcgaacctatga

SEQ ID NO: 496897 - DNA, 1025 bp, Homo sapiens
agtttaaacagatttctcaagcttacgaagttctctctgatgcaaagaaaagggaattatatgacaaaggaggagaacaggcaattaaagagggtggagcaggtggcggtttaggctcccccgatgggacatctcttgcatatgttttttggcaggcaggaggaaggatgcgagcagcagcacaaggcagcaggtcaacacaatgttgtacatccagctctcagtaacccctagaagacttatataatggtgcaaccaagcacacaactggctctgcaacaagcaatgtgatttgtgacaaatgtgacaggtcagcaggaggtaagaacaggagcagtagagtgctgtcccaattgccgaggtactggaatgcaaataagaattcatcagataggacctggaatggttcagcaaattcagtctgtgtgcatggagtgccagggccatggaggagcggatcagtcctacaagatagatgtaaaagctgcaacggaaggaagatagttcgagagcacagcaaaattttagaagttcatattgacaaaggcatgaaagctggccagaagataacattccatggttgaaggagaccaagaaccaggactggagccaggcgatcttatcattgtgtaagatcagaaggaccatgctggtgtataactcgacgaggagacgaccttaacaatgtgtatggacattacaagctagtcgcaagcacctgtgtggactaccagaagccaatattctactctagacaaactgaaccatcgtcatcactctcattcaggtcagatgccagactggaacatcaagggaccaaatgagcatcaataacgaaacaataaacggactacacaaaaaggcaatacaaaaggaccgaccggaaacgactgcacaacccacccgtgaaaacgaaaacaaagcacaaagaggacagaacagcaagaacacagaacaaagacgaaagaagaacaagagagaagagacagaagaaaaaaaaacaacaaaaaacacgaacaactata

SEQ ID NO: 496898 - DNA, 926 bp, Homo sapiens
taaaaccccggtgcctggggggggggggggtttaaacccaagtggaaatgatttccttacgggggaaaggcccttgggaaaaaaggcctaatttctctggttcctttccgacagggaagaaattggaattaaataaaacccgccgcgggatctatacccccggggtgcggaacctcacaactcacggcaggacttcaaaatcgcgtgtgcaccaaacaccaacaccccttaaaataggggggcgaccccagtggggaagtgtccgtgaatccaaacactgcgaggggcgataaccccccaagtgggtgcgcctagggccctcccaaaaactagagaccgcgggccgtgattactccccagaggggaacccgtggttccgcgcgcggcctccacgtacagtggagcacccaagtggagcataatagaacagctcgcgacttgaacgggggggacagtcctaccagcaccaatggtcccgtggcccggccaggggtggggcctatcgtggcccgaaagggtcgcccacaagcgcgtaactttcatcaccgcgccggctggcggccaacatacaggcaaccgggggagactttaggaccaacggacacgcgaggggcagctaacactcatcaataacaaggcgtccaaaaggagcaccaacagtcgacatggagaaggagacacacagcccagcccactcttccacggggcaacgtcacaactttcacgggggtccaaacggtaccacagaaccgggtcagaaccccccccggggaaccaccaaccacaacggggcccttacttacagggaccacagggactatatgacacccttgggcagagatacgcacaccgggggcgttaaacattgttgtctgtggacacgcgacgcgcccacaccagggagacgacagggacagatcgggcaa

SEQ ID NO: 496899 - DNA, 720 bp, Homo sapiens
  misc_feature (148)..(148): n is a, c, g, or t
  misc_feature (227)..(227): n is a, c, g, or t
  misc_feature (285)..(285): n is a, c, g, or t
  misc_feature (304)..(304): n is a, c, g, or t
  misc_feature (344)..(344): n is a, c, g, or t
  misc_feature (373)..(373): n is a, c, g, or t
  misc_feature (402)..(405): n is a, c, g, or t
  misc_feature (411)..(411): n is a, c, g, or t
  misc_feature (413)..(414): n is a, c, g, or t
  misc_feature (416)..(416): n is a, c, g, or t
  misc_feature (460)..(460): n is a, c, g, or t
  misc_feature (470)..(470): n is a, c, g, or t
  misc_feature (492)..(492): n is a, c, g, or t
  misc_feature (509)..(509): n is a, c, g, or t
  misc_feature (516)..(516): n is a, c, g, or t
  misc_feature (522)..(524): n is a, c, g, or t
  misc_feature (560)..(560): n is a, c, g, or t
  misc_feature (588)..(588): n is a, c, g, or t
  misc_feature (606)..(607): n is a, c, g, or t
ggtccggcggcgctgcagtgtgtcagccggtcacggggcggctatggcggccacgtcttcggagaggtggtgaaggcgccgtgccgagctgggactgaggacgaagaggaggaggaggaggggcggagggagacgcccgaggacaggnaggtgcgtctgcagctggcgcggaagagggaagtgcggctccttcgaagacaaacaaaaacatctttggaagtttcttngctagaaaaatatccggtgctccaagtttataattgctataggaaataatgcagtagnatttctgtcatcatttgtnatgaattcaggagtctgggaggaagttggttgtgctaaantctggaatgaatggtgtagaacaacaganactacacatctgtcctccacagaggcttnnnngtgtgntnntnatcatctaaaatccaatccctcggtttttctctgtcagtgcagnttgctatgtngcagaagatcaacagtatcagntggctggaaaaggtttnggctctntgtccnnngaagaacatgcagataactattctcacatgtcgacntgttaccgattataaacctcagaatcancggagcttccttctcctnncctgagagcctaaaacagcagaatttcaaagacctcggcgtgtgtccattgctagaacaaccgaatatagtacagcgacttcctgcagcaagttctaggctactgtccagttt

SEQ ID NO: 496900 - DNA, 132 bp, Homo sapiens
ctctgacagcatcctcttatcctgcactgcaggctccctcggtgtgtctgagacagctgcagccctcaggaggagacagagtgcctgggcatccacctcctcccagggacgtgcgctgtcggctagtcgggg

SEQ ID NO: 496901 - DNA, 119 bp, Homo sapiens
tggtggtgccggaggacatcgaactcattggtcagaccgtgcgcatctcccagtggccctacaagaggctacatcggtgtggtgaaagatgccacatgagtccactggccctgtgtgga

SEQ ID NO: 496902 - DNA, 405 bp, Homo sapiens
tcggtccgcgggggacgaaaggaaaataaatattgggacccagaatcactaagctaaaaggaaaagtcgagctgggaactgcttaagggaaacctgcctcccagtctattcaaagtctcatccctctgctcactgagataaatgcgtatctgattggctcctttggaaaagctaatcagaaactcaaaacaatgcaacagtttgtctctcgcctatctgtgacctggaagccccctcccaacttcgagtggtcctgcctttccagactgaaccagtgttcgtcttacatatattgattggtgtctcatgtctccctaaaatgtataaaatcaagctgtgccctgaccaccttgggcacatgtcgtcacgactttctgggactgtgtcatggtgcacatccttgac

SEQ ID NO: 496903 - DNA, 179 bp, Homo sapiens
ttgacgcacacaaaagggatcgctgcagactcagggcaaagggaatgccatcggtgctgggaactgtgagcactacaggaggaaacgcgagacgtggtgagactggactccaggaacacagtgcgaagggcaacgagggttggacacgacacccacaacagctcacttgggttccatcc

SEQ ID NO: 496904 - DNA, 206 bp, Homo sapiens
tgggggacagtagactcgatccatagtcgtccacgttatcatgttcatccgcaccatgttgcagcaacaaggatgcatgttattcatgactcatgttcagggctgtgtacgatgtttcctggccgccagaagatccacatctcaaagaagtgtggcttcactcgaagtctcagtgctcattaatatgaagacgtcctgctctgagt

SEQ ID NO: 496905 - DNA, 360 bp, Homo sapiens
  misc_feature (213)..(213): n is a, c, g, or t
ctatacaggtacaccgctttccctttggttacatctagtttctctcagctttgccttcttgctttttcatatctctaaagaaaaaaattacattatcagttgtcctgttaatagaaaatatgggataatatagaagaaattgtgttataaatagaagtgtttcatcctattcaaaaccatttcagtagatatttataccaatactgtatatangtataatattacatatcaagtttaaattagtgcaatttttatacccctagttggctaggttttactgtaccttgtagatagtattgctcgagaatggataggtgcggtaggaaacctacttactaggggatacctctaagagttcga

SEQ ID NO: 496906 - DNA, 992 bp, Homo sapiens
  misc_feature (327)..(327): n is a, c, g, or t
  misc_feature (459)..(459): n is a, c, g, or t
  misc_feature (496)..(496): n is a, c, g, or t
  misc_feature (508)..(508): n is a, c, g, or t
  misc_feature (547)..(547): n is a, c, g, or t
  misc_feature (593)..(593): n is a, c, g, or t
  misc_feature (629)..(629): n is a, c, g, or t
ggtacatggggatcaggtgttcatcactgattggaaatctttctgaaaaggatatgaccctgctccaggagaggattacatgcggtcagctatagagaccctcttgtctgcaccaagtgaaacacagagtgtgatagcagtaaacctcgatgtcgatgcgacaacgaacagtagacgcttccgaattgccgatctactgtttaccgcataggcgtacctacgcttgatcgcacgatgtctttcctaaatgtcataccgatgcccggaagtcgatgaagctgggcgatccgtggaggcgagtcccgaggatgcgtccagtcctggagnacattcccagcatgcgatcttagagtgagcattcgatggatattgaccacataggttacgtagtcctgatcgtaggatacatgcacagtagaacttgtatcaggcaaactaaacataggaattgaacgagtntattgtccgaggcccaaagtcactatacattgcactngataagcgccanagagattccatgcgagcgtgttgtcattctcagcgatcngttacgagatgaccatttgccagctatgttgagaaatacgagggcnagtcgcacgagactcaaattcttgcagtttagttcntccgctaaaggtagagccaggtaggtatgaccaatcttaacatcaatggtcatccacatgcattcttgacaacagaactccgtagtagagtgtcgcttgaagcacgagtggaagacgaagagcgttgatagccgatcgtccggagcctatacttgattcaagtttccttgataagcgcacgttttagtgccagcgtaacgaccgtcatctacgagacacgacaccatggccagcactgatgaacattggcagaaaggaaccgagatcagtccaagttgatatcagcttgtacttcattgcgcaagcatcgatttgcgctgctttcaagactagagaaagccttggccccggagagagccttcc

SEQ ID NO: 496907 - DNA, 115 bp, Homo sapiens
gtctctagagtgatccccgcggcttattaaagaaggaattttcaaatgcttcaatgtagtgcttggttcattaggatactgagttgaatctggtatcttgaacaaagcgttactt

SEQ ID NO: 496908 - DNA, 324 bp, Homo sapiens
gggtcggtggccatggctgtgcttggccgcctctgtggggctctatcctaattcagtgaggtctctcgccaccttcctccagggtcttcctgagacagagaccgagacttcagcttcaaaaagaaaccctggccgggcgtggtggttcatgcctgtaatcccagcactttgggaggcaaaggcgggcggatcacctgaggtcaggtatttgagaccagcctggccaacgtgttcaaaccctgtctccactaaaaatacaaacatggcccggcatggtggctcacgcctgtaatcccactacttgggaggctgaggcaaaagaat

SEQ ID NO: 496909 - DNA, 152 bp, Homo sapiens
aatgggaacagaaatagtatatacagaataacgactatgtacacacagcagtaaatctatgcacagaaatgtctagggagaacatataacaccaaaagattaacagtggtagcatatagggtggcacaacttgattcttactaaaatttctg

SEQ ID NO: 496910 - DNA, 838 bp, Homo sapiens
ttaaagttcatatatgcattccaagcgtgactaaaaatcactaatgccatctatactttagtatgaaacagcagactatagaaagcacagggaataataggctaaatacattcttttgaagaaccagaggcatataacacatcattatgtcattcctaatacatggctagattttctaatgataaaattgactgtgtgccaatgcttatattgattctaggctttttatctgttactgagatatttaatagctttgaaaatatgctgaccagtttttggaaccataatggtttttatagcaagcaaagactttatggaacattcttcacaaatagcactcatacatacttacattttgacaagaaaatgtgaattctcacattgatgagatatttacattcccacctgccctaccctttaagaaaaggtcacttgtctaagtgtgtagtagatcatttacgccttcccttgagtcatacatgttggagcaactgtgtgactcgtcaggtagacgaaaattaatagggaagccagacgcttgaacttagagtttaaattatgaaggcagatgagaactttatactagggttggtgtggggaatctatttgtaataggatatgattacccaaataatcaagaatttaaatcatcatatatgtctattaacaagtcaaattgtagaaaggagcagaagtttattatataatgatgtacctatatggtataggggggaaaaagcgcatttacccggatagtgttcaaaaaaaacaagggggaaggtaaaaaaaaatggcaagaaagtacgtaagcacaggcaaaggaggcaagagtaaacac

SEQ ID NO: 496911 - DNA, 414 bp, Homo sapiens
  misc_feature (181)..(181): n is a, c, g, or t
aactcgagctcggtaccgattacgctcctagacgggcggcagagacgacccgtgatcggcagcctctgggaggcggaagtctctccaatgctcccatctggctgagaatttttgcttgaaccgcattccactttgtgtcttcaacacccagtatagcatcggctgtctagtggatcctcgnatatttaagtgaatggaaaaaataccacatgtcaaatgcaaaaacattacaaaaatacactcaaagataaatgtacactgggaattcagttggaagaatccactcacatcccgagactgggtgaagcagctcagtttaattttgttttttttgctgagacaagagtcccgctctatcacccaggctggggtgcagtggtgcgatcacagctcaccacagcctcgaactcctgc

SEQ ID NO: 496912 - DNA, 448 bp, Homo sapiens
  misc_feature (19)..(19): n is a, c, g, or t
  misc_feature (28)..(28): n is a, c, g, or t
  misc_feature (60)..(60): n is a, c, g, or t
  misc_feature (83)..(83): n is a, c, g, or t
  misc_feature (113)..(113): n is a, c, g, or t
  misc_feature (131)..(131): n is a, c, g, or t
  misc_feature (251)..(251): n is a, c, g, or t
  misc_feature (277)..(277): n is a, c, g, or t
  misc_feature (283)..(283): n is a, c, g, or t
gttaattaataaagccccncatgctganaaatgagtttccctcaagtgggcccagttttnagggagactggcacatgcctgtnatccctgcttctacacgagatttcttagancagtcgcagtctgccttntagattccatcctgttttgttctaactcttgggttcaattttagaaaaatcaggctgtaatcccagcacttcgggaggccgaggcaggtggatcacaagttcaggagattgagaccatcntggttaacacggtgaaaccccgtctntactanaaatacaaaaaaacaattagccaggtgtggtggcggtcacctgtagtcccagctactcgggaggctgaggcaggagaatggcgtgagcccgggaggcggagcttgcagtgagccgagatcatgccactgcactccagcctgggcaacagagcgagactccgtctc

SEQ ID NO: 496913 - DNA, 128 bp, Homo sapiens
ctgtgctatgaaatcatacgagtatatagtacgtaaatctactattacacagtacaccaggacggccagtgctatcgtgttagtgcagtctctttctgtgcaggtcgtccttccggaccagcaccacc

SEQ ID NO: 496914 - DNA, 310 bp, Homo sapiens
  misc_feature (4)..(4): n is a, c, g, or t
  misc_feature (6)..(6): n is a, c, g, or t
  misc_feature (276)..(276): n is a, c, g, or t
  misc_feature (300)..(300): n is a, c, g, or t
taantnaatggatgtgcaacaatgccctcttgggtttagtgttgttcctcacgaatccagccgaatctgcggtatacaattttaggtgcctcatcgaccattccgtggtattcgtcttttagccttagcactccagttatactttctcttgcgctggcaggtagccacattgccacagtcgacttctgaagtggtaggcttagagcacagggcggcacaacgtgtgcgtcttatgcgacgcttccaacgatgagtccctctgtcgtcttctcgcancgtatcgacgcggcggaattctgnccggggatcc

SEQ ID NO: 496915 - DNA, 153 bp, Homo sapiens
aatcacacaggtgtatattgtaatggtttaaggtgctataactgggctgggtgcagtggctcacacctgtaaccccagcactttgggaggttgaggcaggaggattgcttgaagtcaggagtttgaaaccagcctgggcaacaaagtgagacc

SEQ ID NO: 496916 - DNA, 110 bp, Homo sapiens
  misc_feature (37)..(37): n is a, c, g, or t
  misc_feature (76)..(76): n is a, c, g, or t
gccagctgcacagcattaaagaacctgcagaaaactnagaatgtctttaagctaatttgtttttgctaaaaagacngggacagaatctcacttctcctgtcccaggacct

SEQ ID NO: 496917 - DNA, 197 bp, Homo sapiens
aatcagctcggtaccgttctccgtgagactgacgagaggagggcgggaggtcggattcctgggtctagaggaggaagtgtgaaagtgtcgaccgactacccagaggcttcatatgctcctacagtgttacggctttggggccaaaaaaaatttctcagcgcccttagcgctttccatgagtctcacggagtctcacg

SEQ ID NO: 496918 - DNA, 2415 bp, Homo sapiens
  misc_feature (1883)..(1883): n is a, c, g, or t
aaaggaaatgattttttcatcgatgactctaaactagccagtgcagatgatattggtactttgatctgtaagaacaaaaaaccgctcatacaggaggaaagtgacaccattgtttcttcttccaagagtgctttacattcatcagtgcctaaaagtaccaatgacagagatgccacacctctgtcaagagcaatggactttgaaggaaaactgggatgtgactctgaatctaatagcactttggaaaatagttctgataccgtgtctattcaggatagcagtgaagaagatatgattgttcagaatagcaatgaaagcatttctgaacagttcagaactcgagaacaagatgttgaagtcttggagccgttaaagtgtgagttggtttctggtgagtccactggaaactgtgaggacaggctgccggtcaaggggactgaagcaaatggtaaaaaaccaagtcagcagaagaaattagaggagagaccagttaataaatgtagtgatcaaataaagctaaaaaataccactgacaaaaagaataatgaaaatcgagagtctgaaaagaaaggacagagaacaagtacatttcaaataaatggaaaagataataaacccaaaatatatttgaaaggtgaatgcttgaaagaaatttctgagagtagagtagtaagtggtaatgttgaaccaaaggttaataatataaataaaataatccctgagaatgatattaaatcattgactgttaaagaatctgctataaggccattcattaatggtgatgtcatcatggaagattttaatgaaagaaacagctccgaaacaaaatcgcatttgctgagttcttcagatgctgaaggtaactaccgagatagccttgagaccctgccatcaaccaaagagtctgacagtacacagacgaccacaccctcagcatcttgtccagaaagcaattcagttaatcaggtagaagatatggaaatagaaacctcagaagttaagaaagttacttcatcacctattacttctgaagaggaatctaatctcagtaatgactttattgatgaaaatggtctgcccatcaacaaaaatgaaaatgtcaatggagaatctaaaagaaaaaccgtcatcacagaagtcaccacgatgacctccacagtggccacagaatcaaaaactgtgatcaaggtagaaaaaggcgataagcaaactgtggtttcttccacagaaaattgtgcaaaatccactgtcacaaccaccactacaacagtgaccaagctttccacaccctccacaggcggcagtgtggacatcatctctgtaaaggagcagagcaaaaccgtggtcaccacgacagtgacagactccctgaccattccacgggaggcacactggttacatctatgactgtgagcaaagagtattccacacgagacaaagtgaaactgatgaaattttcaagaccaaagaagactcgttcaggtacagctctgcccatcctatagaaaatttgttaccaagagcagcaagaagagcatttttgttttgcctaatgatgacttaaaaaagttggcccgaaaaggaggaatccgagaggtcccttattttaattacaatgcaaaacctgctttggatatatggccatatccttctcctagaccgacctttggcatcacttggaggtatagacttcagacagtaaagtccttagctggagtgagcctgatgttacggttactgtgggcaagtttgagatgggatgatatggcggccaaggctcctccaggaggagggactacacggacaggtaagcggggaagggagttatttgtctaatttaagtttaaaagctaaaatcacatggccacggcgtgggcgctcangcctgtaatcccagcactttgggaggctgaggcaggtcgaatcatgaggtccggagatcctgaccatcctggctaacgcatggtgtaaaccccgtactctactaaaaatactaaaagattgcctgggcgttggtggagagagtcctgtagttcccagactaattcagtgaggctgaatgccggagaatagcttgaggctgggaagtgggacggttgcaagggagctgagatcaacaaccaatggcacgaccagtcatgggtaacacattggagaatccggcgtcaaaacaaaagaaaaaagaaaaacgacaaaaacatatagacaacacaacagaacaagcacaaaacgaaaacccagaacaagacaaagagaacaggagaagaacaaagttaaatgagacagaaacagacacgacagcaagacacaacaaagcaccaacaaaacgagcaagaggaagcaagagaacaacgaaagacaaaacacgaccaagcaccacacaaagacacaagaagaaaaacagagagcagagca

SEQ ID NO: 496919 - DNA, 1137 bp, Homo sapiens
ggcttggggaacgagggagcagtgacgcggtctcggtgtgggcccgggccgaactggctgcggacacctggtgcgccgatgagccgagcagccgccgatctcctgagcatggatcagtgcgtgacggtggagcgctgagctggagaaggtgctgcacaatgttctcaggcatacgggcagctgtgcagagcgcggcctggaggagctcatcgactacaccggcggactcaagcactgagatcctgcagagccacggccaagatgctgaattatcagggacactttacacttgtaatgacacagtgctgtaaaacgaataaaaggatactgtacaaaaattggcctccgaccacaaagacatccacagacagtgtaatctcaaggtatggaaaagccattgataagaatgtagattctgacattagcagtgtgggaatagatggcatgctggcaggcagacagccaaatggcttctcaatgaaagtgagaggatggagcacttctttcagaccaggaatagctaggatgtggcatgacggagcatctgatcaggaactctggatctatactgtaagagcccaagatcagaaggacaccataatgatggagctcacaactagaatattagacggcatacaaagtgtccagagtcacgagagaccatgactactgagagaagaccggccagcaggtcaaaacaccacgcggaaacatcggatctaatagcacctccaagcaaacgcagagcacccctacggaaacacaccaggacaaccacccgaacgtgagaacaagaacgacggcatagcgaacaaaacgcacgtcgaggacggcagcaaccaccaccaggcagcaaacggccacactgcacaaaaaacagatgagacaagagaaagatgaaagaagagacgaacagaggaccaagaacaataccatactaacaagacacgcacactacaaacgaggagttggcgacagcgcagcaaccacacgaggaaagtacccgtgcgagaaacaaacggagacaattcgcccacacagcatcaacgccaccaaatgggctacaaccagacacacataggcacagaccaccacccccaggaggcgcgaaaccaaataccacggcaggaccacaca

SEQ ID NO: 496920 - DNA, 252 bp, Homo sapiens
atagaatcttacatccaacattaaagtccgcccacagaacccatctaaatccccttgataaaatctaactgttagtccaaagaggaacagctctttggacactaggaacaataccttgtagagatgagtaaaataatttaccacccatagtcggcctaaaagcagccaccaattaagacagcgtacaagctcaacacccactacctaaaacctcccaaacatataactgaactccctaagaccctaggggca

SEQ ID NO: 496921 - DNA, 482 bp, Homo sapiens
gagagagcatcggccggcgacgttccggcggccatgtgcgaaaatcttccccaagggtactgcgtccacgtgccggtggcgtggggactccctgaaggcagagcggcagggcgcccgaaagtcgtgagtcgagtcttcccgggctaatccatgccgggtgaggagcgctgcttgaccggcaggttcgggcgccacagggtgcctgggtcgactcgggaacggcctggggtgctgcccttgggccgggacacagaacacccatctggctttaggtacagagcgtcttcatggaaagagtggtacatggtggcgatgacgcatctttctgacagcaaacgtgtcccaatcattaaaggccagtgggtctcctgatgaccgataaaggccaatttagcaggtacactgtgtccctctggaagatggacccagggctaatacatcctggggaaaccaggttcctttaagagtcggctaatggcttg

SEQ ID NO: 496922 - DNA, 160 bp, Homo sapiens
aggtactctgaggatccctgaatcgacggtttctctgctgactgagaccaggtttcggcctctcggactcctgctcagtccctatgacgggcgcacgtgggcaggtgctggaggtggtgcgctcgccgtcgccgccgctgccgctgatgctgcagcaatt

SEQ ID NO: 496923 - DNA, 564 bp, Homo sapiens
  misc_feature (439)..(439): n is a, c, g, or t
ttttttaagatggagtctcactctattgaccaggctggagtgcagtggcatgatctcgggttactggaacctttgccttccgggttcaagcgattcccctgccttagccttcagagtagctgggactatgagtgcccaccaccacgcctggctaatttttgtatttttagtagagatgaggtttcaccatgttggccaggctggtctcgaacacctgacctcaagtgatccgcctgcctcggcctcccaaagtgctgggattacaggcatgagccaccgcaactggctggctgctactttaacgggcagcgtatcagaagccaggtgctaaagaaaaagtcctgaattgaaattaaagtatctttctggctgacaagcagtagggtctaacaatgactgactcaccagtctggctaggttcttactctttgctctaagntcttgctatacaccttgctagattcttaaccaaattaatattggccccaaataatgggaactgaggtgcaccttataaaagataaaagaaggtcacgcagagacagagagtctcaaatgacaggg

SEQ ID NO: 496924 - DNA, 1336 bp, Homo sapiens
tccttagtaccggcatggaatgtatgggatctctctaaaagagacagcaaatgcttcttagatggatcgaaagacccacgagctgtgataccaatgttctatgaaaatgtggtatgtgtgcaacagagagaaataattgcgaaggactccagtggctgtctatattggggcatatgatgcgcttataatcgaggaacacgtgagactggcggaggagacgaacagcagggagggaatggcgttcttgcggaaggtaccatggagaagacagagcagtgaatggcaatgaagttgagtccatagtagagtggaagaagcaatgaacgaaaatgtagggaggaagactgggcaatatattaatggattgcatcgattatggctgtggggggatgagttaggaaaaaagatagggggatcgaactgatgaaaagggcatcaggggccatacgggtatatgtgggctgggggcaatgaagatatgtcatgtgataggggaagggagactggtgatggtggctggcaagttgggagacataggaggctaagtgtcgcaacttgatgcttatcggtgatagacgaaagagaatagagtggcaaagcaggccaaggaacgggaagggaaaggacgagagaaaaccccgaaggggcacggagactaaaatacaggaattccgaccaaacgagacctcgaagaaaaccgaggatagtaacaaaagacagaccaatcgaatccggggaacggaaaagctagaggacccacctaaggggagactaaggccctcgaaaccagcacatagacacacagtgagagaccattaacttggaagcgagtataaataagggtccggatccgaagaataaaatcctatgatggacactgacggcggagaaacgctgggaaatgacgctaccgcccttatatgcagaaccctctagaaattaatatcgatacaatcttaaatgaaactcaaaatctaaataaaaaagagagtgcggaaaccattaaggaggagatgcgaaggcaagagggcgacgggtagggagcgacgaaatgcgtagggaaaatgagcagcaaggggggagacatagaaatacgcaaagcccgagaaacaaagtaggacccacacacgaaagacgcaagggcggagtgaggtggacacctggaacggggggagttaggcggccgaggtaacgaaagcgcagagaggcggggggagtcgtgtgacgagtgctgcagcgagttagagatacaatgaggcgcgaagggggaacgcgagcggtgtggaggtgtgctggcggtacgcggtgtggtgtcgcaagagccgctgagaaagtc

SEQ ID NO: 496925 - DNA, 378 bp, Homo sapiens
gctgcgcaagagcaccgtgctagttgttcacatcaccttttacgcctggcccgctacccacatcctgccacacacaccgatgggaccgcctgcccatgatgatagaccagatcaagtctgctgctctgaggtaccgacagaggatgcgcacactatgtgaggccctggaggacgagtgcctaagactggaagcacgaatactgagctctatgaactgtcagaatccggagaacgcgagatccctgcttcaaggacctgctcatggacgctcacatggcccctagccagatgacctgtaactgctaaccaggcactggtgtggcttcggatggcaggctttcaggtctctagcgataatccgcgtggctttctttattc

SEQ ID NO: 496926 - DNA, 329 bp, Homo sapiens
  misc_feature (85)..(85): n is a, c, g, or t
  misc_feature (141)..(141): n is a, c, g, or t
cggggtggccccccttccctgggaaaatttttaaaaagggcaacgttggggggaggaaggaactggtttttcaatggccagtggntgtgggttatttcaggcctcaagctccggggaaagggcatttgaaagcccatccanaaggggcctagggggaaattaacccaaaaccttgaaatcagtggggtccaactgattttgttcccccggttccccttggccgccagttccgttttcctcccgggccgaaaggaacaagggggtcagctttgggggggccctccccagcccatttttgttgttaaacaaacaaaaccttgcaaagggga

SEQ ID NO: 496927 - DNA, 171 bp, Homo sapiens
agggcttcgtgccaatggttcagggtgcggtggccggtctcttgtaggtcttctctcctgccccaatccagcacttcccatcacaatgcactcactttgcaatcactcttggcacccagcatttccacagctcccaccatccagtaccttcctcaatcatgcactcatacc

SEQ ID NO: 496928 - DNA, 906 bp, Homo sapiens
  misc_feature (2)..(2): n is a, c, g, or t
  misc_feature (152)..(152): n is a, c, g, or t
  misc_feature (157)..(157): n is a, c, g, or t
  misc_feature (166)..(166): n is a, c, g, or t
  misc_feature (183)..(183): n is a, c, g, or t
  misc_feature (186)..(186): n is a, c, g, or t
  misc_feature (198)..(198): n is a, c, g, or t
  misc_feature (207)..(207): n is a, c, g, or t
  misc_feature (220)..(220): n is a, c, g, or t
  misc_feature (223)..(223): n is a, c, g, or t
  misc_feature (245)..(245): n is a, c, g, or t
  misc_feature (259)..(260): n is a, c, g, or t
  misc_feature (262)..(264): n is a, c, g, or t
  misc_feature (301)..(301): n is a, c, g, or t
  misc_feature (303)..(304): n is a, c, g, or t
  misc_feature (308)..(308): n is a, c, g, or t
  misc_feature (358)..(358): n is a, c, g, or t
  misc_feature (382)..(382): n is a, c, g, or t
  misc_feature (400)..(400): n is a, c, g, or t
  misc_feature (452)..(452): n is a, c, g, or t
  misc_feature (567)..(567): n is a, c, g, or t
  misc_feature (579)..(579): n is a, c, g, or t
  misc_feature (583)..(583): n is a, c, g, or t
  misc_feature (593)..(593): n is a, c, g, or t
  misc_feature (603)..(603): n is a, c, g, or t
  misc_feature (817)..(817): n is a, c, g, or t
  misc_feature (898)..(898): n is a, c, g, or t
gnaagagtgagttggctctgtgagaccatcactgataaagacacatacagttagcaccacacatttataaatgcagatagccacaatgacctttccaatatgtacaagctccatttacacatccacacatgtatttacagctaataaataanatgtnaagccagancatccttgatatatatnacngagtttttcggngccagagtncccagtgctatgngcngctttagtgaatcttttaggtnaatgcgccctgggnngnnncccaaatccagaaatttaatgaattaatagggggggngnnggcngcgggtcatacatcattttgtttttggggggggttcgttccgggcctggnggtgttaatcacaacattggtccnactatttatgggcgcggncgtctctctcagagaaagggtcgaagttctggcacatcagggacaatttctnctccgacatgttccaatacatcccttggtcgactgtgttcccttccgaattatgctgaagggcaacacacatgcggagctttctagtatgtgttcagatatcacatactttcgcngtcgggttcccngctntggcctctgngatatttganatctttgtcatttcatatttgtacgtagaagagcattctgaaaaataggagatctagtttataaatagttgttcactcactcttgattagttgttaaaaacaacaaatagcaaccctcatggtactccatctggctcattgcacgcgatggtttacaagcactgcttaggaatccaccccaggaacctctccaccctttttacttagtaaaaanggtccttgtctaaaatctgtagaagctcacacaatgcaaaatttgaactcaaacctatcttttcatgtcaaagccaggganaaaagaga

SEQ ID NO: 496929 - DNA, 267 bp, Homo sapiens
catgaaatattacacatgaagaccacttgtatatctaatgtttgccaggacaaggctcggttcagtagatgagacattatttaaaagataaatttcaacaagatggtaaatgacacacttgtctttctacgacaatatttgtttgaaacctatgtaatttctctggctaacttttcttgtagcttaacatgacttttttaccacacaacaaacacaaacaacaaccccacaacacacacaatcaacacaccaaaaacacacacaaca

SEQ ID NO: 496930 - DNA, 379 bp, Homo sapiens
ggccctctcggtgattacctgcattgtggggaccctgcaccagctcccgcctccatctgaatgatgtggctccatgtgcatctgtgtcctggtccctgctgtgttgatagcctgtggctggaagctcttctacgtcacatgtgctgcctgtttgttggctgtgcatgaacttgtgatgtgacttggggagggagagccatcttcgacaatgatgcacatgtggaaggttgttttgaagacgttcagcctctacaatgaatgcttgcttgactcttttcatgagctggccacgaccaggtggtggtcctgctccatgatgtcctgtgatgtgatgcgtggaggaggacgaaggtccggtacttcgggaaaggctacatgg

SEQ ID NO: 496931 - DNA, 1148 bp, Homo sapiens
agaggatccctctgttgagggattctgatagcatagtctataaaaataggagatgatataataaagattttaatatctaattgtctagatggactttgtgaactatctgatggtaaatatcagataaaagatagttaaggatagaacatcaaagaaccaaagctaaatctatttttttttttgtttttttagtagagacggagtttcgccaatttggccaggctggtctcgaactcctggcctcaagtgatcaccccgtctctgcctcccaaagtgccgggattagaggcgtaagccaccacgcccggccgcagctgctcttcatcatcgtcataaaggtagttccaagtacaggctctggatggggtgacaggatgtctcctatctcctaaagctgacaattgataccgctgactgaacaagcactctggaaaatgacagacaccgcattccccaggctgacagatgagctgtgagagcgatccgaatgttgtacgactccagcctcacactattcctctgtgtttcatggtaacccttatgtgaccgttcctcccagggaaaccaagagcataattctggagaagttcgcctgtgttccttgatacctgattgtgccatttcctggacactgtgcaatttcctggagacacttcccagcaggggaaaccgcgtggattgttggacccccgatgaaggagcgtggacttccatctacgcagcagtcaccccagagctggaaggagttggtggccgttacctatacaacgagaaagagaccaagtccctccacgtcacctacaaccagaaactgcagcagcagctgtggtctaagagttgtgagatgactggggtccttgatgtgaccctgtgatatcctgtctcaggatagctgctgccccaagaaacacattgcacctgccaatagcttgtgggtctgtgaagactgcggtgtttgagtttctcacacccacctgcccacagggctctgtcctctagttttgagacagctgcctcaacctctgcagaacttcaagaagccaaataaacattttggaggataatcaccccaagtggtcttcaaccataaactttgtgattccaaagtgcccagttgtcacaggtgccataaataattacattttcca

SEQ ID NO: 496932 - DNA, 191 bp, Homo sapiens
ccgctgtacaacctcccaggttccggccagacttacgtttttgagaccgcccagtagggaatcgccgtttgcggaccgaggcggcggcattcaaggccgcgcccggctcacgcatcagttgacggtaacgcccgcctcacgcaccacatcaccccaaagcgagatctctttcacgatctggtcgcggaagt

SEQ ID NO: 496933 - DNA, 999 bp, Homo sapiens
  misc_feature (941)..(942): n is a, c, g, or t
  misc_feature (946)..(946): n is a, c, g, or t
  misc_feature (948)..(948): n is a, c, g, or t
  misc_feature (969)..(969): n is a, c, g, or t
  misc_feature (987)..(987): n is a, c, g, or t
agaggatccctctgttgagggattctgatagcatagtctataaaaataggagatgatataataaagattttaatatctaattgtctagatggactttgtgaactatctgatggtaaatatcagataaaagatagttaaggatagaacatcaaagaaccaaagctaaatctatttttttttttgtttttttagtagagacggagtttcgccaatttggccaggctggtctcgaactcctggcctcaagtgatcaccccgtctctgcctcccaaagtgccgggattagaggcgtaagccaccacgcccggccgcagctgctcttcatcatcgtcataaaggtagttccaagtacaggctctggatggggtgacaggatgtctcctatctcctaaagctgacaattgataccgctgactgaacaagcactctggaaaatgacagacaccgcattccccaggctgacagatgagctgtgagagcgatccgaatgttgtacgactccagcctcacactattcctctgtgtttcatggtaacccttatgtgaccgttcctcccagggaaaccaagagcataattctggagaagttcgcctgtgttccttgatacctgattgtgccatttcctggacactgtgcaatttcctggagacacttcccagcaggggaaaccgcgtggattgttgggtgagtagcatgtgtgccattagagctctgtacgaaccaggaggaatgagtttcttttctttggcaaaccttgattcaatacttggacctagagtgcatggatgtcccagtgaagctactcttttatgcccttccagtagccatgaataggttttattcaggtccagcaatggatgggaccatctcattcattcattcatctatccatccatccatgcatctgtccatccatccatccatccatccattcatcgannctcnancagggatcctctggaaacagnctatgaccaagatacgantcactgcctctt

SEQ ID NO: 496934 - DNA, 372 bp, Homo sapiens
gctagacattcttttttcttgattttttttaagaagagtcttactcagacagattgggggggcaaaatcacaattcactgcagcctccactgcctgggctcaaacaatcctcccacctcagcctttccagtagctgggatcagagggaggcatgtaccactacacctggctattttttaaaattattattatctgtagagactagatcttgccattttgccaaggctgatcttgaactcctgggctcaagcagtctctaacttggcctcccaaagctggaattacagccgagggccaacatgactggctaatttttgtatctttgggtggccagactgatctcgaactcctgacctaaggggaacctcccac

SEQ ID NO: 496935 - DNA, 1087 bp, Homo sapiens
  misc_feature (10)..(10): n is a, c, g, or t
aattcatctnggagacttggcatgcatgttatcatagctggaaataatgacagcaaagccaaacaagttgtaagcaaaataaaagaagaaaccttgaacgacaaagtggaatttttatactgtgacttggcttccatgacttccatccggcagtttgtgcagaagttcaagatgaagaagattcctctccatgtcctgatcaacaatgctggggtgatgatggtccctcagaggaaaaccagagatggattcgaagaacatttcggcctgaactacctagggcacttcctgctgaccaaccttctcttggatacgctgaaagagtctgggtcccctggccacagtgcgagggtggtcaccgtctcctctgccacccattacgtcgctgagctgaacatggatgaccttcagagcagtgcctgctactcaccccacgcagcctacgcccagagcaagctggcccttgtcctgttcacctaccacctccagcggctgctggcggctgagggaagccacgtgaccgccaacgtggtggaccccggggtggtcaacacggacctctacaagcacgtgttctgggccacccgtctggcgaagaagcttctcggctggttgcttttcaagacccccgatgaaggagcgtggacttccatctacgcagcagtcaccccagagctggaaggagttggtggccgttacctatacaacgagaaagagaccaagtccctccacgtcacctacaaccagaaactgcagcagcagctgtggtctaagagttgtgagatgactggggtccttgatgtgaccctgtgatatcctgtctcaggatagctgctgccccaagaaacacattgcacctgccaatagcttgtgggtctgtgaagactgcggtgtttgagtttctcacacccacctgcccacagggctctgtcctctagttttgagacagctgcctcaacctctgcagaacttcaagaagccaaataaacattttggaggataatcaccccaagtggtcttcaaccataaactttgtgattccaaagtgcccagttgtcacaggtgccataaataattacattttcca

SEQ ID NO: 496936 - DNA, 1055 bp, Homo sapiens
tgacaactgggcactttggaatcactttttcgtcttccgtcgtgattgtcaggcctccccaaccccgtggaacttggaatttttatactgtgacttggcttccatgacttccatccggcagtttgtgcagaagttcaagatgaagaagattcctctccatgtcctgatcaacaatgctggggtgatgatggtccctcagaggaaaaccagagatggattcgaagaacatttcggcctgaactacctagggcacttcctgctgaccaaccttctcttggatacgctgaaagagtctgggtcccctggccacagtgcgagggtggtcaccgtctcctctgccacccattacgtcgctgagctgaacatggatgaccttcagagcagtgcctgctactcaccccacgcagcctacgcccagagcaagctggcccttgtcctgttcacctaccacctccagcggctgctggcggctgagggaagccacgtgaccgccaacgtggtggaccccggggtggtcaacacggacctctacaagcacgtgttctgggccacccgtctggcgaagaagcttctcggctggttgcttttcaagacccccgatgaaggagcgtggacttccatctacgcagcagtcaccccagagctggaaggagttggtggccgttacctatacaacgagaaagagaccaagtccctccacgtcacctacaaccagaaactgcagcagcagctgtggtctaagagttgtgagatgactggggtccttgatgtgaccctgtgatatcctgtctcaggatagctgctgccccaagaaacacattgcacctgccaatagcttgtgggtctgtgaagactgcggtgtttgagtttctcacacccacctgcccacagggctctgtcctctagttttgagacagctgcctcaacctctgcagaacttcaagaagccaaataaacattttggaggataatcaccccaagtggtcttcaaccataaactttgtgattccaaagtgcccagttgtcacaggtgccataaataattacattttcca

SEQ ID NO: 496937 - DNA, 1841 bp, Homo sapiens
  misc_feature (10)..(10): n is a, c, g, or t
  misc_feature (1181)..(1181): n is a, c, g, or t
  misc_feature (1207)..(1207): n is a, c, g, or t
  misc_feature (1705)..(1705): n is a, c, g, or t
  misc_feature (1716)..(1716): n is a, c, g, or t
  misc_feature (1720)..(1720): n is a, c, g, or t
  misc_feature (1736)..(1736): n is a, c, g, or t
  misc_feature (1750)..(1750): n is a, c, g, or t
  misc_feature (1755)..(1755): n is a, c, g, or t
  misc_feature (1767)..(1767): n is a, c, g, or t
  misc_feature (1782)..(1782): n is a, c, g, or t
  misc_feature (1799)..(1799): n is a, c, g, or t
aattcatctnggagacttggcatgcatgttatcatagctggaaataatgacagcaaagccaaacaagttgtaagcaaaataaaagaagaaaccttgaacgacaaagtggaatttttatactgtgacttggcttccatgacttccatccggcagtttgtgcagaagttcaagatgaagaagattcctctccatgtcctgatcaacaatgctggggtgatgatggtccctcagaggaaaaccagagatggattcgaagaacatttcggcctgaactacctagggcacttcctgctgaccaaccttctcttggatacgctgaaagagtctgggtcccctggccacagtgcgagggtggtcaccgtctcctctgccacccattacgtcgctgagctgaacatggatgaccttcagagcagtgcctgctactcaccccacgcagcctacgcccagagcaagctggcccttgtcctgttcacctaccacctccagcggctgctggcggctgagggaagccacgtgaccgccaacgtggtggaccccggggtggtcaacacggacctctacaagcacgtgttctgggccacccgtctggcgaagaagcttctcggctggttgcttttcaagacccccgatgaaggagcgtggacttccatctacgcagcagtcaccccagagctggaaggagttggtggccgttacctatacaacgagaaagagaccaagtccctccacgtcacctacaaccagaaactgcagcagcagctgtggtctaagagttgtgagatgactggggtccttgatgtgaccctgtgatatcctgtctcaggatagctgctgccccaagaaacacattgcacctgccaatagcttgtgggtctgtgaagactgcggtgtttgagtttctcacacccacctgcccacagggctctgtcctctagttttgagacagctgcctcaacctctgcagaacttcaagaagccaaataaacattttggaggataatcaccccaagtggtcttcaaccataaactttgtgattccaaagtgcccagttgtcacaggtgccataaataattacattttccaacataaatgtgccattttccttgccgcgttaatacaactgagtccaaaagttccaagagagatgctctcttttcaggggctgcaatgtcctctntgagacctagtggtggatgaggtctnctgtttgattttgttcctgcactcactcatttttccagagacccagctgtgattcacaggtgtcagacatggggaggtgtgagccttgcttgctacagcctgtaggatgagtttgacgtggccagcagcaccatctggtcaacctcattccagaatggcacagtcacaagtgaagcatgccactgtcaaatccgagaatgtaaaccgctgaacagctatggatcaaatggtagccctcaaaagatatgttcatgccctaaccctcagaacctataaatattactttatttggaaaagaatctttgcagatagaattaagaattttgagatgggtcattatggatcatcccagtgaacctaatgccatcacgagggttcttatcagagacaggtagagggagatttgagtacagaaggacaagatattcatgtgatgatgcagacagagactggagtgatgccaccacaagccaggcaatgcctggagccaccaggagntgggacaggcngganggattctcccttatanccctcagagcaatnttggnccctctgacgtnttgactttagacttntggtccccagaacgganagagaataaatctttcttgttttaaggctccaccaacttcta

SEQ ID NO: 496938 - DNA, 298 bp, Homo sapiens
cattgacggccagtgtatagagcgctgagcagtagtagagacagctgagctagtgtatggagacagggacagtctatacccctgacgtccagtcggctctatccgctgagtcaagccatctctcttccaaagtccagctgctctctgaagtcaagtttaccctctccagtcaaaccacgttactctcttctactgactgagtctggggtctttatcggcagaggatggggtacaggacgggccatcggtagttttgaaaaaggcaacatttgatgggcgaaaacggcatcttcatcgg

SEQ ID NO: 496939 - DNA, 1075 bp, Homo sapiens
  misc_feature (10)..(10): n is a, c, g, or t
aattcatctnggagacttggcatgcatgttatcatagctggaaataatgacagcaaagccaaacaagttgtaagcaaaataaaagaagaaaccttgaacgacaaagtggaatttttatactgtgacttggcttccatgacttccatccggcagtttgtgcagaagttcaagatgaagaagattcctctccatgtcctgatcaacaatgctggggtgatgatggtccctcagaggaaaaccagagatggattcgaagaacatttcggcctgaactacctagggcacttcctgctgaccaaccttctcttggatacgctgaaagagtctgggtcccctggccacagtgcgagggtggtcaccgtctcctctgccacccattacgtcgctgagctgaacatggatgaccttcagagcagtgcctgctactcaccccacgcagcctacgcccagagcaagctggcccttgtcctgttcacctaccacctccagcggctgctggcggctgagggaagccacgtgaccgccaacgtggtggaccccggggtggtcaacacggacctctacaagcacgtgttctgggccacccgtctggcgaagaagcttctcggctggttgcttttcaagacccccgatgaaggagcgtggacttccatctacgcagcagtcaccccagagctggaaggagttggtggccgttacctatacaacgagaaagagaccaagtccctccacgtcacctacaaccagaaactgcagcagcagctgtggtctaagagttgtgagatgactggggtccttgatgtgaccctgtgatatcctgtctcaggatagctgctgccccaagaaacacattgcacctgccaatagcttgtgggtctgtgaagactgcggtgtttgagtttctcacacccacctgcccacagggctctgtcctctagttttgagacagctgcctcaacctctgcagaacttcaagaagccaaacctccccctaccaatatccttcccgtgagtggttgtaaaacatttgttttttggggttttatttttcagaataaaaaagattcaacaaaca

SEQ ID NO: 496940 - DNA, 105 bp, Homo sapiens
cagagtgataggatgtttcatggttgtggtatgggtcaaaacctagtccggagtaacgtcggggcattccggataggccgagaaagtgttgttaggtctacctgg

SEQ ID NO: 496941 - DNA, 1079 bp, Homo sapiens
  misc_feature (10)..(10): n is a, c, g, or t
aattcatctnggagacttggcatgcatgttatcatagctggaaataatgacagcaaagccaaacaagttgtaagcaaaataaaagaagaaaccttgaacgacaaagtggaatttttatactgtgacttggcttccatgacttccatccggcagtttgtgcagaagttcaagatgaagaagattcctctccatgtcctgatcaacaatgctggggtgatgatggtccctcagaggaaaaccagagatggattcgaagaacatttcggcctgaactacctagggcacttcctgctgaccaaccttctcttggatacgctgaaagagtctgggtcccctggccacagtgcgagggtggtcaccgtctcctctgccacccattacgtcgctgagctgaacatggatgaccttcagagcagtgcctgctactcaccccacgcagcctacgcccagagcaagctggcccttgtcctgttcacctaccacctccagcggctgctggcggctgagggaagccacgtgaccgccaacgtggtggaccccggggtggtcaacacggacctctacaagcacgtgttctgggccacccgtctggcgaagaagcttctcggctggttgcttttcaagacccccgatgaaggagcgtggacttccatctacgcagcagtcaccccagagctggaaggagttggtggccgttacctatacaacgagaaagagaccaagtccctccacgtcacctacaaccagaaactgcagcagcagctgtggtctaagagttgtgagatgactggggtccttgatgtgaccctgtgatatcctgtctcaggatagctgctgccccaagaaacacattgcacctgccaatagcttgtgggtctgtgaagactgcggtgtttgagtttctaaaccactgccaaggttgtcctctattgagaagtgctcacttgagatttagagcaataattggggaaataccaggtttacatattgggatcagggcgtgtgcgggctaattatatttcctaaaaaaaaatggtctttggggaaggaaaggagtaattcgccttaaggaaggccag

SEQ ID NO: 496942 - DNA, 1820 bp, Homo sapiens
  misc_feature (169)..(169): n is a, c, g, or t
  misc_feature (247)..(247): n is a, c, g, or t
  misc_feature (479)..(479): n is a, c, g, or t
gcgagaactgtacacgactattcgtcagccttcagactgtcgacattcctaggaaacattgtctagcattcacttcgtgcgaaggagtatcagcgagcagcttatctgtgaagggtctcgctccagacgcgaacgcctggcggcgcaggaggacttcgatctctagcantcacagtgatacgaagctgctagacgcgtatcatttgagaagagacgcaacagagatagaatgcagggcctaccgcgnggtatgaccacatgtgggctcggggagctcaaacgaggagagaaggataccatgggcatactcgatatccgggcactgaatttctcgataaggtgccattggatcagcgacgcagaacagtttggagtacgaaagtgggctcgtctgatcgaccctaggagaaccttccccagattcatcgagaagagtcgcaggcggtctgtggttgcctagtgtcctcgaacgtttcgcnccggaagtctgacacggactggggtctcatcccagagtgcagtgacactcgggggcttggtccatgtggcttgtggcacacgattcccgtggaggaaagtgtgtcggttctcgcgtgtgtctgacagaaacagaggtcactaaatgccgaggcggaagcggagtggtcacgcggtagtctggaattggaaccctccaaaggggggttgatgtttgaccctttatggtgctcccgagggtctggaacttctgctcacaaattggccccaccaagcggaattaggagggcactttggagggagttctaaaattctcgccaatttgtagttaaaggcgccggcaaccacaaattgcaacaagggttcttgcaccggctttgtctttgttgtgtatccgaagaagaaatgatcgaagcagacgcggaggggattggtggcggaatattttccgcatcgacaaaaggggcgacattctaagaggccgaggcggttttgatacaggaaaatgccggatcacctggggagttgatcttcacaagggagacgcaaatcctcttctatgtggggcggaattgaggggtgaatcttcccgttaagtttaggttccggtgcagttcgagaccccatacatatgggcggggatccggttcggtttgccgcacttccacaccgggcgctcggacttcgaagaccttatacagggaaatccttagatacgataggttaaagcccggtgtggccgttaaacgacacgaaaacacagcggcacaacggaacttgtccgcacaggaatgtgggaacacgaccatttttcagaagggcacctccggttaagctttttgcggtgcggacacttagttctgtagcacaccctttcgcgatcttgggcagaacatttcacaaaaaccgtgtaaggcccttgagatttggagagcagtggtcttgggccgccataagaaacgagagcacacgtatggtggaggcactaacactctagggtaggaagcactatcaattcaagccacttcccgcagttgagaaggcatcgctttgagttagaataggtatgtgacgggaggcacaatacaaagcaagtgcgtcacgtgccacacacattgtggttgcagagcagcgatcgcgtacgcacaaagctaagctgcagatgattccccaaatagagacccccccaaagatgatcgtattttgttaataccaagagcacgccggtgtaacaacttgaccatgtgggagggaccacacactcacaatgtatgcaagagagcggacactgagtaaccactggtgtgaatacagacggaacgttaactgtgcctaaagaggta

SEQ ID NO: 496943 - DNA, 283 bp, Homo sapiens
tgagctactccagcctgggcagtaagagctactccagcctgggcaataagagctactccagcctgggcaataagagctgggggtttcgccatgtcggccaggctggtctcgagctcctgacctcaggcgatccgcccgcctcggcctcccaaagtgctgggattacaggtgtgagccaccgcgcccggctttagaattctttctggagggaaatgcattgtaatttcctggctaccttttagtattggaaaacttttggaacatagctcttattgcccaggct

SEQ ID NO: 496944 - DNA, 1283 bp, Homo sapiens
gctcttgtgctccctgccttagtcatgctggcctgggacatctggtgaacatggcctctgtctactgcgtgcagcagcaacgactgtgtggcctcggcctgggctctcccgtcgtccgtctggcgtggcctacacagaccgagacggggctgtttactgtgctacctggcctgatggaatgcccgatgagcctgtgagccccagggctgcccgtgtgagccgccacacccatgttgcatcatgtgccttgcccaggcttggtgacacgtatatatgtgacgcatggtcataaaaggctagccaaacatcaatcccgcctcttacacccggacaagcccctggctggagcaatgtagcctgcaaatccagtgcccctgcgctgcatgaccactgccagtgtaccacttaccagcacgtgcagcgattatctgacacatggcgcgacacggcacagagcgccatcactctgacgcgcacgctgctcagtactatactacgaatcaaacatcttcacttgtgcgcgcacgactcttcctactctgaaaacgcgtcccaaacctctcaggacgacatgtgatgacgcaacagacgtggctctcgcccaacgcggctcacgacggaacctgacaaaccaggaccaccggtcacacccacagcaagcaggcgaaagccaccatcgtgctccgaacacctacatgcctggcaatcttcagcgagctttgaccacctattctggccagccaacgttcctcgaccagtgcacatccgatatgcgcggcgactcgcgcctgacacgcctgcattgggcattcctacccaagaccctggctgaacacagttccggcctacaccgcgcactcactgcctgccactacttgcgcaatgccagcataaagggtcatgtctgcaacaactcagacagggccacacagagatctactttcacgaaccaatgttccgacacactgcacggcataagagtgagaatcaaacaccaaaacacttcaaagcacagaacgaacgtccgatgtaacagcagtcaccctattcgttgtagttacactggaaataaggaacgctataacaaacgccacaccaggtaaccatgtatgctctaactaccccacaaagatcgacgccgcaacccgagggactggggaacaacaccgcgaacgtaacaacctaccacacgacaaaactttcagacacaacatcagagtagtataatctaaagacgacagatcaccgtagagcactaacaaccgaccacaaagcagccataa

SEQ ID NO: 496945 - DNA, 125 bp, Homo sapiens
aatttagtcattgaaaagttgatctaaatctcttctaattcgtttaagaacattacttctttggactgtgagtcttggccagtatttgagaagtgccatcaccacggttccgtgagggtgctgtc

SEQ ID NO: 496946 - DNA, 676 bp, Homo sapiens
  misc_feature (252)..(252): n is a, c, g, or t
gtgctttggcggctccgccctgttcccgcgggcgtttggggtttgcccggggctgcacgcttccagccctttcgctcgccctttgtttgggtggggggcgggccttgccggcctcctttgaccttgccgggcctgggggaattggtctcccccctccccgccggttcaagaaaaagccttctggttcctggcgcagaggccggcgctggtctccccaccctctctttggccgtcaagccaaagtgggggacnccgcggttcaagggttggttgggaattgccaagaatcacccactttgccctcccgggttgcctccgggtcggaagcgcgggtgtcgggcctttggccgggttttgccccgttttgggttccttgggggtggggccctccccccttgtgggggggtccccctttcacccctttgggaggccgggggtggcctttaaggtgggcccccccttgcccccggccctggtgtttttgcgggttttggggggctttgccccttttgtcaacccgcgggtttgacccccctccccttgggggccccgttggattgtggggttggggcctgccctttgcctgtggggaaatttacctgtggggccctttggtggggggccggggccctgcccccccctggggtttcaatttaggggctttttccccccttta

SEQ ID NO: 496947 - DNA, 2199 bp, Homo sapiens
ctgggcccaggacactgaaggcccggtgaggctccagcagcagcagcagcaagcagcagcagcagcagcagcagcagcagcagcagcagcagcagcagcagcagcagcagcagcagcagcagcagcagcagcagcagcagcagcagcagcagcagcagcagcagcagcagcagcagcagcagcagcagcagcagcagcagcagcagcagcagccactatataccggcggcgccgtctcgacccagcaggagtaggcggacgggacggaggggggaggaggagggcgcgcccgtcagtacgtccgctcggtaggcgcgggcggcggagatcgtcgtaagtccgacgaagaaggaagagcgaggtacaagagagacgatcggacgtagtaggcagacagcaggaggacggacgaacgcacctcgccactcgtgactagcccctgcgatctcctagaccgccgcccggttcgtacatccatactcacgtccctacctgagcaggagagagagaagagagtgcatccctccctccctcgcctccctccctccgtccggccggctgcatgcatgcgagccggcgcgcccagcatgtcgtaccctcgactccgcccgccacgcacctcaatcagtaacaggctgcagctggctgccctcccgacctcccgacctacctgactaaacgtagctaacttactacgctaggaacggtcggttgcctcagctacgcataccacgctacgcacggagacgacacgcaccaactcacctagccaaccgatgcaagcatgtcgccctgcctcgttcgttggattggattgatggtggcgaggaaggacgcaaagaacgccggcaggcgcaaggggagcccgtaccgcccggcgaccgagcgacagagaagcgagacgtagcaggaccacgcgcagagcgaagaggcaaggagagatgggcaggggaagccgcgccaagcgaagcagggaaggaaaggagcagcgccaggccacagcagccagcaaccaagaagagacacgagcggcgagaggaagacgagagggagagaggagaggcaagccgagagaggggaccaggcagacgacgcgggacggccggccgagcaggcagaggcaccgcccgcgcgcagccaggctagacgagcacaggcgaggcaagaagtaagtcagataccaggcaagagaccggacagacggccgcccgccgtgccagcacgcacagcacgacggaggcagcccggcacgcgaacggactcgctcccctccgcctcctcacggcccacgacgccaccgagcggcgggcacggagcaggaacgctacgtccgccaccgacggagacgagcgagcagagcgaccgcaccgcacagaggctcagcgccacggcacgaggagaaagcagagagcgtcaggcaggcagcccagctcaactagctagcgacgaggcggcggcgcagagccagcacaaacacagtcagtcagtacagtagtaacggacgggcaaggacaccaaacgaccgcacgactcgcgagagagtgcagtgagaaggaaggacaccacgacacgaacgacgacacacacaagagtcccaaggcgaggagaggagaggacgggcagaccgacccgccgacgaaccgcacgacaggcatgcgacagaagaagaatgcgatcagacggacgagaccagaagagaagagaagcgagatagcgacgagcgagaacgacgcgccgcgacgggcggaacatcagcgcgggagcggacgcgaacgaccaccgagaagagaggacgacggatcaccagacgggcagcacagtggcagcacgtagagagcaggcaaggaggcggcgcgactgcaaacgtagccagtagcgagggagccgcccgcgacgtacaggcagccgaagggccgacgagcgagaggagagtaaggcaggaacggcagacaagtcacagcggcaaggagcagagagagaggaggaaggagcagtagggcgctcggcaggacggcggacggcgagagagagaggcaggagagagagcagaggagaagagctgcagaggcgggcgcgaaaagagcgagcaggcagtagaacaagcagcatagactgagaggagcagcgaaaagcagagggaggagcgcgactcgtgcagccccagccagcgctctgctctctcccctcacgcggaggagg

SEQ ID NO: 496948 - DNA, 108 bp, Homo sapiens
  misc_feature (77)..(77): n is a, c, g, or t
ccgtgtcgcggatctaccagagaaggcggagatgagtagcagcacggggtgagtaatatacgtggtatgggtagtgncatgtagagtagaagagatataggatgggtc

SEQ ID NO: 496949 - DNA, 856 bp, Homo sapiens
tctggtcctcgcgcgctcgcgtccctcgtgcgggctccagccgcagcttatcttcggctcccgagcttgggtggcgcggtcgtgccctcgtaattggcctccgaacgcggctcgaatggcaagccaaaattccttcacggaatagaatatgatacatttggtgaactaaaggtgccaaatgataagtattatggcgcccagaccgtgagtatcctacgatgaactttataccaattgtgaggtgtgacaggaacgcattgccaaccctctagattattatacacgctttttggccatctttgaagcgagtcggtgcgctgatagtcaaccaggatttatggttcttgcattccaaagaattgctatctgcaataattgaaggccgcatgattgacggtagctgtaagggtataatttaaactgattcattttcctctcttggtatggtcagactggatcagggaactcagactacaatatccaatagtatacactgaacgtctattacgccaattaggagacaacttgaaattgttaggatgtgaacttggcagcagagatacctgtgcatcccaacgatcatgttaataaaagccagagctcaaatgatacttttcccacagcaatgcacattgctgctgcaatagaagttcatgaagtactgttaccaggactacagaagttacatgatgctcttgatgcaaaatccaaagagtttgcacagatcatcacagattgggacgtactcatactcaagggatgctgttccacttactcttgggcggaatttagtggttatgttcaacaagtcaaatttgccatgaccagaattaaagctgccatgccaaaatctctg

SEQ ID NO: 496950 - DNA, 594 bp, Homo sapiens
gcacgagggattaatgaaatcatcgctctttaggctgatgggggaaatacctgtgtctcacgagacattgacatgaagggcttttgacaggaaaggccatgacaaagtttttatacaactgaaggagcggggatataggatacaactgagcttgacatgtagttaaggcctgagccgtgaatcgttgacagggaagttctgaacagcccagaacagggcaaactctgcattatactcatggctgagccaatgctcaattaatgcatgcattctcatgagacacgagctttgtcgtaacaccgtgctcgagtccactggaacactctgcgggctgcacagactggagcctgaggcatcctcgttgatacaactgtactgtcgcacgctactgaagacctgggactacaggcatgtgcctcagaggacggtgtaggcaagcatggcccccaggtaccaggtttaacgatgcttgcacggatggccctaagggctaaaacgagttaaccgagtggccttgactgatcaaagtggatgggtatgccattggttaaacaacaatggtcactcgggactcattccttgtcgcaacaaaaa

SEQ ID NO: 496951 - DNA, 518 bp, Homo sapiens
  misc_feature (44)..(44): n is a, c, g, or t
  misc_feature (52)..(52): n is a, c, g, or t
  misc_feature (145)..(145): n is a, c, g, or t
  misc_feature (362)..(362): n is a, c, g, or t
  misc_feature (375)..(375): n is a, c, g, or t
  misc_feature (431)..(432): n is a, c, g, or t
  misc_feature (440)..(440): n is a, c, g, or t
  misc_feature (499)..(500): n is a, c, g, or t
gttaaagaaatatttggatgttaaattaactcactatggttttncacctggnaaggaaacaaattacgtactagagggcattgactggttaaaaacttgtgtatcccgggaaggacctgcggtacaggagtcagccatgtctgtnctgtgtggaaccacctgatgacatggttaacgaggaagacgatgtgttgaccggctgccgtttgaggactttggtcacccagactagacaccttctgtgctcatgtttggaaagctgaaagggaaggacagctgtgccctcctgggaagcttcatgtgtccctggggctgtgcttagcttttccttttacagctgtttacagacaaggccaggcctntaggcagatgggncattggttctttgtgatgttttgctcagagggattattgaacattttaattttttnnaaaagggnttgatgttggtttttttttcccaggtgttttataaattaaatcccttttaattatttanngggttatttaaacctctt

SEQ ID NO: 496952 - DNA, 770 bp, Homo sapiens
tatttataccgcggattatgtagaggtgagtggcgccaagcgtgggctcggccgctgaaattgcttaccgctggcgctccttacaagcgggagggatccgcgtgtggacccatggaagcgggaggagcctggcggcaccccctcttcctcacttccctgtactctcatcgctctcggctccgacacgaacaaggaagcaaatgagctgatggaagatctgtttgaaactttccaacgatgacgatgggattctccaacatggaagatgatggcccagaagaggacggagcgtgtggctgagcctccaagctaactttaacaccccgtcaagctctacggcttgaggaactactgtgcccaacccttacctacattgaacaacatcacgactagcgaagggaccctactctgaacagcgctgactcactgaccgaaacccttcaggcccaaacaggcactgacacggaggctacgacacacggtcgagaatgcccgcaagccagctcccggacgctccccctcacgtaagccctgatttcctggtatccccagcaccgcaacacagggcacaggatccaactcccaagcaacagtgagacatgggcacaaaagcgcacatgctctcaggcgctctcgtggtcaccagtatgccgcgcgtaccgttgggccagcccggcgcacgcgcgaagtgctcaaacgtacccgcatggcccaggttaacccacccacggaagtaatgccgtgtaacagacacctgcggacccgttagc

SEQ ID NO: 496953 - DNA, 541 bp, Homo sapiens
aaccgtgtgctgaggcgactctagcggatccttgtgctactccacaaacagataaacctcagtgtacaatttgaaagaagtttgcctgtaatgagtataatttagaaagtagacagtggtgtgttggctctcgtcttattccttttacatttgtgcttctgggatttaaaaaattactaaattcataagatagttaggtattacacacttcagaatatcaatgtaaaatgggaaaataaggaactgggggcatttgtttaggccatgacttctacaagcagatttcttttcttttagtttagaagacaaaaaatttcaaatacagatacttcttttagaagtaaatttatagatttcatcgtcagtagaaaaaagttaaactccttactaatttaaaactaagcacagtttaaacaaggaagcctgaaaaagactcatactacaaataatttaatggatggcatataagactatgcagtttgcaaaagccaaactcttctctccacttagcttttgatccccactgattgtggcggtagca

SEQ ID NO: 496954 - DNA, 340 bp, Homo sapiens
agatcctaacagacatttccacaagaacacacgcaatagcctgcaggtatatgaaaaaatgctcagcatcactgatcatcaggaaaataccaaataaagccagagtgagatatcacctcacatctgttagaatgactattatcaaaaagatgaaaaagaccagccatggtggctcatacctgtaaatccgagcacaatgggaggctgaagcaggaggatagcttgagcccatgagttgaagaccagtctgggcaacacagtgagacctcatctagttctggaggcgagaagtccaagatcaaggtgctagcagagctggttttcagtgagacttcttttc

SEQ ID NO: 496955 - DNA, 784 bp, Homo sapiens
gagtctctgataaatctagctttttaaggaccttaggtttggggtttcttgtgttttgttgtttttcatgttattcttctatgagacaggttctggctctgtcgcccaggctgggagtgcacgcgggtgcgatctatagattactgcaagcctcaaatctcctggacctcaagtgatcatcctgcctcagtcctcccaagtaggctatggtctacaggcatgcaccaccatgtccagctaattttttgagttgttatttgatttgtattttaggtttggctagacgagagggtcttgctatgttgcccaggctggtcttgaactccctggtctcaagcaatctctctgcattcagccttcccaaaatgttgggattacaggcatgagccacgcagaacctgggcttcatttacttagttgatttttttaaatgtcattagcagatatatcttagaacttgtcttaggtatttcaaaggagaattacttattttgttactcgctctacgaaggtgaagattgactttaatgttgagaatgttatgcatcaagtatatatagacggcgaagacatgtttagttcttgtgatgaaataactagcttatgttgctgtgcgaaatcagtatggtttatattcagttttaatgatgtactaatctttatcaaggtgtagacaaatgtgtttaagattgtaggcatattgtttggtgatgtggaacgtaaattacggatttattatttatttgcagagagaaaggacattggtattactttagaggatgaa

SEQ ID NO: 496956 - DNA, 121 bp, Homo sapiens
tacgggtgaggtacagctacgggtgaggtacagctacgggtgaggtacagctacgggtgaggtacagctacgggtgaggtacagctacgggtgaggtacagctgcaacgtgaaggctcgat

SEQ ID NO: 496957 - DNA, 344 bp, Homo sapiens
tgatgagagttacctggcgttggctttaaagagagtagaagtttaggaatcgttagggggccatctggtgtgtgaaagtagaggacctcagaggtttacgaagagaacaggtggttttaaggggttatcgttagatgtttcacaccggaaaggttttgaaacactaaaatatataatttatagttaaggctaaaaagtatatttattgcagaggatgttcataaggccagtatgatttataaatgcaagtgctccccttgatttaaacacacagatacacacacacacacacacacacacacacaaaccttctgcctttgatgttacagatctaatacagttta

SEQ ID NO: 496958 - DNA, 170 bp, Homo sapiens
tgacgctgtctctggacccatgtgaccagcctgcttctgtctgcagttccagacttgcagtggtatcagatacttgaagttaggtggagccagagggatgctgtttccctggctccctccagacccagcaggccctgctgctgctttctcattgctgttagtccagcaga

SEQ ID NO: 496959 - DNA, 525 bp, Homo sapiens
cttggtggcgtgtgcctgtagtgccagctacttggaatgaaggcaggaagatcatctgagatcaggcattggagactgcagtgggctataatcatggcactgcactctagcctgggcaacagagaaataccttgtatttaaaaaaaaaattttttttaaaggttaaaaacatctgggttgtcgcttgaaacactcataggcagtgccccaggtccgcaggcaacaaagggacaagtataatttggcttctaaaacttggataatctgcgaattttgactgtcagagaaagatgtgtcatgtgttaacacagagaagggagaactaggtcattctgaggcaccctaaagggaagaagtagaagtacatgaaacaaattgatcaaacctcctgtttcctagaggctctttttaagcaaaaattacctgttatcccatttgtaatcaaggttgaatccttttatacttcacagcaatttattttctgagttttgagaaaggtactagtctagtgtacctggattaaat

SEQ ID NO: 496960 - DNA, 137 bp, Homo sapiens
ttttgagaccagccttgggcaacattggtgaaacatttgtctctaattaaaaattacacaaatttagccagtgtttggtggcaggcaccttgtgctcccaggttacttgggacggctgagcgtgggaggagagcgaa

SEQ ID NO: 496961 - DNA, 206 bp, Homo sapiens
gggggggggggggggtgggccctttttttaaccccccctttttttccctggggggcccggggcctttttcctgagggtttcccctcccctggggggtttttgggggggtttttttggggggttgccccctccctccccccggggcttttttggtttgggttttccagggttttttgagatttaacgttttttttcccccccccaga

SEQ ID NO: 496962 - DNA, 1238 bp, Homo sapiens
  misc_feature (252)..(252): n is a, c, g, or t
  misc_feature (377)..(377): n is a, c, g, or t
  misc_feature (547)..(547): n is a, c, g, or t
agcggctcttgctcagtgaccgtgtggtttgcttaggcgcaaactcgcgtgaacgcgcgagccaacatgccactggccggaatctgggttagtcgcagaacttatgtgcaaccccgctggaggacccttcggagcaacatctcgtctcggacctaaaggatctgcagacgctgagtcgaggcgcagtatgtggctccttgataagcatagacgtgtagtgtctggcatgggtcatgacttctacccatggcncaacgatccgcagacgtcgcccgttgaactgcctcgacggccttgcattgaggaacgcgacccacttggccgccccttgttcggcataggccttactcccgtgctcgctgcgcgctttcgtcccngcattcgttgcgtcgctcggaatcggagttggcgaagcattgaatccttggatttacttcccttgggcctggcttagcataggaccgcatttctttcagtatgatgacagcctgtaggaacccagagtcgtttcccccgcgtagcgcgttgagttcagcagtcgctagtncgcacgcaacgctcagcgttgctcgatccccgccatgcaggccagtattcgaatggggtccggctaaccgcaggagttgtgttgaaacatttccgctgtaccttcaatttgtccaggcctggatttcccatgaagctacatcgactttcgtctctggcgcatctcccctaccggtggctttgtccgtcccgtggccgcggtgaaacgaggaacgaaattgccacagcaatgggccaaggggttggaggacttggcgagcctggaggaacggattaggaaggaacggatttaaagtcccagcgcctttgctgccccttcccgttggcagtcttgtctttgtgaatttggtcgttcagtgtttctacccgttgccctaaaacttaatagccaggggaatccaagactgtccttatttaccgatgagcatgatgaaaggatctacttctctagaaaagtcgttgggcaactccccggagcgaattaacgggggcgatgaaaccccgttgcgaagggggaggggcccccggtgtacccccacgtctttttggttgtctcccctttatctcgaccggcggtttaaccttccggagcccgtgtgggggctataacccgatatgggtcgaaaagcgttggttgctccctgcttgtgttcaaaaattgtgttcatctcgcgattcaagaacttcccgaa

SEQ ID NO: 496963 - DNA, 602 bp, Homo sapiens
  misc_feature (474)..(474): n is a, c, g, or t
ttaatctcatccagtgcttttgtcacctcgtgttgtaattcaattttttttattttttatgagatgggggtctcactatgtggtccaggctggtcttgaactcctgggctcaagcgatcctcctgcctcagcctcccaaagtgctgcgatgacacgcgtgagccaccaagcccagccaacatgttataattctctagaggcttgcttggggtcccctttacgtcttccatgtctctactaaacttttgcagattgggattcagttgtaagaactgctgagtgcccatgtctgctggttctgatatcagggtcggtttcaggaggctgcttttcctccttgtttggggtcctattatgctgccttcctgtgggcctggtactctcgggttgatgcctgaggcattgcgaattttaccatgttgcgtgctgggtgttttagcatttttataaatcatcttaatctttgttctggangcagttgagtttcttagaaacagttttagctgctcacttttctggagaacctggtcctttttgtggaggcctcggctgtcgtctttacgagtttctgcaggtcccccacaggcctgccctccgataag

SEQ ID NO: 496964 - DNA, 643 bp, Homo sapiens
tgaggtgactagaggatcccgctgctccctgacagccatattagatgaaagccactaagtgagctctataagtgtacataaaacatatccgattatctggtgccctttagcgaggtatactgaagatgcaggtttggcatcgtggagtcctgcctgaccaagaattagagcctataaatctatcttgccattcagagcagagagcactgcgacaaactgaagcacaaaaacaaatgagcaacacttatacaaacagcatggaggttgggggtgagggacttaaaagtagacatgctacacctaatgtcaagaagcagcttggtttcctttgccagatatccttgtgacgacatggattgtagattcaatggtcctacacagggtatctaaaatgtcatgttgctgcatatgactaaagagtcctctgcaatggccacaactgagagataaagcaacctcagggtcctgggagggcaaacgcttggccatcacagcttctcaagtcagctaagtcagacagaactgcagagatagaagtagaagggaactcagattcttcctcagctagggtagaatccttggaacagtggaggtctttaaattctttacaatcgtcatatctccatttgtgggactgttcttc

SEQ ID NO: 496965 - DNA, 139 bp, Homo sapiens
cgtcagcatcgtctattcgacccacattcacccctcccactcagggggataaacgagggtgaggtaaagttcactggaactgagttttatggactttggcatttccctctcttacccccgcaggggaggggttaatgca

SEQ ID NO: 496966 - DNA, 335 bp, Homo sapiens
cttttttcccggggggggggggggggcctttgggggacccccccggggattttttttatttccctttccggaggggcggggaaggggggtggccgtggaaaggtttccccccccccggggtttcggggggggggttttgggccctttttgggcccaaaattatttagcgcccctttttggcccaaaaattagggtttggggggggggggcccggccctggcaggggggccccccggggggggggtggggtccggggccccggtccccggggcccccggggggtttttcaggggggggggaagggggtttttttttttttaagtttttttcgggga

SEQ ID NO: 496967 - DNA, 546 bp, Homo sapiens
ttggaacaaatgctgttttttttaatagctgttttggaatacaattttagagcagcgctacctattcaatgatggttataaaggtgcacgaccaaacatctgattcaccgatgcggggtatgtttcttacaacagggatgtatatcccggcttgatcttttgaaagagagtgcataccactttatctgagattatgatcaccaacgctgacctaagaatccatcctatacttcggggagaccctgcgaattgcataatacagatgataaacacgagcgactaatacgtgcttaatctgatcatccttaaggaccatacgcactacgtgtgctccagagttgcataggaaggtgagcgctgaaagatacatctcttctcatatccttcaaataggtctatgcatactactgatgcaaaagcggcgtacgaggcactatagctctgagaagaaggctctgaccatcgtacatatattgctcattgagtactatgactgccctacgtttaggcatactcctacactggtctgtgccatgcatttgcatg

SEQ ID NO: 496968 - DNA, 126 bp, Homo sapiens
gatagacacttagcaaaagaatgaaatctcacccgcgaaatcctaccaacctctaggggccacagccctagcccataccagtatccttggcagttctcccccaaaccaggtctgtacagatcatct

SEQ ID NO: 496969 - DNA, 109 bp, Homo sapiens
gtggtgtctagcagtcctatacctatcgcatgaccgcggagttcgggaacaagtcttgggtcggggagtatggtgcaagctgaacttaaggattgaggagggacaccag

SEQ ID NO: 496970 - DNA, 327 bp, Homo sapiens
tgaaaagaccactgactgctagtcaagagaacagacatgttgagcacaagagtgacagcaacgacatcagcacatagatcagaaatgacagatgatcatggcctggtgcagaaaaatgaagacatacaagagatgtaaacctgtaaaatgaactacaggcatagctacagataggaaacaaccagtggtggttataaaaatatagctacaaatactataacactcctctgtaaagaggtgggatccttgtaccctctctgaatcatggatgagctgatgactgcttcaaccaatggagtacggtggaagtaacactctgactactaa

SEQ ID NO: 496971 - DNA, 348 bp, Homo sapiens
  misc_feature (348)..(348): n is a, c, g, or t
ctttgcacaggtaaggacgctggcagcaggtaacactcagtctggcctttccctcttcaaggccctctccctagcaagcactcagtgaagatgaatgcaaatagaatgatggcatcttcctgacaacgaagctctgagccaatttgaccgctgtgttgccatagccttgctcagtgaccttgagcagatcaaggtcccctctgctggccctcattgatgggtggagtgtaggaaattcgcctctgcctctgcctcacaaagagttcatgaaaacaaaggagttgtcagtgccctggtactctggcatactttaagctctttgcaaagaaaagaccacttgaagttctn

SEQ ID NO: 496972 - DNA, 157 bp, Homo sapiens
  misc_feature (56)..(56): n is a, c, g, or t
  misc_feature (122)..(122): n is a, c, g, or t
  misc_feature (140)..(140): n is a, c, g, or t
cagccccttacttaaagatctggaaagcatgaagactgggctttttttcctatgtntcttgggaactgcagctgcaatcccgacaaatgcaagattattatctgatcattccaaaccaactnctgaaacggtagcacccnacaacactgcaatcccc

SEQ ID NO: 496973 - DNA, 139 bp, Homo sapiens
  misc_feature (9)..(9): n is a, c, g, or t
  misc_feature (118)..(118): n is a, c, g, or t
aaggaacgnatgactttccatcccttgaaccaaggcatgttagcacttgctccagcatgttgtcaccatttcaacagaaatcgcacaaatgctactgtgcaaggtgcagccaattttnttgtaagtgtgatttcttacg

SEQ ID NO: 496974 - DNA, 181 bp, Homo sapiens
gtttttttattttttgattttatgggcccccccccggccctttggcatgggctcctgtataaaggggagttcctgggcctgtaaagttagtggcacctccaaagtagttataggctgccaagtccccttttggcttcccatggagatttgctcccacccatgttggtggttggggcaccca

SEQ ID NO: 496975 - DNA, 649 bp, Homo sapiens
  misc_feature (351)..(351): n is a, c, g, or t
  misc_feature (390)..(390): n is a, c, g, or t
  misc_feature (441)..(441): n is a, c, g, or t
  misc_feature (446)..(446): n is a, c, g, or t
  misc_feature (459)..(460): n is a, c, g, or t
  misc_feature (471)..(471): n is a, c, g, or t
  misc_feature (490)..(490): n is a, c, g, or t
  misc_feature (492)..(492): n is a, c, g, or t
  misc_feature (512)..(512): n is a, c, g, or t
cgcataaaaacaacttttaatttgattgaaaataaaataacagtcgtctctgacagtggagaaattatgctcaaatgattattaatttgaaatagacctctgaattatgtacttttagatctgacatttcatactgactctcagatagaacataacggagaactctccatcttctaaatgtgtctttctctgaaatctgtacaagtcctttgataacactgtattattgaagtctctggagtgaaacactatacactaatttacagttataaatacaaagtattgtagacgagatgaagaaagagttctgattgacttgctggctggtttctcatctcatgtttgcccagnttgtttcagttgttatagtctgttctcagtttttatgcnttgcctttttaaatgttaggattacttttttaattgacaagtaaaaattgnatagnatatttatattgnncagcatgaagntttgatatatggctatagngnggaatgtctaaatccagctntttaacatatgcattacctcacgcactcatgacatatacctgaaaatcattattctattgggaaataatcttccctttttcttttcattttttgcctttggagccaaatggaccagatgatatttaacttcatcttt

SEQ ID NO: 496976 - DNA, 323 bp, Homo sapiens
ataccctcgggggggggaactgatcactgtagctacaacccaaacaatccagttctccctatggcttcatactagatataattctccatagtattcatcgctgttgcatggttcgttacatggtccatcataggaattctcactggtgatatataagactcagacccaaagtattaatctagttcttcaaactatctactcatcattccgtaattaccagtactaagtcttacgttaccagctaacaacgctattccaaccggttcatcggtctgagatgggcgtaggacatgatactccttcttgctgcatcagttgatgat

SEQ ID NO: 496977 - DNA, 322 bp, Homo sapiens
  misc_feature (119)..(119): n is a, c, g, or t
tttgcaagagagacaaagcggagggacttacaggttccatgacatgcaaaaccagcaggcagttattcaaactacagctcgcaaatcatcctttttaagtccttgtaccatatacaggncacaagagcgtgagggctcggctcccaagggcttgggcagctctggggctgtagctttgcagtgttcagctcccgcagctgtcctcatgggctgggctactgttgagcaccttgtagcttttccacaatgaagatacaagatgttagtgagtctatagaatctgacgtttcagaaaggtgctccctgtgtagtggttcccacc

SEQ ID NO: 496978 - DNA, 181 bp, Homo sapiens
agtgaggccccggtcttcctcctccgtcctgcccgcaggcccaagaaccccctgacgggtattcaagcttgcgcgtaaagtctcgcccggtgccatcttgtcttcgcaatgctcccccaagaaacaggctcaggccgcgggcagcaaaaaggcggacgaaaaaaaagaaggagaagattat

SEQ ID NO: 496979 - DNA, 500 bp, Homo sapiens
tcgtgcactctgaaaagcccttgaccattggatatacctactgtgtacaccagcaagctgccaaggctatggcccgcaccagcccccagaactaaatctactctccctacaaggcaccatagcagaatcggcagcagtggaccagaaatgtgcaagcaccctgatcttactcccagctctgaccaaatacagaattttagagaacatctgaagacattagactgcactgcgaatacatgatgaattatagattactgccatctttaactgccatcactgtgacagagaagtcctgttacagaagtaccaagctgtagatatgataagctagatgcactaaaccgaagccatgcaaaacctgaacagcttcttcctgcattgtaggagagtgagacaaacaggagagccacccattgtctccagtacatagctcagttttatcatccaagctgtacatttggatcccaagccgcatttaaagagaatatgttctttttaag

SEQ ID NO: 496980 - DNA, 107 bp, Homo sapiens
gtgacatcgtctttaaaccctgcgtggcaatcctggacggcacgccgtgatggcccagggaggacaaggcggacctggaagtccaacttacttccttaagatcatcc

SEQ ID NO: 496981 - DNA, 762 bp, Homo sapiens
tcacaataatctcgcatattgtaaataactactccggaagatgccgaaccttttggatacatatgtatgcgtctgacctatgatatcgattcgtgttcctaaggttgatcgtgtgagacacgagcatatattcacatggcgtgaatagacgtctaatacacaagcatatgtacagcctcagactaccgaataaatcatcgtctatccccctacacggagatcaagagatatgctagcatgaattgtctgccatgttccacgagtaggcaatatgaagtgatctgctgctacgtgcacttgaacccgtcggagttcatctttccttttcaccgaatgtgggctggactgcgcgaattggtagtatagcgaaaactccagttcacgtagaacggtcgttactacacgttcccagtaactaacggtagacacacgtcgcttttggccactaatattcctgaatccattgagggaacgtgtgattgacatcagtaagaggctgtagatcacaaatgaatttccaccttgttactgatggcttaataagctctagaatcaaggtcctatctggcacacatagtcctatttgcataatcaatatgtcacttcggaggtaattattgtaatcgttttggtgactcgacaaaaaaaatattgcggacaatgtacggaatatgcctcgacggttgcttggtataaaccctgtggacgtgaaacgctacattgtcacattctctatcatgggataggctcgatcgaacccca

SEQ ID NO: 496982 - DNA, 134 bp, Homo sapiens
gtgctatgggaacaattcaatggctggagagaaaaggcacctttgacccagcagaaggcagaggcttggagaggagggtgaggatgtacaatggagcatctgcaggcgaggaaacaatggccagtgatcttaac

SEQ ID NO: 496983 - DNA, 895 bp, Homo sapiens
acaggtgacctttaacatatgaaagtcacaggcttcctgaagaaaagaaaatgctgaaatagcgatgaatggtatggagagaggcgagatgcagtgactctgggtaaatctaactaattttgaatatctatcgtaaatttgagtgcatgcatgtacttactatagtcctggtgtgtcgctctgagatgttagagtgtaagtaaattgtgatacgcatttattttttgacatgaaggattctactttctaattttacttttctgatctcaagaaaattaaattgaaaaacggggtaaaattcttcaatattgcctcaagttcagttttgtcctattgtcctgagaaaggagatttagacttgtctggcctaacacaggtattttttagggcatcgtactatcccagagaaagtgttgagataccatgggcagaaatataaaacctaagctttgaaccccagtagacttcttcttctgcattaagtctctctttatctgatattctaaggatttcttcaaactacttaataatttgtcaccattaactttaatatccagtttttaatctgcactgtaatatcctggtttgagaagaaagaatgctcaataaattaggagaagtaccagaacaacaatgttttggaaaggtgatcctggctcctgtgctctcaattaatggtgttattaggtgaaaataaaaggtcaggaaatgggccgtgcggtggtcatgctgtaattccagaattgggaggttgggtggtggtgtaccttaagtagggagttgagacagctggcaaatggtgaacctgtttttaaattcaaaaaaaagaaaaaattgggggcgccaaattttaacatgtgggggccaaaaaatatatattaaaaagggaggggcc

SEQ ID NO: 496984 - DNA, 208 bp, Homo sapiens
ctgaggatccccgtccgatggccatggtggcccatggttgtgctttctcgtgttacatcgcgccatcattggtctatggttcgtgtgttggttagtatggcctcgtatgacggagcgttatggcagtgcaatgtgaaatcacatgagctaggccgggaggtccttatggtgggctagagagggcccctgattaggggtcatgggatca

SEQ ID NO: 496985 - DNA, 221 bp, Homo sapiens
catggcttgacggtgtacaatgtgcggattacaaggtctcacggaccattaatcacaccgacacagatgggacgagggtgtccaacatctggtggtaggcttctcacagggctggtctgtgcaccaaattacttctgctctggtcttcgtgctgatgctgggcctggagctgatccgttgaaggacatggctctggtacctttgtgtcgccagccaacagg

SEQ ID NO: 496986 - DNA, 602 bp, Homo sapiens
  misc_feature (13)..(13): n is a, c, g, or t
  misc_feature (179)..(179): n is a, c, g, or t
  misc_feature (234)..(234): n is a, c, g, or t
  misc_feature (243)..(244): n is a, c, g, or t
  misc_feature (246)..(246): n is a, c, g, or t
  misc_feature (249)..(250): n is a, c, g, or t
  misc_feature (301)..(301): n is a, c, g, or t
  misc_feature (319)..(320): n is a, c, g, or t
  misc_feature (322)..(322): n is a, c, g, or t
  misc_feature (331)..(332): n is a, c, g, or t
  misc_feature (336)..(337): n is a, c, g, or t
  misc_feature (347)..(347): n is a, c, g, or t
  misc_feature (357)..(357): n is a, c, g, or t
  misc_feature (360)..(360): n is a, c, g, or t
  misc_feature (366)..(366): n is a, c, g, or t
  misc_feature (387)..(390): n is a, c, g, or t
  misc_feature (442)..(442): n is a, c, g, or t
  misc_feature (449)..(449): n is a, c, g, or t
  misc_feature (469)..(469): n is a, c, g, or t
  misc_feature (482)..(482): n is a, c, g, or t
  misc_feature (488)..(488): n is a, c, g, or t
  misc_feature (498)..(498): n is a, c, g, or t
  misc_feature (505)..(506): n is a, c, g, or t
  misc_feature (508)..(508): n is a, c, g, or t
  misc_feature (513)..(513): n is a, c, g, or t
  misc_feature (523)..(523): n is a, c, g, or t
  misc_feature (527)..(527): n is a, c, g, or t
  misc_feature (538)..(538): n is a, c, g, or t
  misc_feature (568)..(568): n is a, c, g, or t
gtatgggtgttcntgataaagaagggttaccaagacgtcgacacctccctgcagagtgctgtcatcaccaaagtcaagggggtgggcttcaccaacacctcggatcttggggaggggatctgggatgtcgccgactacgtcattccagcccagaatgaaggcattcctgatggcgcgtnctccaaggacagcgactgccacgctggggaagcggttacagctggaaacggagtnaagaccggnngntgnntgcggagagagaacttggccaggggcacctgtgagatctttgcctggtgcncgttggagacaagctccnngncggaggagnnattnntgaaggaggncgaagacttnacnattttnataaagaaccacatccgtttnnnnaaattcaacttctccaaaagcaatgtgatggacgtcaaggacagatctttcntgaaatnatgccactttggcccaagancactactgccccntcttcngactggggtncgtgatnngntgggnggggaggganttcnaggatatagcncgggagggtggggtgataggattaatattnaatggactgtgatgttgataagctgctctgagtg

SEQ ID NO: 496987 - DNA, 920 bp, Homo sapiens
gagcggagagggagtgcggacagccgagagggcggctcggtggagtgccccgtggctgacgggacggccggggcggcgggccgcgtagcactggctggagtgagtgtgctctggccagtcgtggtcctgtctttggccctgggtattgtcggggcgctgggtgctggcgtggtacctgtgcgcaggctgggctgggtcacagctgcacatccgcgcctccgtgtgttgcctgcctgactcctccagctcccgcacgtggccccggacctacttctggggaacctactcgccctcacgtctacttcgtgcatgaagacccggaagcccagaagccaccatcctcaacggactgatgtgggcgcaggcagggtcagcacccctggggacatcctaatgctcagagcacactgttgtgagcatcggaggacggtagtgggagtcccctaattggacttggtgagttccgacgaaccaggacgtctcacttacgagagctgccaagacacatccatggatggggcggccttaaagagcttcagcagatgaagttcgtcaacagagtgccatgggaggtcagcaacgtgagggggactggagctggagagtgactgtagagcctcaggactcagtgtactttctgccctccctttggttctcccatgtgcttctatgtgggtgacgagatggcacaggaagtcctagtaccagaaggtagggggccaagggggcacgctgaaggttatcagttggagaacaccagtgaaactttgggtgacttcgcgctttacaattattggcaagaaccagtccaggggactacaggccccaacgtattggcaggtacaagtactatgggacttcagaccaagactgccctgtgccaagatggtcagagtcgctaaaagtgacaggatgacccg

SEQ ID NO: 496988 - DNA, 382 bp, Homo sapiens
cagcttcctgccagcctaccccttggctcgggattgtctttgttgcaaggtctcggcaatttacagaactctcactccttccctcgcctgccatcttctctgcttctgagataagaaccatttgtgtaacaccaatacctaacttaagacagacatgcattgcgtggttgtaatcaaagctgatgctttcagatgatgtaatccatctccaatgcggaaaagacaggcccgtccatccacattgctgggcacccagctgactgtaagaatggaattccaaacacttaacacattcagttctatgacagaaagtgagtctatggatatggtattttgtgaatgatcttttaaataaaagagacccttacataaaaaaaaaaaa

SEQ ID NO: 496989 - DNA, 139 bp, Homo sapiens
  misc_feature (63)..(63): n is a, c, g, or t
tcagctcggaccagtagcacacttcttttcctaaacaggacggaggtgacatgtagctctgtnttctttcagctcatagatggtggcatacatctttgcgggtcttgtcttctctgagaattgcattccctgtggccga

SEQ ID NO: 496990 - DNA, 354 bp, Homo sapiens
ccgagtcgtaagtacttaaacgacctacctaaacgactcgccaaaccgctaaaaataaatactaccccctactcttattcaaacgacttactcggacggagaaataaaccgagttctaattcgtcgataaaccagttaagacataatcctgcaacagataagaccccacgcctaagaataaatttaaaaaaacttctaatcaacccccccccggacgcccaacatttaaccacccccggccggaaggcaaacatatgaagcaacaaaactccgtaacccaacataaaaataaccaaccgccgccacccctacatctatgaccctataacgaaaacaaaaccttaaccccatttc

SEQ ID NO: 496991 - DNA, 967 bp, Homo sapiens
aggtagaccactggagtaggtactacgcctcatatgtgcgcattgtacctcggcatctcgtaccggttcctgtgtggcttaccagaacgtacagaattgctaaggcgtatatgcgatctacagcagaggagcgcccaaccggtatggtgtggccccgtgagctgcgactggactatgaaactccgttacgacatgagggcgcatagagattatctgtcaacacaccaagtaggacccacattagaatctcacgaccaccactttaggcaatacataacttctaacttcaacacggtcgctgaaacctatagtcttcatacaccaatcgggtcagtcgatataatggaagtcctctctttaaccgaattaatggaatgcactttcctggggacggaaccgtcgagagggaatgcgggtcccgcacctcaatggaatttgcttagacacggacgtacgtcttggcccgaaagtgagaacccaacctcaatttttattcctgactctccaggaaggatgccttctcaggggcgtgcgtgtcatatcttccaccttcccaatcttttcaatctcgatgaagctcccaagaaacccgagtattggtctatctttcaatgtgtgttattaccctttggaagaaatacgctagcatttttctagtacgaacggttaacatgtatttcttacgcaccaacgtgttaccgaactacgtcacgataaacgttaggttaaatgaccagaaggtaacaaagactctagggtctgtctctcgcaaatttttccgggggttgcgagaatataagaatgccttcattgggtggttcaacctaacagggtaaagcagagtcggtctggttaaaggcaatgacaagtattttaaggacgctggggagagaatcccaagaaaattggtctagtttggtgggtaagccacttccgcggaatttttaacgggggattttttccccct

SEQ ID NO: 496992 - DNA, 175 bp, Homo sapiens
ggtgaccactgttggtcccagtagggatggcacaatcagcgaggacaccatccgagcctctctcatctctgcggtcagtgacacctgagatgcggatgaaggaggacatgatcgtgcccaggcagagctcaatgacttaacgcacagaagaagaccttacaacgggtcacagacc

SEQ ID NO: 496993 - DNA, 271 bp, Homo sapiens
ccgaaataaagcattcattgtgtactaaaggtttttttgtttttatctgatttcagttatttgtgtaaacaccaccttttgaaccagcaattatcaagtctaggaaaagcaattgatgttcccatataatcttttcttggggggaaacccttagttctaaggatttaacatcctgtaattgaattttaacataacggtatcccataagcagcctttttattgtcagaccattgcctgatttataattatattaaaacaaagcaacaaaggg

SEQ ID NO: 496994 - DNA, 407 bp, Homo sapiens
agcaccggcctgacctgagctatgaccatcgctattttactatgagcccccgataccagacccaaccaactgggctagcttagcctaagcctactatatattctagccagcgatagacgagccgttcactcacactttcgagcagggagagcataacaactcacactacactctgcacggttgacgagcagctgtgacccactccatacactatgaagcctcgctagaccttctactatcatcagtactaatgagtgcatcctagagcctgagcaccgttgtcacaacacgagcacacctctgatttctgatgtcataatgagcgttgcacataccatgagttagatacgcactagctgagaccagccgacaccactgcgacctagccgaaggggagctcgctagct

SEQ ID NO: 496995 - DNA, 363 bp, Homo sapiens
  misc_feature (1)..(1): n is a, c, g, or t
ngctctctcgtgctgctctcttctgaagacccttcagacctctccatgacagcctgttatagtctacagcttctgtcgattcttgtgcatctacagctcagatttgcccatttccgcaaaatactcagtggctcgcttggtagggcctttaagctatatgaagccggggtaagcctgcaagctctgcggcttgggcttgccaatagaaattcctctctcgttgaaagttgtcttgtggatcacacagctttgtggtccttgttctgaggtgctggcgcctcagatcccgctatctgcgtgtagcggacacagtgtcacatagagcctttcaacacattacagatcgcgcgtgtctcgcgtgcc

SEQ ID NO: 496996 - DNA, 611 bp, Homo sapiens
  misc_feature (23)..(23): n is a, c, g, or t
  misc_feature (257)..(257): n is a, c, g, or t
  misc_feature (301)..(301): n is a, c, g, or t
  misc_feature (314)..(314): n is a, c, g, or t
  misc_feature (328)..(329): n is a, c, g, or t
  misc_feature (331)..(336): n is a, c, g, or t
  misc_feature (342)..(342): n is a, c, g, or t
  misc_feature (344)..(344): n is a, c, g, or t
  misc_feature (346)..(346): n is a, c, g, or t
  misc_feature (361)..(361): n is a, c, g, or t
  misc_feature (368)..(369): n is a, c, g, or t
  misc_feature (374)..(375): n is a, c, g, or t
  misc_feature (378)..(379): n is a, c, g, or t
  misc_feature (393)..(393): n is a, c, g, or t
  misc_feature (396)..(396): n is a, c, g, or t
  misc_feature (398)..(398): n is a, c, g, or t
  misc_feature (402)..(402): n is a, c, g, or t
  misc_feature (406)..(406): n is a, c, g, or t
  misc_feature (525)..(525): n is a, c, g, or t
  misc_feature (528)..(528): n is a, c, g, or t
  misc_feature (538)..(538): n is a, c, g, or t
  misc_feature (544)..(544): n is a, c, g, or t
  misc_feature (608)..(608): n is a, c, g, or t
tttctatttcattattagttatngttcatatcttactctgcctaacttataaactttaacatgcatatgtatgggaaaaaaaacatagtatatataaggtttggtactatctgcagtttcaggcatccactaaggatatcagaacatattctctgcatatttaggagcaattaccgtatgatatttttttctttctgtgtaaacacatggtgtcatagtccattttgtgctactgtaacagaatatcacagactaanaacaaataacagaaatttattggcttatagttctgtaggctganaagtccaaaatcnagacgctggcatcnngnnnnnncttttntntngcatcgtcccacagnggcaggnnggggnntgnnagagagagccaganggngntgancttncccattttataacatcaccaatcccaccctaatcacctacttaaatattccacctattaaaactgatatcaatggcaattacaattaaaaatgagatttgcaaaaagaaaacattcaanaanaacacaaagnataagngagaaatgaaaagtaaggaaaaaagagcaaaaaaaccataaaatatacaatccagctgtattgntgt

SEQ ID NO: 496997 - DNA, 308 bp, Homo sapiens
  misc_feature (66)..(66): n is a, c, g, or t
  misc_feature (83)..(83): n is a, c, g, or t
  misc_feature (99)..(99): n is a, c, g, or t
  misc_feature (102)..(102): n is a, c, g, or t
  misc_feature (172)..(172): n is a, c, g, or t
  misc_feature (209)..(209): n is a, c, g, or t
aaaggccccgggccggggagagctcggggaccactccgaccgctcctctgtcatatcatgtccgcngaaagccccgggcccanctcccttggagtcagngcngcaactcgtggaaattgattccctgtctttgaacagggagtttgggtccccgagcttgatgtgaaaggcntcgatgatgaagatgtggatgaaacgaagatgacgtntatggaaactcatcaggacggaagcacaggggcccactcagagtcgcccgagatcacgtcactgcactccaggaagggcaacagagcaagactccttct

SEQ ID NO: 496998 - DNA, 229 bp, Homo sapiens
acttatcccagaccaccatttccatcctcccccaaaaccccctgggtttccctgggtaccctttagccccggggcacgtgtgcatgggggcatgcctgcatatatagctatcccccctgtatttccccaagccccacataatggttcagtttggtaaggaaaaaatgttaattactgcaaatgggttttaaactgtaaaaggacatttaaccaactttgtaaagtgtga

SEQ ID NO: 496999 - DNA, 128 bp, Homo sapiens
ccgggccgtgtgctgctcatggtggggtagagaaccaagtgggctcttcgggtttccactttcaggccttggctcttagacgcactcactgggaccgagcctgatggcagcgcgcgtggatcataccg

SEQ ID NO: 497000 - DNA, 709 bp, Homo sapiens
ctccgtgctgtgcggacttcaccagacggttggagattggcaccagacattggaggtgcttgtagatggtccaacctcagtctggccccatagcgactttatgccccatgattctgcttcactgcttggcaactcctctttgaagttcccccgtctctttgctaacagcagtgacaggaagagaacagagacaaactctttggcactgtgaacgagaacggtacgagaattccaggcaacacctctgaccaagggtgtaaacccagtcttattatatatatatttcttcctcttgaagttaaaacctagcacgtgttgtacttcttatcctcttcctcttcattacttaccacttatctttcttctactattaacccctcttatatactccccttataggccacacagcctatgagcacctatatctctctatacatctattacacaaacacacacaaacacaactatacacacagacggatatagcgcggacttatccgccgtggtccaacgagtcgtctctgtcgcacatgtcgagcaagacaccccagtgtactatccccctcacgtgacacagaccccgcgagcaagcgaatcaaacgtgtctgcactatcgcctcggtgccacaaaagaactctcctactcaatttcccgccgctgcgctgcatctcgggccccccattctcccacagagacacaaacaacgac

SEQ ID NO: 497001 - DNA, 203 bp, Homo sapiens
ctgagagatgggcgcttgcttttcttcttggtttgcatgtgcggaataagcagaaggcatctgcgtccacgagccgcagcgggacagtgatggcctcgccaagccaagacatggaaatgcccctcattaaccaccacacccagtaaattttcatatttttagaagagatggggttacaccatgttgaccgacggctcaggaaa

SEQ ID NO: 497002 - DNA, 124 bp, Homo sapiens
gaagaatatctgaaagcgggctgtttactaaagacaagaggtaaaagttggctcagagtttctgcaggctgtacaagaaagctcagtaggatctgcttctagaggagacctgagcaatccaggc

SEQ ID NO: 497003 - DNA, 252 bp, Homo sapiens
atgcatgtagtgaggacatggatgtccccagaatacccacatctctccggagcacagcgaagaccttggttaggccgcgctgtcttgctcatcctgtcaagaagcaggtgcagctgccagctctggaaggaaagccttcttttgcagagaggtagagtagagaggggaagggagaagtgagagtcagcaatacagcgtatgaatcagacagctgagcttccagggttgttttgtgtcctcactacatgccat

SEQ ID NO: 497004 - DNA, 939 bp, Homo sapiens
ggcccgatgcgtcgtggatgcccgcgggtctgccagatgtggaagactgaggctgttgaaagtgcagagctcagccctggcgaccctctgttcccaagagctccatgcaggtgccacaggatggagaagaccttgctgtgcaaccttgtgtaccactggctcctgtcccgccagaaaagtagccaggcatggtggcgtgctgcctgtaatcccagctactcgggagtgctgagacagcagaatcgcttgaacccagggaggcagaggttgcagtgagccgagattgtgccattgcactccaagcctgagcaacaatggagtgaaactccgtcccaaatgaacaacaacaaaaaaagaaggctgaagctcttcttcagcaaaatggcgacttcctggttcgcgcctctggtggtcccgtgggggcaaccccgtgatctcctgccgctggcggggctcagccctccattttgacggtgtacctgttgtggccctgctgtccccggcaatgtgcctgaccacaggcctctttcaacttggaggattgagcaattccccagcatacctggctctggttcacagttatattgacatggcaggcgcccactgtcccaggcacaaggggcttgtggtctccaggcctgttgacttggcaggggctctgctgaaacgcagctttaagccgatggacaacccttgatgggatgcgcccagctcggagtacgaagccttctccagggcactggacacgtgggaggcaaccacgccacgcccgccagaatttggcacctatttggggcggccaacgagaaaaccggttgggatgtgcctcaaccaaggccaaattttgcttgccccgaacgaacagtgacccgggtctgaagccctgtccctggacttggtgcgacagccaggcccaggcgagttcacccagccaagaaa

SEQ ID NO: 497005 - DNA, 1201 bp, Homo sapiens
aagtaggagaccgctgtcaatcttgcctggacagcaggaaacaggtaacacgcgcttcggaatagacagccaccgtatcagattgaccctgacgcctgcttctcggctaaagtagaacaactccagcctgataggttcaggactacactcagactctaacagccagcgtattaaacctgacacctgtcagcctcttctggatggcaaggaaccgtcaactgctggctggccacaagcttgagtctagtgacatggaagtcctcaagcatatagctgaatactgtacagacttgtgtaatttgaatacttattcttgcatgcatagctaccttcagaatttcagtgtattcttatataactgttgtaatgatctgggactgcagagatatgcgctaagatatgttagccctccagggtttaagaagttcgagttcacgcatttagaggactgttagcccttccagagcgtaccagaacgaagacctattgtccagaaaaaaaggtcctttacagtggtgagacctcggagggagcaactctgtgctggccccttgttgtagtatgccagggtcttgcttgtgtatgtactctgagaaggatggtctgtcaaggtcggaaggcggcatcacaatatgtagcgcaactttgtcaacattacactatctgatgtcacatactgacattgacaatctgtgcacttgtccgtgacgaattcgaagacgcttggttaccccgtagacccgtaattgagtgagcaggctcgctgccttgatggtagtgtacaaaactcaccctgaatgggacctttgtaagacagatcttccatgaccatgtgacccaccccagttcatcatcaatctcttgtaacaccaaaaaggtctcgcaggggtggtggcgcaaactgtcgtcttatagtgcccaattttgggggttgaaagaaccggtgcactgtgcattggaaggcccagatacaatgccagagaactttgactccctttcgtggccgctaggatggtactgagttatagtggccccttggccaccaagaagttattggacaaatacgctttcacagggagacctcccagcgtcaagatagcctggaaaggacgttctgggcggtatgggttacatcccatgggtgacaaacccactacgacatgcctaaggtggccatccaggatgactactacagccgtca

SEQ ID NO: 497006 - DNA, 392 bp, Homo sapiens
tcactgcctacgacggctaggactactagtactatgttgaataaaaatggtgaaaatcggcatccttgtcttattccttatcgtatgatgttagctatggatttgtcatatatggcttttattgtgttgacgtacatatcttctatacctaatttgttaagagtttttattatgaagggatgttttgaattttgtcaaatgccttttctgtatctatcaaaagatcatatggtttttgttttcctgttaatgctatttatctcatttattgatttgcatatattgcactatccttgcattccctggataaatcccccttgatcttattgaatgacatttttaatgtgcttttgaatttggtttgctagtatcttgttgagaatttttggatt

SEQ ID NO: 497007 - DNA, 375 bp, Homo sapiens
aataaattctttttttttcagagacaggatctcactcgtgtcacccaaggtagagtgcaatgacacaaccatagctcgactgtaaccttaaattcctgggctcaagcaatcctcccacctcagcctcccaagtagctaggactacaggtgtgtaccaccacacccagctaatttttttttttttggaaatgtggtctcccatatttttgcccaggcgggtctcaaactccggggctcaagcaatcctcctgcctcggtttcccaaagttgagggattacaggcttgagccatggcaccaggccaatatttatttcttatcctttttagaaattgcagaaaatcctaattgaccagaatatagtcggctacttgac

SEQ ID NO: 497008 - DNA, 118 bp, Homo sapiens
gtgactctgtaaaaacccatttcaggttaaaatgcgcatgttttattgaatctcatgttaaagggtgggttaaacttcaccaattggggattgcctggggttaaccaagttccaacaa

SEQ ID NO: 497009 - DNA, 250 bp, Homo sapiens
gactctagacgactccctgagacgaccgtgttagcatgcctatcgaagggcttcacgcggccaggagtttcttattgttgcggcaggttgatgagcacttgggtattgtcttgactgactgtgtgagcacggagagtggaccggtgttaaattcctcctcctctcgcttctcgagctcctctgaggtcatctcactcatgggcttgtagaggaggctcatgatggtcactcattgcaacacggtctctca

SEQ ID NO: 497010 - DNA, 121 bp, Homo sapiens
cccccccccccggggggagaaaaaaaaaaagaatttaaaagaataatttaaaaagaattaaaaaaaaaatttttaaaggaatataacagggatttatatcgtaaggtaccggaaaaatttt

SEQ ID NO: 497011 - DNA, 169 bp, Homo sapiens
agattaaaagcacaagcgtgtttttagagaacagttgagaaagaatctcaacatctctctctggtggtttgcttgttttccgttacaggtggggcatgtcctcatcctttcctgccataaaagctatgacacgagaatcagaatattaataaacctttatgtgctgcta

SEQ ID NO: 497012 - DNA, 437 bp, Homo sapiens
  misc_feature (58)..(58): n is a, c, g, or t
  misc_feature (117)..(117): n is a, c, g, or t
cagcgtattgatttggcgtaaacaaggtttggctcacatgcatattgcctctgaattnacgtttggcagtccactgtggcgggcacaccacacttaaatccgttaaacaggtctttncaggtgaccccgtggaaacagttattaggagaacagtcatcaatgtttgtagagcatgtggggccggtccagcctggggaacactcacactcataagcccagggaggtctccttacatttgactctgttggtgacagggatcagagaggcaggcgtgctcaggcaaatttcacaggtggggttccttgaataccccctcagggcagggaacactgaatatttgtcaggggcctgtgttgctacaagtttcccccggttgaagacacggcttgatgagttcccacagtaattggaaatctttgtcacagaagcttggcagc

SEQ ID NO: 497013 - DNA, 232 bp, Homo sapiens
ctgctgctacccttcactgcaatctcacctattcctcatccactgtctcccatccagcagcctcccctatcctggtcataccaccccccagacactacctactatactcgcatcccggactccccagcccaagccgcccacttcacagatctcaccgcatcagagacctcctcacccccggaccgcctcttcacaaactcctccgaccctccctcccgggacactcccacga

SEQ ID NO: 497014 - DNA, 267 bp, Homo sapiens
ctgagaggggggacagagcgagatcatcccaaaaaaaaaaagagttctggtctttttctagtaaagaaaagggtcattctggtgggcatattacagtcggcattcgtttcttttcaacggagtagcatagtctcagtagataagaaacaggtgcattcttacctcaccttcttccggccggtgttacagaattatgtgaatatggaatggcgttggcagttcccatttccttcctccagcagcggtgcccacccggtgggtgggcgc

SEQ ID NO: 497015 - DNA, 685 bp, Homo sapiens
agcggagacgtgcttcgccgagagtcgtcggggtttccgtgcttacagcagtgcttggacggaacccgggcgctcgtgcccgcactcccgtggcgtgcgctaccagcgtccgacctcgtccttagtgcgctcgcatgactgaccgcagtcgaccttcgcaaggtgcgccagaatgtaccactcatggacttcagaggcgcgactagtcaacgcgatcagatcaacctggagctctacgcctccgtacgtttacctgtccatggtgagcgcgggcgggcctaagcggtggctgggtggccgggcgcgggttcccggggcgcgcgctgtgggcgggccgggggtgtggccacccgcggggtctcccgcctccctgcgcccttctggaagaatggaggctgctcgacggtttccgaggacttctctggcgcaagaaagtcggggccagctgggttcttctcggctgtaccctgagaatgctccctcctaggccaggccgcctctgcacacccgttcttttccacaaggacgaccttggtgtcctgaaatcctggggttgcaagactgccagcctgtgtgatcaatcctgccggttaggaaggtggagtaatgctttcccatcttttcctctgactccggcatttggccctacatgccagcgtatcatagcttaggtatccagctcccg

SEQ ID NO: 497016 - DNA, 296 bp, Homo sapiens
tgtcttcccatttcttagctatgacttagcactcccatcagtttattgcttgtcatgattttatttattcaagtgtggagtaggactaagtccctgcagtgtgacctcactgggtggtagatgttataaaattagccacaaactttctggaacagctgtaaagcttgggttatttttcactttgcttagaagtctgcttagttttgacttttaaccttagcctcttctcaaagataagattatttaggaaaaaaatctgggtttaaaaactatagcagtacataagttggtgtgga

SEQ ID NO: 497017 - DNA, 206 bp, Homo sapiens
ggtgcagcattcttctggcatatgccgccctagacccttgtgagccaagatgtcaaaagagaccagagtcatccgcacagtagaccatatgtcaaattagcgtaactggcggaacccagaggcatttacaacaggttcgtagaagattcaagggccagtcttgatgcccaacattggtaatggagcacaaaaaacaaggcctgctg

SEQ ID NO: 497018 - DNA, 369 bp, Homo sapiens
aaaaggggaatttcccttaatgaaagggactctgcttttattcatcaaattgctttgaaggtggaaatattttctggtgggagggtatttattttaaattggaggattaatgacccttgccccatctgtttcttgattggggttggtaaagttttgaggtggggattttatggtcattggtttttctctgggaagcaattttttttccctttattagatctaacctgcaggggattttttaggctggaaaggggaaaatgaaaaatattataatcttagggtacaaaaagtttttaaagtttcaaaaagtcttgaaacaaaatccgtttatattctgaaaatatttataataaaggattttaatttcta

SEQ ID NO: 497019 - DNA, 299 bp, Homo sapiens
  misc_feature (26)..(27): n is a, c, g, or t
  misc_feature (167)..(167): n is a, c, g, or t
  misc_feature (228)..(228): n is a, c, g, or t
  misc_feature (236)..(236): n is a, c, g, or t
  misc_feature (280)..(280): n is a, c, g, or t
gaaagtaaaacaattttaaaaatttnntcaatagaatattaaataaatgtgggctgggcacggtggctcacgcctgtaatcccagcactttgggaggctgaggcgggcagatcacctgaggtcaggagttcgagaccagcctggccaacatgatgaaaccccatctntactgaaaatacaaaaaaattagccaggcgtggtggcgcatgctgtagtcccagctacttnggaggctnaggcaggagaatcgctttaactccggaggtgggaggctgcactnagccaagatcacaccactt

SEQ ID NO: 497020 - DNA, 724 bp, Homo sapiens
ttaggctaggtacgaggccgggggtgaatcggccgaggctctgcaggaaaggagacacttgctccaggaagccaggagcccagacccagagatagtgcctgcaggaggcgcctgttggaaactcactttccgagctaagcgaagaaaattttagatggaaaatttgctaatctgaccccctcgaggacggtgccatgactctgtgagtgcccccccagggtgggatcgtgcctgactcgggtcccacgcagccacctctgtctctctcaccctgctccctgaaacaaatgagaccctgtgacatgtgcatgccaatgaaatgaaactgcaaggaacctaagaatggtgtgaatcctgtgttctttctgttgtgctacctggacaatgaaaaatgacagaagcttattttgccagatgacaatgaacaaatcgatttgttttgtggatgaaaagaaacaaccagttgtggtgcactttacaatgatgccatgaatgaggatgaaggaaatgccccgcccccacctccaacctcgatgcccaaagactgtgcaagctgccccgcctgccctcccagtggcctcctggagcccccgtgaacatgtactctagaagagcagcaggaaccagagctctgctactgttagacgtcctgaacccaatgcgggacccagctggagcagagcctggtcacgctcctgcggactttgtcgctccactcgcgcca

SEQ ID NO: 497021 - DNA, 198 bp, Homo sapiens
agatggcgagtatggtagtggaccctcggtgtgtgccttgcatacgcggaggcaccataccgaattcgccgttctgcactgaggtccgatatcgccgatcttcacgatcggcgatatcgattcacacgccgaacatccaaactgcacacgccgaaagaccagacgccgcgagcccgtaatcgccgatcttcacggggt

SEQ ID NO: 497022 - DNA, 465 bp, Homo sapiens
ctgttttaaaaatgtactcctggccaggtgtggtggctcacacttgtcatcccagcgctttgggaggctgaggcaggtggatcacttgaggtcaggagtttgaggccagcctgggcaacatggtgaaaccccatctctaccaaaaaaacaaaaattacacaggcgtggtggcatacatttgtaatcccagctactcaggaggccggggcatgagaatcgcttgaacccaggagggggaggttgcagtgagccgagatcatgccactgtgctccagcctgggtgccagagcaagactctgtctcaaaaaaaaaaaaagagcactctgcctatacacctgttacacacatacacacacacacacacacacacacacacacacacacacacaaaccactctacattcttgccaatttataaccaactgaatgtaatgggcaagattctttaactttccctcaattaag

SEQ ID NO: 497023 - DNA, 143 bp, Homo sapiens
cagaaactggctgctgagaacaggctttgcagagcctgatgggagtcctcccagatctcgtagtagaaattcttgggggtgaaccaaatgccgcctgagctggggcctagtctggagtaactcaacaaccccttataacaagg

SEQ ID NO: 497024 - DNA, 1131 bp, Homo sapiens
ggatccggagctctgctgctgctcagtgggcctgcgcaccatgtctggctgaccctgggaggcgtctgagccccggcagcgcccggtgccacgcaaaaacaatggggtgagatgcgatccacaccctctgggctgcttccgtgcggattccctgtccattgaagaaacgctggattggtagttgaggatgacaatttaaatagcaagattccgttcgcgctacatgtaaaacagacgacctcggaaccacgtgagacacccgagacgctcgagcactggcacctcgctcatttgggtgttctgcacgcgctgtagaccttcagcctacgtaggctccagtattctgatgctcaacttggctcgttgggttcaatctagtccatctcctggtcttttgagacccccatagtgttctctgtctctgtgcaggtccgcgtacgcggagagtgacggagcgcggtccctaccatgggccctgttacatgggctgtaacagtgcacatgcatgtgttctcttgcgcaggttggttccccgtttcagagtaggtgccctgcgccgtgctggtaggctcttatgcgccgggtgaccccgtgttacatgctttgttgtgctcggaaccagtgtaggtcctgtgcttggtttcccaggcttctctagtgccttttctcactcgggtagcctatgtggggagcgttgcatcacgtcgtggttggcgatgccggcaccgatatcctgaaagcctgaaggctgtcgtgcttcttcccgtctagagtcgggcactcgtgccttggacgtcttcgtgtccccagtcactggtgcttggtctgcgtgatctccatgctgtgtcgctttgtcttcggtgtaccgtgagagtgaaagaggcttgtagctggagaacctggatgattcctgcgtgctgacttgagcctgatatccctgtggcacaggcacgagtgccagctagtgagctgcgatctcggacaaggccacaatctcgggaaacgagcgaattggagcgtggcttggcgcatcatgtaggcgcataacactcagcatggcggcgcgcacgagacacacggctaacattcgaagcactcctcgcgttggtctcctttcggcacgaggtccct

SEQ ID NO: 497025 - DNA, 110 bp, Homo sapiens
cctgggagccgttgatgtcttcgcctgcataggtccatgctcgaccccgccaggcccgtagtgcttcagtcttaagcttctcctcggggatagctcaccgcaacttaaat

SEQ ID NO: 497026 - DNA, 550 bp, Homo sapiens
accaggggggcggggaaccaccccccttggtggaccaaaggcgccccccctgggggccccaatggcaagggcggcccgtgccgttcccccgagaacaccccggtgggtattgggcaccgaacaaacccagccataccacagagaagccttgtacgggcgaccaagctctcgttgccacggagggccagaaaatttctggcgccccaccacaaagactccaaactggggtgaaaagagatgaggaccctgcccccaccccccctcgccggcccgcgcacccgtttctgccccgcgcttgcgagtcccccgcagcccaccttcttcgcgccgcaggtgctcgccggtcggtttcgcccgtttgcccaccaggccacccccggcccccctccgcttcccctgttctagcaggccgtgagcatgatctgtcttcactgcgcccttttcgccccccgcgcccttgtcccctctttctgtgtggtgtggttctgtgccattcgtcgttgtggggggggaaaaaaagagaaccgttcctaaattcccccacaaaaca

SEQ ID NO: 497027 - DNA, 828 bp, Homo sapiens
taattattggagacggagccttgcgctgtcaccgaggctggagtgcacttggcacctgtcttggctcactgcaacctccgcctcccgggttcaagcgattctcctgcctcagcctcccaagtagctgggattacaggcatgtgccaccatgcccagctaatatatggtatttttacgtaggaggtgaggtttcagcactgttggccaggctggatcccgcaactcccgaccttgtcatcctcaccaccgtatggcctcccaaagatgctggcgaccacagcgcgctgaccccaccaacggaccggacctgctataagccctccactcagtggccacattaagacacatgcatctaacaacaccctctatccataccaactgctcaccctcaaatttacacagagcctctaattcagactcataccatactggcatcccataaacatactgcacgctccaccaactccaacggacagcgccacaaacatagcgacactagccttcctcggcagaaaaagaaagcctaagcccccactaagtaccaccaatcttctccaagcctcgcgagaacaagagcgagaagatacacaccgcacgggctgcgtaccccctttactgaccaccagggcaccaccgccagaaacaacagcactaggacacctcgagcacacctctacatcatcaaaatgacggcatccaattaaatcaccaacagcaccacagccgccaccatacaccagatagatcaccaaaacaaccacacacaacggacctaactagcaaaatcgcgacaccccacgaccttccccacggacccccagaccacac

SEQ ID NO: 497028 - DNA, 300 bp, Homo sapiens
  misc_feature (140)..(140): n is a, c, g, or t
  misc_feature (283)..(283): n is a, c, g, or t
agcattttagggcggaagcgatatccgagcaggatgcggttcgtggttgccttggtccttctgaacgtcgtagtggtgggagccgtgcttgtattggtcaccgaaagcgttaagtaagaagaagctggagtacggtcttntgcaggaaacgttttcacccaccctagtttgagtcaacggtctggaggctttaccaagttgtattcggagccgtagactccaaaagacagtcctagcaagttgagtgcggaggcgcagaccccataagacacctttaacaagnttggttgcggaggcaaa

SEQ ID NO: 497029 - DNA, 300 bp, Homo sapiens
  misc_feature (257)..(257): n is a, c, g, or t
gtggtgggatcatggcttgctgcagcctcgacctctcgggctcaagtgatcctcccacctcagcctcctgagtacctaggactgcaggtgggcaccacactgcatggctgatttctttattttaattcttgtagagatgaggtcttgctgtgttgctcagactggtcttgaactcctggcctcaagcgatcctcctgccttgacctccctaagtgctggagtgctgagattacaggcctgagctgcggtgccaagtncacttctgccataatgcatttggtgtgcagtataaggctatcc

SEQ ID NO: 497030 - DNA, 248 bp, Homo sapiens
  misc_feature (91)..(91): n is a, c, g, or t
  misc_feature (180)..(180): n is a, c, g, or t
tgggcaattcgggaaaggaaattctgtttagaaccaacttatctcaaaattggaaccgggggcctaactaaaagggaaggcttaaaaaaanaaatgtcggttttccctcggggaggccaaaataattttggcttaatggaaattaaaaaggttctttttaaaaaacttggtagatgactnaatgttgaaactcttaatttgggaagggatgtatctctgcttaatttttcagattaaaattctctttg

SEQ ID NO: 497031 - DNA, 1293 bp, Homo sapiens
  misc_feature (348)..(348): n is a, c, g, or t
  misc_feature (620)..(620): n is a, c, g, or t
tcacactacaatagttaattttattggtatcaagagctcagatggcaagctttaaaccaagcaataggcttggattcgtggtgagcccaaatttcacattatgtgaagaagatcaaagcaaacgtggtgatccagtgtacatgtggagtgaaaactaaaggcctcgagtttaactcacattgggtagttttaaaattttctacaggcctaagagtctcatctaagtcaacagggtctttaagggtgcctttctgggatgtgtcgccaacaggggttatctggcatcttttcttggagctggggcaacctacatcatccttatagcttctgggttggataaacggctgnggttaaatcccccgggggctattggaggagaaactatgggaagggctcaggagaaagatcttccattgctcgcaatgggcgctataactatcccctctttaaccattggttggacacggggatggatatcctgggtataagaattttttcaacacaatggggtattcaaataagaatatcagagccaacacacttaatatccaaaataagccccaagttgggtaatttatcctgtttagagcttggtaattgacttccataagggcccactnttacaaaccgaccgatctttttagttgcacttttcctttcccaaatttttcacactactccagtgggtccaggttcccccaatgttcgaggaatttcaaatttcccgtggaggaaggaaaacagcgtgggcaacattttccaaacccgaagttcccaaaacagggccacatattttggagttcggccaagggtttccccccccaaaaattccattccagtgggcaagccgtgctggggggaattgaattggcccaagtttttattacagcccaataaggggtcaggcgaaaaatctctaacagaaattcccaggaattaatctttcccctttcgcaattccacggcgggtgtgtgtggggggaaaatccccacgctaaggttctcccggcggaaccaatacagcgatacaaaaggtggtcccggcgggttggtgggaacccacaacttttgtatgcgctcacagagagcggccttgaacaaccttggaggggaaaacgaaaacatgagaaacaacaaaaaagtctggcacaagagagaggagtcccccatcttagaggacacccccggaacacaaaacctacaagggggagaaaacaaacatcgcccgaagggtgggaaacaaaacacccgagagaaacaaactatacagagtcacgacacacaaggaacgaa

SEQ ID NO: 497032 - DNA, 143 bp, Homo sapiens
tgactagtaacatcagcacttaggtcatcagcgtatagtatgtggttctaaccaggtccagaacagaagaataagccgttagcaattacatctgggcaagtcagggagataatacattatggcctgagattggaagactataa

SEQ ID NO: 497033 - DNA, 342 bp, Homo sapiens
gggggggcccacccccccccccccccccccccggggggggttttggggggggtctttcccccccccccccaagagaggggccccctttttttttggggcccccccggggggtccgggggggggggtttttttttttttaaaatcccccccccccccccccccggggggggggggggggggggcccccccccggggggggggggcgcccccccccctttggggggggggggtttttttttttttttttgggttcccccccccaaaaaaaaaaaccgggttttttttttttatattttttgaaaaaaaaaaaaaaagggcccccaaaaaaaaaaggggggggga

SEQ ID NO: 497034 - DNA, 737 bp, Homo sapiens
gtttttttttgtttttcttcattaaaaccatttaacaaaatgatgtggggaaagcaaataaccctgaatgacttggaatctgtggatagtgaatattacaactctttgaaatggatcctggaaaatgaccctactgaagctggaacctcatgttctggcatagaacgaaagaaaaatcttgtggacagactatatcaagtggtatttgaaagccccaagtgggtcagaaaataatggtcacaaatgaaaaacaaagagggaaattattatcgatcttagtcatccaggtggagaattgtgtgaacagggtctccaaaagcaaataaacgccttctgggagggattcacagaaactactttcctattgtgattgggattaaaattttggatgaaaagtgagcgtggaggtgtgctcattgtgcggccgtccggtgatgtgcgattgtgaactgacgtggagacagcatttctatttacaaaaacggttacgtgcccaaaccaccccgtacattcaggggtctctggaaggctgtgctactcatggacgccgaaaagcgtatccggtatacggcttttggtcacgggacatcgcgagtacctatgaatggatttgccgactttttggtcccaagggtccccagttgtttaccataagagcatggggcagcctgaaaaatgccagagttcacaatgtttaatcggctgaattactcctttgaccttggaaattcggaaaa

SEQ ID NO: 497035 - DNA, 182 bp, Homo sapiens
gggtactagaggatccatcgcagacagagccttatagtcacaatgatgcgtttgtcacactacttgcgtacttttatgtaacagtaaattctgaatcacttttatagtaaagaaagaccagaggaccatatttccctgtcaatgaactttcatacactatatgaagatttcccacatctgtc

SEQ ID NO: 497036 - DNA, 732 bp, Homo sapiens
gcttgtgtgccagtctactggtaccgtgacccgtcctgcaccagcagactctgccaggctcaagggacccacctgtccagctacagggcagcccaaatctggtccctctgaacggccaggacctccgcagaattgggccctggcatgaggcacgaggcactaagcatgtgaccccaggagggcacaagggcagtggtgctcagaatgggccttccgtaggcccaggtcactcatgttagaagggctggtgagcagtcaccacagccctagagcccgtctgacttggatgatggcgagtgtgttgcacacctcactcgcccactcgctcgaccaccttggatgcaccatgcattaagcgtgtattgcactaagcaacctccacttgccctgaggccccctgatggctccgcctcacgtggagcagcatgaggccgaatacgaatgacgcgactcatgcaaactcgtcagtgcctttcgcgacgttcctcgccatcggtgatagcccggagtatctcgccaccggttcccttgctactctctatccacaagctagcgcgtctaacgtcggggtccctccaacaattatgcgcggaggacgcaagaccgaccattgtcccaagtggacgacgcactggctcactttacctagaaatctacactgaccgagcccataacaaagaacatccatcggggctcatgagtcactcggagccacatagcgggacacagcac

SEQ ID NO: 497037 - DNA, 1475 bp, Homo sapiens
gatcgacggtgcactgcgctcagcaatggatcaagtacggtgacaccactacctcagagggcgtcctcttcgcccatctactccgccctgcattgggcgagagccagtgccggacggacagacaccgcactcgcctccgtgcagatccatgtgactggatgtggggtgaaggccattcagagtgtgctgtcgatacgatgtcagcagcgagttgtcagcaacgccgaagcaatgcctggctcccaacaaagactggtgcaaggcttgtgctaggaccatgcaagaacagaagcatggccccatgtgcgcctgcgtgggtctacgacacagcgcacacaaggtgaccatcatgaaaccatcgggacaccatgcatctaacattgaagcccgcctatggaggtaatcataggagagctgacggggaaacaacactataccagggaacagataggagacgaagtaaccatgcagacgacgcaatacagagaccagcggggagacgtaagagaagacccaagtgggaaaagaaaccggaagagacccaaatggaggaaccacatggaaaaggggataccaagaacgagacaaaatagaaacaacgttcaggaccaacaggacacaagcgacagtcaaaagaacaaatatacatacacaggaggacaggataagaacacataacacccgaaaagatcagacagaggaacaggaaattcacaccagcatatgagaacacacacgacgacaccataatacgaaaggatagcaagatacataaacaaaagcaccagacaagacagagacaccaataggaaatgaatgaggggccccagaaaggagcacccaaagtgagacaacagcgactatggatacccaaaagcaaaagaggaatgggacataggaacgatgcgacaagtacagggcgacctaatgcagaagagtcaggagagcccaaaaggataaccacgatggagaagagaggaggacccacaagcaagacatagggctagcagggaagagacaaacaccaacagagaggacgatgaaccatgtcacaaggagaacacatacagtgagatgacaaatacgggagcaagcacgaacagggaaatacaagcccaggagaatgtagatcgggtacaccaagggacagccagacagaaaaggcaagacattgaaagacagaagaaccaaaagaatgacagaaagagcaacaaatccgagagaggcaatgagcaaagagacacacaacagcaacagaaagacgagagacaacaaacagacaggaaaaacagaaaaaaaaaggagagacagaaaacgagaaagagcgcaccacacacaacacatatcaaacagacacacaaaggacagcaaagaaaagggacgataaaaacacagaacacgcagaaacatgcaagaaaagccaagtagatacagaaacaccaacacagagacacacaagcagaggacaacacaaa

SEQ ID NO: 497038 - DNA, 107 bp, Homo sapiens
ggaagcaagatgggacatatattgcatatgcacaaaaggttaattcagacactggccaggcatggtggctcatgcctgtagtcccagcatttgggaagcccaggtga

SEQ ID NO: 497039 - DNA, 481 bp, Homo sapiens
acgttattctccttcctaaaaacctcccgagtagctggcactatagggacacgacaccatgcccggttaatttttgtactttttgtagagacagggttcaccatgttgtccaggctcttctttagctcctgggcaaacgatctgcccactttggccttccaaagtgcttggattacaggtgtgagctaccacgcccggccatgtaaactcacttttttggttttttttttttgaaatggagtctccctctgttgcccaggctgaattgcagtggcgcaatctcgtctcacccaaacttccgcctcccgggttcagccaattctcttgcctcagcctccagattacctgaaataataggcttgcaccaccatgcccggctaattttggtattttaagtaaaaacggggtttcaccatttgggccaggctggtcttgagctcttgacctcagttgatccaccccccctcatcctcccaaagtg

SEQ ID NO: 497040 - DNA, 545 bp, Homo sapiens
  misc_feature (8)..(8): n is a, c, g, or t
  misc_feature (543)..(543): n is a, c, g, or t
agtgagtnagaagtgtcatataaaacccaatagcaacgagttgattctgcaccgaggtttgcagaatgggaatgcgacttccctggctccatgacttgattctgcactgacgttcacagaatgggaatgcaacttccctggctccatggcatgttgacgagagtcagagctgaagaccagggagcctgggggtggtatctattggaatttttcagcctcactgatcaaagtagcttggatgagatggaaaagggccagagttcaggcggggggaaatatagctgggtcagaaggagtttcattgacaacttaaggaatagcaactcctctggtattcaatatgtaggtgaagctaaagaggatattgggaatgtgtgcaggaagcctcatgcaagaattttcacagtggcactgcttgtaataacaaaaacattggaattaactcaaatgtccatcaagcagagactggataaatgtacgggggtgacttgcttaatggaataatagacagtaatgagagtggaataaacaagagctacatgnat

SEQ ID NO: 497041 - DNA, 112 bp, Homo sapiens
atacgaatctagctcgttacccaaaaaacactgtccttcaaagaaaggtagtggcagtcagacatcaatgcaaaacttggaatgattagatataaacatggcacttacaggt

SEQ ID NO: 497042 - DNA, 177 bp, Homo sapiens
gaaaaccccccccccggatttgggcgggaacccggaaagccctttccccccaatggtttcccccctttttaaaaaaggcccaatttttaaaaaacccaagccccggggggggggtcttttccaaaacccttccccaggcccccattatttttttaacccaaaaaaaaaggggtttta

SEQ ID NO: 497043 - DNA, 184 bp, Homo sapiens
ttcgagctgctcgaaggggagtcagatgtagtctgcaggctgcgatcatcgaagtacgccgcagggtcccttcgaccgtatgcttcatagccgaagtacgacaaacattattataataaacgccctcaccactacaatcttcctaggaacaacatatgacgcactctcccctggactagagtgg

SEQ ID NO: 497044 - DNA, 102 bp, Homo sapiens
accgtgcacttccttctgagagagaactgtgccagtggagggctgagctccaccctctccctcagtctctaagacactgaagccatgctgtgctctcaccat

SEQ ID NO: 497045 - DNA, 491 bp, Homo sapiens
agcatgagactgtagacccgggaggacggtcactcaaaggcagttaagttggggcagcagaacgggtggaaactccaccgagtagagaaacaagtgccagggagtctgcgaggagaggcgcttggaggtttggtgaaagaagcagtaggacagggggtcgctggccaaaaacccctaaacatgtagaagaagataacgaaaggctcagagtaattaacaatttttatgttagtgaagcaacatgtgggttatataaaaggtcccgggttaactgaacagacaaagggagcaaccaactaggcagagaaagctgtgaaacaactatagcataaaacagagtctatctatgccaagtttaggtaaaaaatttgatcagtgacagtattgagtgatgaaagatctaggagggaaatgcagcagcacctaacctctgcttggtatcacaactaaaacttaagtttacacccccttccaagtggaaagggaactat

SEQ ID NO: 497046 - DNA, 500 bp, Homo sapiens
  misc_feature (31)..(31): n is a, c, g, or t
  misc_feature (104)..(104): n is a, c, g, or t
  misc_feature (130)..(130): n is a, c, g, or t
  misc_feature (186)..(186): n is a, c, g, or t
  misc_feature (189)..(189): n is a, c, g, or t
  misc_feature (214)..(214): n is a, c, g, or t
ccccagtctccccccttttttttaatgagtngatttgagctggaaagcagccgtttttccttggtctaagtgtgctgcatggagtgagcagtaaaagcctcaancggcacaaatgcccctccacgtttgntgggtttattttaaagaatgggggtggggaggcaaaaaccagtgtttagcgcgggnctnctgttccaaaaagaattcccaccgnccagcttgtttgtgaaacaaaaaagggttcccttttcaagttgagaacaaaaattgggttttaaaattaaaggaaacctttttgccttgccttcggtttgtatttagtgtcttgaatgtaagaacatgccccccgggtagggtttgtaaacccttagttttttccccaaatgcttgtgatttttgaccaaaacgtgaaaaatgcaagcccctgaatttttgtttgaatggggaacaaaagctggttttttttcccttgtgttagtaataaacgtcttgcccccata

SEQ ID NO: 497047 - DNA, 1398 bp, Homo sapiens
cgacgcgggcacgaggggtgtccgctggaccgaggcgtgcaaagacttccgaggaatcgggaggcatgtactagagaggactctgctgctgttatgtggtggctgctggctgaccctgggacggagtgggacagggtccatgggggatccagaacggctcatcagacaagatgagctccaggaaactgtccagagtcaggggaaagtagagttagcgtcgaagtagatgggaaggttcaagagtgctgtcaacggggctgagaagagatagaagactcgtcataggagaaaaaccacacgaagagcgcaagacactgcatcagtcaaccgtagcaagaagccgaggaaagcacgaagagaggatgcccgtaatacttgaggaccaaggggcaatcagtagtaataacacgcgggaagagagctcccagggagtcgtgctagagtgagaacccatgcattggcccatcatgtgcgcatagcagtgttaggcgccttggccttgtggaccaagagctctgcatcgagggttgcatgagcggccacgcagtacgtgctacggagatgtgggctcagggcgctgggtctgggcccgcacacgcctttgcagggagtttccctgaacacgaggagcttccgccgcgttctgagcttcgtggactgaaatcgggtggagccggcagtacgaacgtgccccatggcgtggcagacacggaccggggaggcgagaacgccaacgataggctggaaatgtgcactgcagggaccagcttaccaggcgcggcgtcggtccaaggccatcaatagtacggaagcatcgttccagggacaggtatctacagcgcggggaagccccgcgagggatgtaggcattaccgcaagttaaccgtggcccttatccagcacgtggcgccccaagcgggaggggcccttcaggttacttgactgttacccaaggtcccggggatcggtccgggaggctttgattggccgtgtctctacggtaagaggcccctgaaacttccagggccatgttccagcacctttccttgcggactagaaccagcggagggtccacagcagggcgcatggggcagtccaggttccaataggaccgggggcatccaaggagcccgggcgaacgaaactcgtacgagaaggggggaactaacggaacgggggggacgggcgaacccggacaaacacaaggggagacaggcgatgaggaacaggtggaagtgcagcggaaatcagggcggagaagcacacacaaaccctcaggacaaggggcgcaggcacaccaggcgaaaggatgcaaaagaggagcaaagcagcgagagcaccagggaggaagagagacaacagacaaacgagcaccggaagcacgagacagcacacgcg

SEQ ID NO: 497048 - DNA, 334 bp, Homo sapiens
tccctaaagaactaaaaatagaactaccattagacccatctatcctactactgtgtatctactcaaaggaaaagaaattattgtatcaaaaagatacaatattgtatcaaaaaatacccatgcttgtatatttattacagcactattcacaatagcagagtcatggaatcaacctaagtgtccatcaatggatgcctggaagaagacaatgcggtatctatacaccatggatactatgcagccgtaaggaagaatgaaactgtcttttgcagcaacattttgcttgtcttatcattacctggaggccattaacctaagtgaaataactcaaata

SEQ ID NO: 497049 - DNA, 109 bp, Homo sapiens
ctgtagtggcgccgcctggtgtggtggttagtcgggctaacaagcgcagctggcgcggggccgggaggcagcggtggcggggtgagccagaggggcggaggaggaacct

SEQ ID NO: 497050 - DNA, 311 bp, Homo sapiens
cgatcctcctccttcctctccagtcacagtctcctcatcatcttcctcctcctcagtcctcgacctcctcgtcttccactacctaagcatcttcatcatactcctcctcatcctcctcctcctcctcatcatccatggcctccacgtcgccctcagcatccgaatcacgggcctccttgtctgtcccggtcatatctcgttgcctgatgtgagtcgcgagcggagcttgaacacattacctcgcaaatcgttcaggttggttacctcgcaattgaaacggtctaagctcttgaggttaactcactttttca

SEQ ID NO: 497051 - DNA, 993 bp, Homo sapiens
  misc_feature (196)..(197): n is a, c, g, or t
  misc_feature (208)..(208): n is a, c, g, or t
aactcccgattttcaaaatggaacaccactttggtaacacaggttagtggggttcaaagggccctgaagttcttccaaaaattaaggattaaaaaagccccgaagtggcccaaatttttaggatgtatcaaaaaattgtccactgattccaagccagtgttcaaatgaaaggattaaaacggccacttgttatgtnnaaatgccctgngcaggaaaaaccacaggagaagttgtgtcaggtgttgtaattaaggtgttcaatcaacctaaagctaaagccaaggagctgggcatagagatctgtcttatgtacatagagattgagaaaggagaggctgttcaagaagagctcctgaaaggcttggacaataagaatcccaagatcatagtggcctgtatagagacactgaggaaagccttaagtgaatttggttccaaaatcatcttgcttaagccaattatcaaagtgttgccaaaactctttgagtctcgagagaaggctgttcgagatgaagccaaactaattgctgtggagatttacagatggattcgggatgctctgagacccccattacaaaatataaactctgttcagttgaaagaactagaagaagaatgggtcaaactgccaacaagtgctcctagacctactcgatttcttcgttcccaacaagaactagaagctaaattggaacaacaacagtctgctggtggagatgctgaaggaggtggtgatgatggtgatgaggtgccacaaatagatgcttatgagcttttagaagctgtagaaatcctttccaaacttcccaaagacttttatgacaaaattgaggcaaaaaaatggcaagagagaaaagaggccctggagtctgtagaagtactaataataaaccccatactggaagctggcgattatgcagatttagtaaaagcattaaagaaggttgttggaaaggacacctatgtcttgttggagcttgggatcctctagaa

SEQ ID NO: 497052 - DNA, 613 bp, Homo sapiens
gagcgaggggggatatggataaactaccaagattggtttataggaaagtaaattttggttctttaatacaaagcttgattgtcctttaaaatttttatctctgaaaatgaattatttctctgtgtgtgtgtacattttctagtttcggggggggtggttcctgttgggctcatttcttatgttttccaggcagtagcagagacagtagttcagactccacatgttctgtcatagagaaacgctctggataagttcttgcctagagagtggtagcttcttacattctctaacagaagctttggcttttccataagcccatgggcctttcatttgaggcaatgctgcacagtcccatgttcattacctaacgaatacatgttggattcctcagtagaacaaagcatgtgatgatttgctgcaagccccatttcatgggcttccagttaatccataattgtttaagagacaatcagggctcttagcttactgtctgagaaccaatggaaggagagattccatgctctatgccacatggagactcatgtcaccgcgcagccagtaagtgtataacagaatatgctcatgctcattcagggttatgaccccatcgaac

SEQ ID NO: 497053 - DNA, 339 bp, Homo sapiens
cagagaaatgacccaggtccaactgtccaattaaagccctgcaatgctgtgttggagctcaggtacaagttcagagaggggttttgtgctgtggagaagttcatgtgttatgtctcgcattctcttgaggaccttttctatgtttaaatgggaatgattctgtgctcaggtcaaatgcatgatttgtgtctggtacctctgcgaaatccagatatttcaataatttgttgatatcttctactacctccctccgataatttctgatttctgtccggccgcacacatctagggcatccaggtcagcgatcagccccgagagcacacaggataagtgcctgc

SEQ ID NO: 497054 - DNA, 683 bp, Homo sapiens
  misc_feature (401)..(401): n is a, c, g, or t
  misc_feature (428)..(428): n is a, c, g, or t
  misc_feature (452)..(452): n is a, c, g, or t
  misc_feature (484)..(484): n is a, c, g, or t
  misc_feature (503)..(503): n is a, c, g, or t
  misc_feature (543)..(543): n is a, c, g, or t
gggctgcaggaattggcacgaggaaaacgataaggatattccttagcgaactaaaagtaaatctaccattccatccagcaatctcactactaggtatccacccaaaggaaaagtgattatatgaaaaagacacatgcacatgcatgcttatagtagcacaattcacaattgtaaaggtacggaaccaacctaactgcccattgaccaatgagtggataaagaaaatgtggcatatatacacaatggaatactactcagtcataaaaaggaatgaaataatgtcttttgccgcaacttggatggagctggaggccattattctaagtgaagtaactcaagaatagaaaaccaaataccatatattttcacctataagtgggagctaagctgtgaggacacanatacatacagagtgatataatgagctntggagactcggagagcaaggttgngagccgggtaagggagaaaaagactgcatatngggacagtatacactgcantggtgatgggtgcactaaaacctcagaattcaccactatngaaaatcatcatgtacccaaccacttatatcccaatgctaattgaataaaggaagtaaagagaaacagatctgacataaccatatatctttggagcttttcttttctaatatgagtttgataagtcgttttattttttgc

SEQ ID NO: 497055 - DNA, 329 bp, Homo sapiens
  misc_feature (63)..(63): n is a, c, g, or t
  misc_feature (262)..(262): n is a, c, g, or t
  misc_feature (327)..(328): n is a, c, g, or t
aaggagttgggtctaccagagtataaacccaggaagtaggcatttgtattcatatttatgttntttcgcattctcccttggagatggaattgtttctgtccaatcaggaacttgtcacaatttcctttcatagaggacttcataagagatttttttctatttctatcatgcctaatgttccaaatagattttaaaaactggttgagtgcatattacttttagcttcagaagatatcatgtatatttaagaggcatttaactnttataaattattttgatgacttaatattgtctgtctacattaaataaaggatctttttgatcatnna

SEQ ID NO: 497056 - DNA, 417 bp, Homo sapiens
taaatcccaccaattttaaggattatcccggggtccaaatttcacattcatattcaatttcctcaaaaatatttattgccatgaaaaagaattaaataatggcatttgcagttaccctggatggaattggagaccattattcctaagtaaagtaactcaggaatggaaaatcaaacattgtatgctctcactcataagtgggagctaagctacaaggatgcaaagtcgtaagaatgatgcaatggactttggaaactcggtgggaaagggtgggaggggggtgagggataaaggactacaaactgggtacagtgtatactactcaggtgatggatgcaccaaaatctaagaaatcaacactaaagaatttattcatgtaatcaaacaccacctgttccccaaaaacctatgggaata

SEQ ID NO: 497057 - DNA, 118 bp, Homo sapiens
  misc_feature (13)..(13): n is a, c, g, or t
  misc_feature (38)..(38): n is a, c, g, or t
  misc_feature (42)..(42): n is a, c, g, or t
ctgactggagtgnccagtgccctgtcctccagataccnctgngctcactgcccatgatgcagggctttcaaggataggctttattctgcaagcaatcaaataataaatctattctgct

SEQ ID NO: 497058 - DNA, 183 bp, Homo sapiens
acctagctgtgcttcatggtgtttaagaggaactccttggggggaatattttccggccgactgaccaatcccatatccaatctgagtttttcttcaagatgctttcaacttctttccttctttcaatatcatcttcctcagactgtgagctgtttttctctccaatgctatgggtatctgttt

SEQ ID NO: 497059 - DNA, 154 bp, Homo sapiens
cacaatattcaggtcaccaaaaatcttcaggagctagtccacatgatcctctgggaaggcctggatacacgcttatgcttgttatgacgatctcaagcgcaggagtctgcgagattcatcccctactccccggaaggattgcttggctgggtgt

SEQ ID NO: 497060 - DNA, 3188 bp, Homo sapiens
tgaatgtaagatggcgcccaggagctgtgaggagaaaaccctgtcggtcttggagcgacgacggcagaaccaggtccctggcggtgcggcggggccggcgggtgcagcggaggcggcggcggcggcggcagtgacgtcgccgggaaccctaaggactctgcaatatgaataattccctagagaacaccatctcctttgaagagtacatccgagtaaaggcacggtctgtcccgcaacacaggatgaaggaatttctggactcactggcctctaaggggccagaagcccttcaggagttccagcagacagccaccactaccatggtgtaccaacagggtgggaactgcatatacacagacagcactgaagtggctgggtctttgcttgaacttgcctgtccagtcaccaccagtgttcagccacaaacccagcaagaacagcagatccaggttcagcagccgcagcaggttcaggtccaggtgcaggtacagcagtctccgcaacaggtctcggctcagctctccccacaactcaccgttcaccagcctactgagcaacccatccaggtccaggtgcagatccaaggccaggcaccacagtcagcagccccctccattcagaccccgtctctgcagagtcccagtccctcgcagctgcaagcagctcagatccaggtgcagcacgtgcaagcagcccagcagatccaggctgcagaaatcccggaggagcacatcccacatcagcaaatccaggctcagctggtggctggccagtctcttgctggtggtcagcagatccaaatccagaccgtgggtgccctttccccaccaccatcccagcagggctcaccccgggaaggggagcggcgggttggcacggccagtgtcctccaaccagtgaagaagcgcaaagtggacatgcccatcactgtgtcctacgccatctcagggcagccggtggccaccgtgctggccattccacagggccagcagcagagttatgtgtctttgaggccagacttactgacagtagacagtgcccacctgtacagtgccactgggaccattactagccctacaggagaaacctggaccatccctgtttattctgcccagccccggggggaccctcagcagcagagcattacccacattgccattccccaggaagcctacaacgcagttcacgtcagtggctcacccacagccctggcagctgttaagctggaggatgacaaggagaagatggtgggcaccacatctgtagtgaaaaactcccatgaagaggtagtgcagacccttgcaaactctctctttccagcacagttcatgaatggcaacatccacattccagtggctgtgcaggctgtggcaggcacgtaccagaatacggctcaaactgtccatatatgggacccccaacagcagccgcagcagcaaactccccaggaacagacaccaccaccacagcagcagcagcagcaactccaagttacttgttcagctcaaactgtccaggttgctgaagttgaaccacagtcacagccacagccttccccagaacttctgcttccaaattctttgaagccagaagaagggcttgaagtatggaaaaactgggcccagaccaagaatgctgaactagagaaggatgctcagaacagattggcacccattgggaggcgccaactgctgcgattccaggaagatctcatctcctctgctgtggcagagttgaattatgggctctgtctaatgacacgggaagctcgaaatggagaaggtgaaccctatgacccagatgtgctctactatattttcctgtgtattcaaaagtatctttttgaaaatggaagggtagatgacattttctccgatctttattatgttcggttcacggagtggctacatgaagttctgaaggatgttcagccccgggtcactccacttggctatgtcttgcccagccacgtgactgaggagatgctatgggagtgcaagcagcttggggctcactccccctccaccttgctgaccaccctcatgttctttaataccaagtacttcctattgaagacagtggaccagcacatgaagctggccttctccaaggtcttgcgacagacaaagaagaacccctctaatcccaaggataaaagcacgagtatccggtacttgaaggcccttggaatacaccagactggccagaaagttacagatgacatgtatgcagaacagacggaaaatccagagaatccattgagatgtcccatcaagctctatgatttctacctcttcaaatgcccccagagtgtgaaaggccggaatgacaccttttacctgacacctgagccagtggtggcccccaacagcccaatctggtactcagtccagcctatcagcagagagcagatgggacaaatgctgacgcggatcctggtgataagagaaattcaggaggccatcgcagtggccaatgcaagcactatgcactgagatgccttggccatggcacaagagaaaccagccaggaaaaaccagacagactttcacactaaagaagaggcctccatttttttttttcttttttttattggtgtagttacgaagcctttcaggctgcttctgtttaaaatataaaagaaaactttgccccctttgcatcttcataaacctgctgcggcagactcctcagccgatggtggctctgggtttccttgagtgtcatatgtcctagaaagttgctggctgactcttttttgtctggggcctggggaaagggcttggactgtgaaaagaaatgtggcccctttccatcttcaagagagatggaattaatgatggatggaccctggagggaatctccccagccgacttccactgggctgacagactttgctgaccacaggggaacgatgttcttttctttcttcatgatcagacataaacttagcatcttaatggaagaaaaatgaggggaacttcaattatgatttattaaagacaatttctattacaccctcctttatgacaagtgacattttagatgtaaaagtaaaaactttaccatgccttttttttttttgttggcctaacattgaggccttaaaacctgaggctcctgtgcctgatggaattcttgtaacatacacttgtgtatcatataaagataccactctgtttctctta

SEQ ID NO: 497061 - DNA, 220 bp, Homo sapiens
caatttgggtgttattgttctgtaatttctgtatatttaaatatattagaggctgggcgtggtggcccatgcctgtaatcccagcacttgggagtcaaggtgggtggatcacttgaggtcaggagttcgagaccagtctggccaacatggcgaaaccttgtctcaaccaaaaatacaaaaataaatggagcatggtggcatgcacctgttaagtcccagc

SEQ ID NO: 497062 - DNA, 3248 bp, Homo sapiens
tgaatgtaagatggcgcccaggagctgtgaggagaaaaccctgtcggtcttggagcgacgacggcagaaccaggtccctggcggtgcggcggggccggcgggtgcagcggaggcggcggcggcggcggcagtgacgtcgccggaatattagaagtcttaagaactcaggacaagcagcagaaatacatgcaacatggtgactggaaccctaaggactctgcaatatgaataattccctagagaacaccatctcctttgaagagtacatccgagtaaaggcacggtctgtcccgcaacacaggatgaaggaatttctggactcactggcctctaaggggccagaagcccttcaggagttccagcagacagccaccactaccatggtgtaccaacagggtgggaactgcatatacacagacagcactgaagtggctgggtctttgcttgaacttgcctgtccagtcaccaccagtgttcagccacaaacccagcaagaacagcagatccaggttcagcagccgcagcaggttcaggtccaggtgcaggtacagcagtctccgcaacaggtctcggctcagctctccccacaactcaccgttcaccagcctactgagcaacccatccaggtccaggtgcagatccaaggccaggcaccacagtcagcagccccctccattcagaccccgtctctgcagagtcccagtccctcgcagctgcaagcagctcagatccaggtgcagcacgtgcaagcagcccagcagatccaggctgcagaaatcccggaggagcacatcccacatcagcaaatccaggctcagctggtggctggccagtctcttgctggtggtcagcagatccaaatccagaccgtgggtgccctttccccaccaccatcccagcagggctcaccccgggaaggggagcggcgggttggcacggccagtgtcctccaaccagtgaagaagcgcaaagtggacatgcccatcactgtgtcctacgccatctcagggcagccggtggccaccgtgctggccattccacagggccagcagcagagttatgtgtctttgaggccagacttactgacagtagacagtgcccacctgtacagtgccactgggaccattactagccctacaggagaaacctggaccatccctgtttattctgcccagccccggggggaccctcagcagcagagcattacccacattgccattccccaggaagcctacaacgcagttcacgtcagtggctcacccacagccctggcagctgttaagctggaggatgacaaggagaagatggtgggcaccacatctgtagtgaaaaactcccatgaagaggtagtgcagacccttgcaaactctctctttccagcacagttcatgaatggcaacatccacattccagtggctgtgcaggctgtggcaggcacgtaccagaatacggctcaaactgtccatatatgggacccccaacagcagccgcagcagcaaactccccaggaacagacaccaccaccacagcagcagcagcagcaactccaagttacttgttcagctcaaactgtccaggttgctgaagttgaaccacagtcacagccacagccttccccagaacttctgcttccaaattctttgaagccagaagaagggcttgaagtatggaaaaactgggcccagaccaagaatgctgaactagagaaggatgctcagaacagattggcacccattgggaggcgccaactgctgcgattccaggaagatctcatctcctctgctgtggcagagttgaattatgggctctgtctaatgacacgggaagctcgaaatggagaaggtgaaccctatgacccagatgtgctctactatattttcctgtgtattcaaaagtatctttttgaaaatggaagggtagatgacattttctccgatctttattatgttcggttcacggagtggctacatgaagttctgaaggatgttcagccccgggtcactccacttggctatgtcttgcccagccacgtgactgaggagatgctatgggagtgcaagcagcttggggctcactccccctccaccttgctgaccaccctcatgttctttaataccaagtacttcctattgaagacagtggaccagcacatgaagctggccttctccaaggtcttgcgacagacaaagaagaacccctctaatcccaaggataaaagcacgagtatccggtacttgaaggcccttggaatacaccagactggccagaaagttacagatgacatgtatgcagaacagacggaaaatccagagaatccattgagatgtcccatcaagctctatgatttctacctcttcaaatgcccccagagtgtgaaaggccggaatgacaccttttacctgacacctgagccagtggtggcccccaacagcccaatctggtactcagtccagcctatcagcagagagcagatgggacaaatgctgacgcggatcctggtgataagagaaattcaggaggccatcgcagtggccaatgcaagcactatgcactgagatgccttggccatggcacaagagaaaccagccaggaaaaaccagacagactttcacactaaagaagaggcctccatttttttttttcttttttttattggtgtagttacgaagcctttcaggctgcttctgtttaaaatataaaagaaaactttgccccctttgcatcttcataaacctgctgcggcagactcctcagccgatggtggctctgggtttccttgagtgtcatatgtcctagaaagttgctggctgactcttttttgtctggggcctggggaaagggcttggactgtgaaaagaaatgtggcccctttccatcttcaagagagatggaattaatgatggatggaccctggagggaatctccccagccgacttccactgggctgacagactttgctgaccacaggggaacgatgttcttttctttcttcatgatcagacataaacttagcatcttaatggaagaaaaatgaggggaacttcaattatgatttattaaagacaatttctattacaccctcctttatgacaagtgacattttagatgtaaaagtaaaaactttaccatgccttttttttttttgttggcctaacattgaggccttaaaacctgaggctcctgtgcctgatggaattcttgtaacatacacttgtgtatcatataaagataccactctgtttctctta

SEQ ID NO: 497063 - DNA, 3380 bp, Homo sapiens
  misc_feature (119)..(119): n is a, c, g, or t
agcggagttttggggcgcgcgctctgatatcgggtggcggtgctgcctcgagagcgcgcaggaggcttctgctgagcagagggccggccgcggctcgttgcgctgggaaggttgaggantgggtcctttctggtctggtgacgttcccgggcatccgtggcctcggcctggagagaaaccaaccagctttgctgtctggcttgcggttccgctcctctgtgaggggggcgagattgcccgttctcctcgaagaatgccgttacttgaggcccaagaatattagaagtcttaagaactcaggacaagcagcagaaatacatgcaacatggtgactggaaccctaaggactctgcaatatgaataattccctagagaacaccatctcctttgaagagtacatccgagtaaaggcacggtctgtcccgcaacacaggatgaaggaatttctggactcactggcctctaaggggccagaagcccttcaggagttccagcagacagccaccactaccatggtgtaccaacagggtgggaactgcatatacacagacagcactgaagtggctgggtctttgcttgaacttgcctgtccagtcaccaccagtgttcagccacaaacccagcaagaacagcagatccaggttcagcagccgcagcaggttcaggtccaggtgcaggtacagcagtctccgcaacaggtctcggctcagctctccccacaactcaccgttcaccagcctactgagcaacccatccaggtccaggtgcagatccaaggccaggcaccacagtcagcagccccctccattcagaccccgtctctgcagagtcccagtccctcgcagctgcaagcagctcagatccaggtgcagcacgtgcaagcagcccagcagatccaggctgcagaaatcccggaggagcacatcccacatcagcaaatccaggctcagctggtggctggccagtctcttgctggtggtcagcagatccaaatccagaccgtgggtgccctttccccaccaccatcccagcagggctcaccccgggaaggggagcggcgggttggcacggccagtgtcctccaaccagtgaagaagcgcaaagtggacatgcccatcactgtgtcctacgccatctcagggcagccggtggccaccgtgctggccattccacagggccagcagcagagttatgtgtctttgaggccagacttactgacagtagacagtgcccacctgtacagtgccactgggaccattactagccctacaggagaaacctggaccatccctgtttattctgcccagccccggggggaccctcagcagcagagcattacccacattgccattccccaggaagcctacaacgcagttcacgtcagtggctcacccacagccctggcagctgttaagctggaggatgacaaggagaagatggtgggcaccacatctgtagtgaaaaactcccatgaagaggtagtgcagacccttgcaaactctctctttccagcacagttcatgaatggcaacatccacattccagtggctgtgcaggctgtggcaggcacgtaccagaatacggctcaaactgtccatatatgggacccccaacagcagccgcagcagcaaactccccaggaacagacaccaccaccacagcagcagcagcagcaactccaagttacttgttcagctcaaactgtccaggttgctgaagttgaaccacagtcacagccacagccttccccagaacttctgcttccaaattctttgaagccagaagaagggcttgaagtatggaaaaactgggcccagaccaagaatgctgaactagagaaggatgctcagaacagattggcacccattgggaggcgccaactgctgcgattccaggaagatctcatctcctctgctgtggcagagttgaattatgggctctgtctaatgacacgggaagctcgaaatggagaaggtgaaccctatgacccagatgtgctctactatattttcctgtgtattcaaaagtatctttttgaaaatggaagggtagatgacattttctccgatctttattatgttcggttcacggagtggctacatgaagttctgaaggatgttcagccccgggtcactccacttggctatgtcttgcccagccacgtgactgaggagatgctatgggagtgcaagcagcttggggctcactccccctccaccttgctgaccaccctcatgttctttaataccaagtacttcctattgaagacagtggaccagcacatgaagctggccttctccaaggtcttgcgacagacaaagaagaacccctctaatcccaaggataaaagcacgagtatccggtacttgaaggcccttggaatacaccagactggccagaaagttacagatgacatgtatgcagaacagacggaaaatccagagaatccattgagatgtcccatcaagctctatgatttctacctcttcaaatgcccccagagtgtgaaaggccggaatgacaccttttacctgacacctgagccagtggtggcccccaacagcccaatctggtactcagtccagcctatcagcagagagcagatgggacaaatgctgacgcggatcctggtgataagagaaattcaggaggccatcgcagtggccaatgcaagcactatgcactgagatgccttggccatggcacaagagaaaccagccaggaaaaaccagacagactttcacactaaagaagaggcctccatttttttttttcttttttttattggtgtagttacgaagcctttcaggctgcttctgtttaaaatataaaagaaaactttgccccctttgcatcttcataaacctgctgcggcagactcctcagccgatggtggctctgggtttccttgagtgtcatatgtcctagaaagttgctggctgactcttttttgtctggggcctggggaaagggcttggactgtgaaaagaaatgtggcccctttccatcttcaagagagatggaattaatgatggatggaccctggagggaatctccccagccgacttccactgggctgacagactttgctgaccacaggggaacgatgttcttttctttcttcatgatcagacataaacttagcatcttaatggaagaaaaatgaggggaacttcaattatgatttattaaagacaatttctattacaccctcctttatgacaagtgacattttagatgtaaaagtaaaaactttaccatgccttttttttttttgttggcctaacattgaggccttaaaacctgaggctcctgtgcctgatggaattcttgtaacatacacttgtgtatcatataaagataccactctgtttctctta

SEQ ID NO: 497064 - DNA, 480 bp, Homo sapiens
gctggactcgagcgacggtgggcagtgtggggggtgcgatacacagtgacctcaggatggggaccccgatggatccagtgaagctggacctggaaagaccaaagggagctaaacaaggagggacctactgggcccattttcccatgtcgctgtgggtcagccctgggcctgggggaaccactctgccagttcctgccgctgcacctctgaagccacacccagcccgccacaggcccaccatgggggcttcaggttcaggatgctgaagatccagcgttggcccaggattggggtgcggggcatgtatccaaaatggctacttccttgtctcggcttctgctctaagggtacttgccttcttgtgatattggattggtggcatctttaaacactctcccgggatgtgtgtggctgtggctgaattctcactgaagccccctgggtggcatcctcttgagccacatcgacgggtaccgagct

SEQ ID NO: 497065 - DNA, 3073 bp, Homo sapiens
gaaaggaggctctggcgggcgacggaaggaaccctaaggactctgcaatatgaataattccctagagaacaccatctcctttgaagagtacatccgagtaaaggcacggtctgtcccgcaacacaggatgaaggaatttctggactcactggcctctaaggggccagaagcccttcaggagttccagcagacagccaccactaccatggtgtaccaacagggtgggaactgcatatacacagacagcactgaagtggctgggtctttgcttgaacttgcctgtccagtcaccaccagtgttcagccacaaacccagcaagaacagcagatccaggttcagcagccgcagcaggttcaggtccaggtgcaggtacagcagtctccgcaacaggtctcggctcagctctccccacaactcaccgttcaccagcctactgagcaacccatccaggtccaggtgcagatccaaggccaggcaccacagtcagcagccccctccattcagaccccgtctctgcagagtcccagtccctcgcagctgcaagcagctcagatccaggtgcagcacgtgcaagcagcccagcagatccaggctgcagaaatcccggaggagcacatcccacatcagcaaatccaggctcagctggtggctggccagtctcttgctggtggtcagcagatccaaatccagaccgtgggtgccctttccccaccaccatcccagcagggctcaccccgggaaggggagcggcgggttggcacggccagtgtcctccaaccagtgaagaagcgcaaagtggacatgcccatcactgtgtcctacgccatctcagggcagccggtggccaccgtgctggccattccacagggccagcagcagagttatgtgtctttgaggccagacttactgacagtagacagtgcccacctgtacagtgccactgggaccattactagccctacaggagaaacctggaccatccctgtttattctgcccagccccggggggaccctcagcagcagagcattacccacattgccattccccaggaagcctacaacgcagttcacgtcagtggctcacccacagccctggcagctgttaagctggaggatgacaaggagaagatggtgggcaccacatctgtagtgaaaaactcccatgaagaggtagtgcagacccttgcaaactctctctttccagcacagttcatgaatggcaacatccacattccagtggctgtgcaggctgtggcaggcacgtaccagaatacggctcaaactgtccatatatgggacccccaacagcagccgcagcagcaaactccccaggaacagacaccaccaccacagcagcagcagcagcaactccaagttacttgttcagctcaaactgtccaggttgctgaagttgaaccacagtcacagccacagccttccccagaacttctgcttccaaattctttgaagccagaagaagggcttgaagtatggaaaaactgggcccagaccaagaatgctgaactagagaaggatgctcagaacagattggcacccattgggaggcgccaactgctgcgattccaggaagatctcatctcctctgctgtggcagagttgaattatgggctctgtctaatgacacgggaagctcgaaatggagaaggtgaaccctatgacccagatgtgctctactatattttcctgtgtattcaaaagtatctttttgaaaatggaagggtagatgacattttctccgatctttattatgttcggttcacggagtggctacatgaagttctgaaggatgttcagccccgggtcactccacttggctatgtcttgcccagccacgtgactgaggagatgctatgggagtgcaagcagcttggggctcactccccctccaccttgctgaccaccctcatgttctttaataccaagtacttcctattgaagacagtggaccagcacatgaagctggccttctccaaggtcttgcgacagacaaagaagaacccctctaatcccaaggataaaagcacgagtatccggtacttgaaggcccttggaatacaccagactggccagaaagttacagatgacatgtatgcagaacagacggaaaatccagagaatccattgagatgtcccatcaagctctatgatttctacctcttcaaatgcccccagagtgtgaaaggccggaatgacaccttttacctgacacctgagccagtggtggcccccaacagcccaatctggtactcagtccagcctatcagcagagagcagatgggacaaatgctgacgcggatcctggtgataagagaaattcaggaggccatcgcagtggccaatgcaagcactatgcactgagatgccttggccatggcacaagagaaaccagccaggaaaaaccagacagactttcacactaaagaagaggcctccatttttttttttcttttttttattggtgtagttacgaagcctttcaggctgcttctgtttaaaatataaaagaaaactttgccccctttgcatcttcataaacctgctgcggcagactcctcagccgatggtggctctgggtttccttgagtgtcatatgtcctagaaagttgctggctgactcttttttgtctggggcctggggaaagggcttggactgtgaaaagaaatgtggcccctttccatcttcaagagagatggaattaatgatggatggaccctggagggaatctccccagccgacttccactgggctgacagactttgctgaccacaggggaacgatgttcttttctttcttcatgatcagacataaacttagcatcttaatggaagaaaaatgaggggaacttcaattatgatttattaaagacaatttctattacaccctcctttatgacaagtgacattttagatgtaaaagtaaaaactttaccatgccttttttttttttgttggcctaacattgaggccttaaaacctgaggctcctgtgcctgatggaattcttgtaacatacacttgtgtatcatataaagataccactctgtttctctta

SEQ ID NO: 497066 - DNA, 413 bp, Homo sapiens
tcggtctacctgttattaattaattaattaattagacaagtatgaaaacaaaggctgagcaatatgtatatttctccttgaaataaaattatcagtgaatccatttttgataggtgcaggaccagatggagttgaagaaattaaaagacattcatttttctcaacgatagactggaatgtaagtatagaatgaaaacttgcttgaaatatttctttataattaaaatatgtctaagtctcttttttttttcccctccaggaaactgtatagaagagaaattcatccgccatttaaacctgcaacgggcaggcctgaagatacattctattttgatcctgagtttactgcaaaaactcccaagggtagggaggaaaatgtggaaaatccaaatataagacaaggtagagccgag

SEQ ID NO: 497067 - DNA, 110 bp, Homo sapiens
ggcactggtggtgcctcagccatgggctggaacgttcttctcctcggctctcttctttcacatgcacagaggtcttgtgaacctcctatagctctgactcgagacaccac

SEQ ID NO: 497068 - DNA, 3351 bp, Homo sapiens
  misc_feature (119)..(119): n is a, c, g, or t
agcggagttttggggcgcgcgctctgatatcgggtggcggtgctgcctcgagagcgcgcaggaggcttctgctgagcagagggccggccgcggctcgttgcgctgggaaggttgaggantgggtcctttctggtctggtgacgttcccgggcatccgtggcctcggcctggagagaaaccaaccagctttgctgtctggcttgcggttccgctcctctgtgaggggggcgagattgcccgttctcctcgaagaatgccgttacttgaggcccaagaatattagaagtcttaagaactcaggacaagcagcagaaatacatgcaacatggtgactggaaccctaaggactctgcaatatgaataattccctagagaacaccatctcctttgaagagtacatccgagtaaaggcacggtctgtcccgcaacacaggatgaaggaatttctggactcactggcctctaaggggccagaagcccttcaggagttccagcagacagccaccactaccatggtgtaccaacagggtgggaactgcatatacacagacagcactgaagtggctgggtctttgcttgaacttgcctgtccagtcaccaccagtgttcagccacaaacccagcaagaacagcagatcccaggtgcaggtacagcagtctccgcaacaggtctcggctcagctctccccacaactcaccgttcaccagcctactgagcaacccatccaggtccaggtgcagatccaaggccaggcaccacagtcagcagccccctccattcagaccccgtctctgcagagtcccagtccctcgcagctgcaagcagctcagatccaggtgcagcacgtgcaagcagcccagcagatccaggctgcagaaatcccggaggagcacatcccacatcagcaaatccaggctcagctggtggctggccagtctcttgctggtggtcagcagatccaaatccagaccgtgggtgccctttccccaccaccatcccagcagggctcaccccgggaaggggagcggcgggttggcacggccagtgtcctccaaccagtgaagaagcgcaaagtggacatgcccatcactgtgtcctacgccatctcagggcagccggtggccaccgtgctggccattccacagggccagcagcagagttatgtgtctttgaggccagacttactgacagtagacagtgcccacctgtacagtgccactgggaccattactagccctacaggagaaacctggaccatccctgtttattctgcccagccccggggggaccctcagcagcagagcattacccacattgccattccccaggaagcctacaacgcagttcacgtcagtggctcacccacagccctggcagctgttaagctggaggatgacaaggagaagatggtgggcaccacatctgtagtgaaaaactcccatgaagaggtagtgcagacccttgcaaactctctctttccagcacagttcatgaatggcaacatccacattccagtggctgtgcaggctgtggcaggcacgtaccagaatacggctcaaactgtccatatatgggacccccaacagcagccgcagcagcaaactccccaggaacagacaccaccaccacagcagcagcagcagcaactccaagttacttgttcagctcaaactgtccaggttgctgaagttgaaccacagtcacagccacagccttccccagaacttctgcttccaaattctttgaagccagaagaagggcttgaagtatggaaaaactgggcccagaccaagaatgctgaactagagaaggatgctcagaacagattggcacccattgggaggcgccaactgctgcgattccaggaagatctcatctcctctgctgtggcagagttgaattatgggctctgtctaatgacacgggaagctcgaaatggagaaggtgaaccctatgacccagatgtgctctactatattttcctgtgtattcaaaagtatctttttgaaaatggaagggtagatgacattttctccgatctttattatgttcggttcacggagtggctacatgaagttctgaaggatgttcagccccgggtcactccacttggctatgtcttgcccagccacgtgactgaggagatgctatgggagtgcaagcagcttggggctcactccccctccaccttgctgaccaccctcatgttctttaataccaagtacttcctattgaagacagtggaccagcacatgaagctggccttctccaaggtcttgcgacagacaaagaagaacccctctaatcccaaggataaaagcacgagtatccggtacttgaaggcccttggaatacaccagactggccagaaagttacagatgacatgtatgcagaacagacggaaaatccagagaatccattgagatgtcccatcaagctctatgatttctacctcttcaaatgcccccagagtgtgaaaggccggaatgacaccttttacctgacacctgagccagtggtggcccccaacagcccaatctggtactcagtccagcctatcagcagagagcagatgggacaaatgctgacgcggatcctggtgataagagaaattcaggaggccatcgcagtggccaatgcaagcactatgcactgagatgccttggccatggcacaagagaaaccagccaggaaaaaccagacagactttcacactaaagaagaggcctccatttttttttttcttttttttattggtgtagttacgaagcctttcaggctgcttctgtttaaaatataaaagaaaactttgccccctttgcatcttcataaacctgctgcggcagactcctcagccgatggtggctctgggtttccttgagtgtcatatgtcctagaaagttgctggctgactcttttttgtctggggcctggggaaagggcttggactgtgaaaagaaatgtggcccctttccatcttcaagagagatggaattaatgatggatggaccctggagggaatctccccagccgacttccactgggctgacagactttgctgaccacaggggaacgatgttcttttctttcttcatgatcagacataaacttagcatcttaatggaagaaaaatgaggggaacttcaattatgatttattaaagacaatttctattacaccctcctttatgacaagtgacattttagatgtaaaagtaaaaactttaccatgccttttttttttttgttggcctaacattgaggccttaaaacctgaggctcctgtgcctgatggaattcttgtaacatacacttgtgtatcatataaagataccactctgtttctctta

SEQ ID NO: 497069 - DNA, 337 bp, Homo sapiens
  misc_feature (7)..(7): n is a, c, g, or t
  misc_feature (275)..(275): n is a, c, g, or t
  misc_feature (329)..(329): n is a, c, g, or t
gaggggnaccttaaaaattaccggccacaaaaagaaaataaatttaggaaaaattattggtttattttagggtgatgttcacagaagaagatgtcaaattctacttggctgaacttgcacttgctttagaccatctacatagcctgggaataatttatagagacttaaaaccagaaaagtaaggaatcatgctactaagttgaatacaatgtaatatgattgtttaggagattataaaaaatcaagtggcttcatgaaactcccacagtaatgtntagcgtgcctgtgcttcacatctctgctaacactgtagtttcatactttaaatnactcagtt

SEQ ID NO: 497070 - DNA, 3045 bp, Homo sapiens
tgaatgtaagatggcgcccaggagctgtgaggagaaaaccctgtcggtcttggagcgacgacggcagaaccaggtccctggcggtgcggcggggccggcgggtgcagcggaggcggcggcggcggcggcagtgacgtcgccgggaaccctaaggactctgcaatatgaataattccctagagaacaccatctcctttgaagagtacatccgagtaaaggcacggtctgtcccgcaacacaggatgaaggaatttctggactcactggcctctaaggggccagaagcccttcaggagttccagcagacagccaccactaccatggtgtaccaacagggtgggaactgcatatacacagacagcactgaagtggctgggtctttgcttgaacttgcctgtccagtcaccaccagtgttcagccacaaacccagcaagaacagcagatccaggttcagcagccgcagcaggttcaggtccaggtgcaggtacagcagtctccgcaacaggtctcggctcagctctccccacaactcaccgttcaccagcctactgagcaacccatccaggtccaggtgcagatccaaggccaggcaccacagtcagcagccccctccattcagaccccgtctctgcagagtcccagtccagcagatccaaatccagaccgtgggtgccctttccccaccaccatcccagcagggctcaccccgggaaggggagcggcgggttggcacggccagtgtcctccaaccagtgaagaagcgcaaagtggacatgcccatcactgtgtcctacgccatctcagggcagccggtggccaccgtgctggccattccacagggccagcagcagagttatgtgtctttgaggccagacttactgacagtagacagtgcccacctgtacagtgccactgggaccattactagccctacaggagaaacctggaccatccctgtttattctgcccagccccggggggaccctcagcagcagagcattacccacattgccattccccaggaagcctacaacgcagttcacgtcagtggctcacccacagccctggcagctgttaagctggaggatgacaaggagaagatggtgggcaccacatctgtagtgaaaaactcccatgaagaggtagtgcagacccttgcaaactctctctttccagcacagttcatgaatggcaacatccacattccagtggctgtgcaggctgtggcaggcacgtaccagaatacggctcaaactgtccatatatgggacccccaacagcagccgcagcagcaaactccccaggaacagacaccaccaccacagcagcagcagcagcaactccaagttacttgttcagctcaaactgtccaggttgctgaagttgaaccacagtcacagccacagccttccccagaacttctgcttccaaattctttgaagccagaagaagggcttgaagtatggaaaaactgggcccagaccaagaatgctgaactagagaaggatgctcagaacagattggcacccattgggaggcgccaactgctgcgattccaggaagatctcatctcctctgctgtggcagagttgaattatgggctctgtctaatgacacgggaagctcgaaatggagaaggtgaaccctatgacccagatgtgctctactatattttcctgtgtattcaaaagtatctttttgaaaatggaagggtagatgacattttctccgatctttattatgttcggttcacggagtggctacatgaagttctgaaggatgttcagccccgggtcactccacttggctatgtcttgcccagccacgtgactgaggagatgctatgggagtgcaagcagcttggggctcactccccctccaccttgctgaccaccctcatgttctttaataccaagtacttcctattgaagacagtggaccagcacatgaagctggccttctccaaggtcttgcgacagacaaagaagaacccctctaatcccaaggataaaagcacgagtatccggtacttgaaggcccttggaatacaccagactggccagaaagttacagatgacatgtatgcagaacagacggaaaatccagagaatccattgagatgtcccatcaagctctatgatttctacctcttcaaatgcccccagagtgtgaaaggccggaatgacaccttttacctgacacctgagccagtggtggcccccaacagcccaatctggtactcagtccagcctatcagcagagagcagatgggacaaatgctgacgcggatcctggtgataagagaaattcaggaggccatcgcagtggccaatgcaagcactatgcactgagatgccttggccatggcacaagagaaaccagccaggaaaaaccagacagactttcacactaaagaagaggcctccatttttttttttcttttttttattggtgtagttacgaagcctttcaggctgcttctgtttaaaatataaaagaaaactttgccccctttgcatcttcataaacctgctgcggcagactcctcagccgatggtggctctgggtttccttgagtgtcatatgtcctagaaagttgctggctgactcttttttgtctggggcctggggaaagggcttggactgtgaaaagaaatgtggcccctttccatcttcaagagagatggaattaatgatggatggaccctggagggaatctccccagccgacttccactgggctgacagactttgctgaccacaggggaacgatgttcttttctttcttcatgatcagacataaacttagcatcttaatggaagaaaaatgaggggaacttcaattatgatttattaaagacaatttctattacaccctcctttatgacaagtgacattttagatgtaaaagtaaaaactttaccatgccttttttttttttgttggcctaacattgaggccttaaaacctgaggctcctgtgcctgatggaattcttgtaacatacacttgtgtatcatataaagataccactctgtttctctta

SEQ ID NO: 497071 - DNA, 3990 bp, Homo sapiens
atgccgctggcgcagctggcggacccgtggcagaagatggctgtggagagcccgtccgacagcgctgagaatggacagcaaattatggatgaacctatgggagaggaggagattaacccacaaactgaagaagtcagtatcaaagaaattgcaatcacacatcatgtaaaggaaggacatgaaaaggcagatccttcccagtttgaacttttaaaagtattagggcagggatcatttggaaaggttttcttagttaaaaaaatctcaggctctgatgctaggcagctttatgccatgaaggtattgaagaaggccacactgaaagttcgagaccgagttcggacaaaaatggaacgtgatatcttggtagaggttaatcatccttttattgtcaagttgcattatgcttttcaaactgaagggaagttgtatcttattttggattttctcaggggaggagatttgtttacacgcttatccaaagaggtgatgttcacagaagaagatgtcaaattctacttggctgaacttgcacttgctttagaccatctacatagcctgggaataatttatagagacttaaaaccagaaaatatacttcttgatgaagaaggtcacatcaagttaacagatttcggcctaagtaaagagtctattgaccatgaaaagaaggcatattctttttgtggaactgtggagtatatggctccagaagtagttaatcgtcgaggtcatactcagagtgctgactggtggtcttttggtgtgttaatgtttgaaatgcttactggtacactccctttccaaggaaaagatcgaaaagaaacaatgactatgattcttaaagccaaacttggaatgccacagtttttgagtcctgaagcgcagagtcttttacgaatgcttttcaagcgaaatcctgcaaacagattaggtgcaggaccagatggagttgaagaaattaaaagacattcatttttctcaacgatagactggaataaactgtatagaagagaaattcatccgccatttaaacctgcaacgggcaggcctgaagatacattctattttgatcctgagtttactgcaaaaactcccaaagattcacctggcattccacctagtgctaatgcacatcagctttttcgggggtttagttttgttgctattacctcagatgatgaaagccaagctatgcagacagttggtgtacattcaattgttcagcagttacacaggaacagtattcagtttactgatggatatgaagtaaaagaagatattggagttggctcctactctgtttgcaagagatgtatacataaagctacaaacatggagtttgcagtgaagattattgataaaagcaagagagacccaacagaagaaattgaaattcttcttcgttatggacagcatccaaacattatcactctaaaggatgtatatgatgatggaaagtatgtgtatgtagtaacagaacttatgaaaggaggtgaattgctggataaaattcttagacaaaaatttttctctgaacgagaggccagtgctgtcctgttcactataactaaaaccgttgaatatcttcacgcacaaggggtggttcatagagacttgaaacctagcaacattctttatgtggatgaatctggtaatccggaatctattcgaatttgtgattttggctttgcaaaacagctgagagcggaaaatggtcttctcatgactccttgttacactgcaaattttgttgcaccagaggttttaaaaagacaaggctatgatgctgcttgtgatatatggagtcttggtgtcctactctatacaatgcttaccggttacactccatttgcaaatggtcctgatgatacaccagaggaaatattggcacgaataggtagcggaaaattctcactcagtggtggttactggaattctgtttcagacacagcaaaggacctggtgtcaaagatgcttcatgtagaccctcatcagagactgactgctgctcttgtgctcagacatccttggatcgtccactgggaccaactgccacaataccaactaaacagacaggatgcaccacatctagtaaagggtgccatggcagctacatattctgctttgaaccgtaatcagtcaccagttttggaaccagtaggccgctctactcttgctcagcggagaggtattaaaaaaatcacctcaacagccctgtgaagtgacctcagtgagatatttggtaccatggtgtaagctgatagcacaagttctggcgacaggtagcacgtatctgagagacacctgcaagcacacactgtcccagctggtacccataatgctgctgttcctgctgctgctcctgctttcctctcttctcgctttaaatgattgttagcaagttagattttcctggagcttcggaagaaatgaaaatggaaacatgatgaagatatagtcactgaatcaatgagaaaaataatgaacatatgaataccacctaaaaatacactgaataaagtacaccatatagcattatttttataggaaatatttcatgtcccttaaatattctttgttagttatagggatggacagtttatgttaagcacttagcttaaacaatccgtttatattagcactgtatcccttgtgccatccaacattttgtatgtttttgtaaacagttcatatacagtacatttctgtactgctttctttaatgtatacatgccttgtttaacttggaatctattattattaatcaattgactattaaatctggttaaatagttcacctggattaacagtattgttggacagtcctaaaaatggccagattgtggaacagctgttgaatgtaatacttccaaaatgtacatatctttccccacgtctgtttcactggttcgttcatttgtttgtttcttaaagtcaggtgctctgtcagactaacctagagagctgttatggtagagaaagttatcatatgtgtgtggcatgaaatcaagaatacacctatgaagttagtccatatactttgcaactccttagagtacttttttccttaattaaggaagtagtccttgcacttctaatcttacatagcatccatacttagaatttggcatatcatctgggattttgccaatatacgtcaaagccctttaagagtcatggtaaggagatgggtgaaggaaaatttagcaacaggtaattgaagtcctattggatatttcatgtttaaatagatattctatattaaacactaatttaaatgtaataaaggccaaaggcctctgtatgaaattggatttaaactttcttattttagggaataaaacattattgatcaaacagtatctgttctaacctaaaattataggtagggcaggctaagtgaacagcattgagtattttctgaatccctcatgataatttatagccacatactgcttcctttgacttcaggaatgatcagttttcataatggccactgggcctgcttagattgcagtattcattatctgcatctaatttggtagtttccacaatcgtatttgatgaaagaaacttcagtccccattattacctgtgtctttgccaagctgcctagcatacatcagtatgtaatgtaaaagacatatgagcaagaaaaaagtgatttaacttacctcatcaagaatgtgcccctacaggccgggcgcagtggctcacgcctgtaatcccagcattttgggaggccgaggcaggtggatcacctgaggtcaggagtttgagaccagcctggccaacatggtgaaaccccgtctctactaaaaaatacaaaaattagctgggcatggtggcgtgcacctgtaatcctagctactcaggaggctgaggcaggagaatcgcttgaacctgggaggtggtggttgcagtgagccaagatcacaccattgcactccagcctgggtgacagagtgagactctgtctcaagaagg

SEQ ID NO: 497072 - DNA, 273 bp, Homo sapiens
gggctacttagaggatccgtcttaacacaggctgtaaactcgtagggggtcaggtaaggagggggaaaagccaacaaatatattacaaacttgacatcttccttttttgtgttttaaataacctccacaaactagaatgtcttggaggggaaagagggaagaaagagaggggggccaggaaggaggagaatttcatatatacacttgtgggatcattaaacttcgcaggaaaaaaataggtttggggttgtactttgtagtaatatacacaat

SEQ ID NO: 497073 - DNA, 129 bp, Homo sapiens
aatccggcttaccttgttccttcctgtgaaatgactccctgggaaaacccttcgcagagataggtgtctagggttatcagtttttacgaaatactttccacatataatattattcccttatgttggcta

SEQ ID NO: 497074 - DNA, 3247 bp, Homo sapiens
tgaatgtaagatggcgcccaggagctgtgaggagaaaaccctgtcggtcttggagcgacgacggcagaaccaggtccctggcggtgcggcggggccggcgggtgcagcggaggcggcggcggcggcggcagtgacgtcgccgggaaccctaaggactctgcaatatgaataattccctagagaacaccatctcctttgaagagtacatccgagtaaaggcacggtctgtcccgcaacacaggatgaaggaatttctggactcactggcctctaaggggccagaagcccttcaggagttccagcagacagccaccactaccatggtgtaccaacagggtgggaactgcatatacacagacagcactgaagtggctgggtctttgcttgaacttgcctgtccagtcaccaccagtgttcagccacaaacccagcaagaacagcagatccaggttcagcagccgcagcaggttcaggtccaggtgcaggtacagcagtctccgcaacaggtctcggctcagctctccccacaactcaccgttcaccagcctactgagcaacccatccaggtccaggtgcagatccaaggccaggcaccacagtcagcagccccctccattcagaccccgtctctgcagagtcccagtccctcgcagctgcaagcagctcagatccaggtgcagcacgtgcaagcagcccagcagatccaggctgcagaaatcccggaggagcacatcccacatcagcaaatccaggctcagctggtggctggccagtctcttgctggtggtcagcagatccaaatccagaccgtgggtgccctttccccaccaccatcccagcagggctcaccccgggaaggggagcggcgggttggcacggccagtgtcctccaaccagtgaagaagcgcaaagtggacatgcccatcactgtgtcctacgccatctcagggcagccggtggccaccgtgctggccattccacagggccagcagcagagttatgtgtctttgaggccagacttactgacagtagacagtgcccacctgtacagtgccactgggaccattactagccctacaggagaaacctggaccatccctgtttattctgcccagccccggggggaccctcagcagcagagcattacccacattgccattccccaggaagcctacaacgcagttcacgtcagtggctcacccacagccctggcagctgttaagctggaggatgacaaggagaagatggtgggcaccacatctgtagtgaaaaactcccatgaagaggtagtgcagacccttgcaaactctctctttccagcacagttcatgaatggcaacatccacattccagtggctgtgcaggctgtggcaggcacgtaccagaatacggctcaaactgtccatatatgggacccccaacagcagccgcagcagcaaactccccaggaacagacaccaccaccacagcagcagcagcagcaactccaagttacttgttcagctcaaactgtccaggttgctgaagttgaaccacagtcacagccacagccttccccagaacttctgcttccaaattctttgaagccagaagaagggcttgaagtatggaaaaactgggcccagaccaagaatgctgaactagagaaggatgctcagaacagattggcacccattgggaggcgccaactgctgcgattccaggaagatctcatctcctctgctgtggcagagttgaattatgggctctgtctaatgacacgggaagctcgaaatggagaaggtgaaccctatgacccagatgtgctctactatattttcctgtgtattcaaaagtatctttttgaaaatggaagggtagatgacattttctccgatctttattatgttcggttcacggagtggctacatgaagttctgaaggatgttcagccccgggtcactccacttggctatgtcttgcccagccacgtgactgaggagatgctatgggagtgcaagcagcttggggctcactccccctccaccttgctgaccaccctcatgttctttaataccaagtacttcctattgaagacagtggaccagcacatgaagctggccttctccaaggtcttgcgacagacaaagaagaacccctctaatcccaaggataaaagcacgagtatccggtacttgaaggcccttggaatacaccagactggccagaaagttacagatgacatgtatgcagaacagacggaaaatccagagaatccattgagatgtcccatcaagctctatgatttctacctcttcaaatgcccccagagtgtgaaaggccggaatgacaccttttacctgacacctgagccagtggtggcccccaacagcccaatctggtactcagtccagcctatcagcagagagcagatgggacaaatgctgacgcggatcctggtgataagagaaattcaggaggccatcgcagtggccaatgcaagcactatgcactgagatgccttggccatggcacaagagaaaccagccaggaaaaaccagacagactttcacactaaagaagaggcctccatttttttttttcttttttttattggtgtagttacgaagcctttcaggctgcttctgtttaaaatataaaagaaaactttgccccctttgcatcttcataaacctgctgcggcagactcctcagccgatggtggctctgggtttccttgagtgtcatatgtcctagaaagttgctggctgactcttttttgtctggggcctggggaaagggcttggactgtgaaaagaaatgtggcccctttccatcttcaagagagatggaattaatgatggatggaccctggagggaatctccccagccgacttccactgggctgacagactttgctgaccacaggggaacgatgttcttttctttcttcatgatcagacataaacttagcatcttaatggaagaaaaatgaggggaacttcaattatgatttattaaagacaatttctattacaccctcctttatgacaagtgacattttagatgtaaaagtaaaaactttaccatgccttttttttttttgttggcctaacattgaggccttaaaacctgaggctcctgtgcctgatggaattcttgtaacatacacttgtgtatcatataaagataccactctgtttctcttatgtattcttactctagttgtttattaagaatgacaagcacgtcttttcaacaaaaaaaa

SEQ ID NO: 497075 - DNA, 3838 bp, Homo sapiens
atgccgctggcgcagctggcggacccgtggcagaagatggctgtggagagcccgtccgacagcgctgagaatggacagcaaattatggatgaacctatgggagaggaggagattaacccacaaactgaagaagtcagtatcaaagaaattgcaatcacacatcatgtaaaggaaggacatgaaaaggcagatccttcccagtttgaacttttaaaagtattagggcagggatcatttggaaaggttttcttagttaaaaaaatctcaggctctgatgctaggcagctttatgccatgaaggtattgaagaaggccacactgaaagttcgagaccgagttcggacaaaaatggaacgtgatatcttggtagaggttaatcatccttttattgtcaagttgcattatgcttttcaaactgaagggaagttgtatcttattttggattttctcaggggaggagatttgtttacacgcttatccaaagaggtgatgttcacagaagaagatgtcaaattctacttggctgaacttgcacttgctttagaccatctacatagcctgggaataatttatagagacttaaaaccagaaaatatacttcttgatgaagaaggtcacatcaagttaacagatttcggcctaagtaaagagtctattgaccatgaaaagaaggcatattctttttgtggaactgtggagtatatggctccagaagtagttaatcgtcgaggtcatactcagagtgctgactggtggtcttttggtgtgttaatgtttgaaatgcttactggtacactccctttccaaggaaaagatcgaaaagaaacaatgactatgattcttaaagccaaacttggaatgccacagtttttgagtcctgaagcgcagagtcttttacgaatgcttttcaagcgaaatcctgcaaacagattaggtgcaggaccagatggagttgaagaaattaaaagacattcatttttctcaacgatagactggaataaactgtatagaagagaaattcatccgccatttaaacctgcaacgggcaggcctgaagatacattctattttgatcctgagtttactgcaaaaactcccaaagattcacctggcattccacctagtgctaatgcacatcagctttttcgggggtttagttttgttgctattacctcagatgatgaaagccaagctatgcagacagttggtgtacattcaattgttcagcagttacacaggaacagtattcagtttactgatggatatgaagtaaaagaagatattggagttggctcctactctgtttgcaagagatgtatacataaagctacaaacatggagtttgcagtgaagattattgataaaagcaagagagacccaacagaagaaattgaaattcttcttcgttatggacagcatccaaacattatcactctaaaggatgtatatgatgatggaaagtatgtgtatgtagtaacagaacttatgaaaggaggtgaattgctggataaaattcttagacaaaaatttttctctgaacgagaggccagtgctgtcctgttcactataactaaaaccgttgaatatcttcacgcacaaggggtggttcatagagacttgaaacctagcaacattctttatgtggatgaatctggtaatccggaatctattcgaatttgtgattttggctttgcaaaacagctgagagcggaaaatggtcttctcatgactccttgttacactgcaaattttgttgcaccagaggttttaaaaagacaaggctatgatgctgcttgtgatatatggagtcttggtgtcctactctatacaatgcttaccggttacactccatttgcaaatggtcctgatgatacaccagaggaaatattggcacgaataggtagcggaaaattctcactcagtggtggttactggaattctgtttcagacacagcaaaggacctggtgtcaaagatgcttcatgtagaccctcatcagagactgactgctgctcttgtgctcagacatccttggatcgtccactgggaccaactgccacaataccaactaaacagacaggatgcaccacatctagtaaagggtgccatggcagctacatattctgctttgaaccgtaatcagtcaccagttttggaaccagtaggccgctctactcttgctcagcggagaggtattaaaaaaatcacctcaacagccctgtgaagtgacctcagtgagatatttggtaccatggtgtaagctgatagcacaagttctggcgacaggtagcacgtatctgagagacacctgcaagcacacactgtcccagctggtacccataatgctgctgttcctgctgctgctcctgctttcctctcttctcgctttaaatgattgttagcaagttagattttcctggagcttcggaagaaatgaaaatggaaacatgatgaagatatagtcactgaatcaatgagaaaaataatgaacatatgaataccacctaaaaatacactgaataaagtacaccatatagcattatttttataggaaatatttcatgtcccttaaatattctttgttagttatagggatggacagtttatgttaagcacttagcttaaacaatccgtttatattagcactgtatcccttgtgccatccaacattttgtatgtttttgtaaacagttcatatacagtacatttctgtactgctttctttaatgtatacatgccttgtttaacttggaatctattattattaatcaattgactattaaatctggttaaatagttcacctggattaacagtattgttggacagtcctaaaaatggccagattgtggaacagctgttgaatgtaatacttccaaaatgtacatatctttccccacgtctgtttcactggttcgttcatttgtttgtttcttaaagtcaggtgctctgtcagactaacctagagagctgttatggtagagaaagttatcatatgtgtgtggcatgaaatcaagaatacacctatgaagttagtccatatactttgcaactccttagagtacttttttccttaattaaggaagtagtccttgcacttctaatcttacatagcatccatacttagaatttggcatatcatctgggattttgccaatatacgtcaaagccctttaagagtcatggtaaggagatgggtgaaggaaaatttagcaacaggtaattgaagtcctattggatatttcatgtttaaatagatattctatattaaacactaatttaaatgtaataaaggccaaaggcctctgtatgaaattggatttaaactttcttattttagggaataaaacattattgatcaaacagtatctgttctaacctaaaattataggtagggcaggctaagtgaacagcattgagtattttctgaatccctcatgataatttatagccacatactgcttcctttgacttcaggaatgatcagttttcataatggccactgggcctgcttagattgcagtattcattatctgcatctaatttggtagtttccacaatcgtatttgatgaaagaaacttcagtccccattattacctgtgtctttgccaagctgcctagcatacatcagtatgtaatgtaaaagacatatgagcaagaaaaaagtgatttaacttacctcatcaagaatgtgcccctacaggccgggcgcagtggctcacgcctgtaatcccagcatttttggaggccgagcagttgattaacttaaggcaagaatttgagaccaccctggcaacatggtgcccggctttatatacagagagtccttggacctggggg

SEQ ID NO: 497076 - DNA, 200 bp, Homo sapiens
tgcttcttggcggtcagcgcgggccggagctcctcagcctcggaacacagctcggtttctgcctggagctgctcctgcggctgtagtttctctgccatgacgctgacgactgcagcgtctccgctctccggtgagcctgttctcgcgcagccagcgtgcttctctgctgacgcttcaccatgctcctccttccttgggag

SEQ ID NO: 497077 - DNA, 3202 bp, Homo sapiens
tgaatgtaagatggcgcccaggagctgtgaggagaaaaccctgtcggtcttggagcgacgacggcagaaccaggtccctggcggtgcggcggggccggcgggtgcagcggaggcggcggcggcggcggcagtgacgtcgccgggaaccctaaggactctgcaatatgaataattccctagagaacaccatctcctttgaagagtacatccgagtaaaggcacggtctgtcccgcaacacaggatgaaggaatttctggactcactggcctctaaggggccagaagcccttcaggagttccagcagacagccaccactaccatggtgtaccaacagggtgggaactgcatatacacagacagcactgaagtggctgggtctttgcttgaacttgcctgtccagtcaccaccagtgttcagccacaaacccagcaagaacagcagatccaggttcagcagccgcagcaggttcaggtccaggtgcaggtacagcagtctccgcaacaggtctcggctcagctctccccacaactcaccgttcaccagcctactgagcaacccatccaggtccaggtgcagatccaaggccaggcaccacagtcagcagccccctccattcagaccccgtctctgcagagtcccagtccctcgcagctgcaagcagctcagatccaggtgcagcacgtgcaagcagcccagcagatccaggctgcagaaatcccggaggagcacatcccacatcagcaaatccaggctcagctggtggctggccagtctcttgctggtggtcagcagatccaaatccagaccgtgggtgccctttccccaccaccatcccagcagggctcaccccgggaaggggagcggcgggttggcacggccagtgtcctccaaccagtgaagaagcgcaaagtggacatgcccatcactgtgtcctacgccatctcagggcagccggtggccaccgtgctggccattccacagggccagcagcagagttatgtgtctttgaggccagacttactgacagtagacagtgcccacctgtacagtgccactgggaccattactagccctacaggagaaacctggaccatccctgtttattctgcccagccccggggggaccctcagcagcagagcattacccacattgccattccccaggaagcctacaacgcagttcacgtcagtggctcacccacagccctggcagctgttaagctggaggatgacaaggagaagatggtgggcaccacatctgtagtgaaaaactcccatgaagaggtagtgcagacccttgcaaactctctctttccagcacagttcatgaatggcaacatccacattccagtggctgtgcaggctgtggcaggcacgtaccagaatacggctcaaactgtccatatatgggacccccaacagcagcagcagcagcaactccaagttacttgttcagctcaaactgtccaggttgctgaagttgaaccacagtcacagccacagccttccccagaacttctgcttccaaattctttgaagccagaagaagggcttgaagtatggaaaaactgggcccagaccaagaatgctgaactagagaaggatgctcagaacagattggcacccattgggaggcgccaactgctgcgattccaggaagatctcatctcctctgctgtggcagagttgaattatgggctctgtctaatgacacgggaagctcgaaatggagaaggtgaaccctatgacccagatgtgctctactatattttcctgtgtattcaaaagtatctttttgaaaatggaagggtagatgacattttctccgatctttattatgttcggttcacggagtggctacatgaagttctgaaggatgttcagccccgggtcactccacttggctatgtcttgcccagccacgtgactgaggagatgctatgggagtgcaagcagcttggggctcactccccctccaccttgctgaccaccctcatgttctttaataccaagtacttcctattgaagacagtggaccagcacatgaagctggccttctccaaggtcttgcgacagacaaagaagaacccctctaatcccaaggataaaagcacgagtatccggtacttgaaggcccttggaatacaccagactggccagaaagttacagatgacatgtatgcagaacagacggaaaatccagagaatccattgagatgtcccatcaagctctatgatttctacctcttcaaatgcccccagagtgtgaaaggccggaatgacaccttttacctgacacctgagccagtggtggcccccaacagcccaatctggtactcagtccagcctatcagcagagagcagatgggacaaatgctgacgcggatcctggtgataagagaaattcaggaggccatcgcagtggccaatgcaagcactatgcactgagatgccttggccatggcacaagagaaaccagccaggaaaaaccagacagactttcacactaaagaagaggcctccatttttttttttcttttttttattggtgtagttacgaagcctttcaggctgcttctgtttaaaatataaaagaaaactttgccccctttgcatcttcataaacctgctgcggcagactcctcagccgatggtggctctgggtttccttgagtgtcatatgtcctagaaagttgctggctgactcttttttgtctggggcctggggaaagggcttggactgtgaaaagaaatgtggcccctttccatcttcaagagagatggaattaatgatggatggaccctggagggaatctccccagccgacttccactgggctgacagactttgctgaccacaggggaacgatgttcttttctttcttcatgatcagacataaacttagcatcttaatggaagaaaaatgaggggaacttcaattatgatttattaaagacaatttctattacaccctcctttatgacaagtgacattttagatgtaaaagtaaaaactttaccatgccttttttttttttgttggcctaacattgaggccttaaaacctgaggctcctgtgcctgatggaattcttgtaacatacacttgtgtatcatataaagataccactctgtttctcttatgtattcttactctagttgtttattaagaatgacaagcacgtcttttcaacaaaaaaaa

SEQ ID NO: 497078 - DNA, 3852 bp, Homo sapiens
atgccgctggcgcagctggcggacccgtggcagaagatggctgtggagagcccgtccgacagcgctgagaatggacagcaaattatggatgaacctatgggagaggaggagattaacccacaaactgaagaagtcagtatcaaagaaattgcaatcacacatcatgtaaaggaaggacatgaaaaggcagatccttcccagtttgaacttttaaaagtattagggcagggatcatttggaaaggttttcttagttaaaaaaatctcaggctctgatgctaggcagctttatgccatgaaggtattgaagaaggccacactgaaagttcgagaccgagttcggacaaaaatggaacgtgatatcttggtagaggttaatcatccttttattgtcaagttgcattatgcttttcaaactgaagggaagttgtatcttattttggattttctcaggggaggagatttgtttacacgcttatccaaagaggtgatgttcacagaagaagatgtcaaattctacttggctgaacttgcacttgctttagaccatctacatagcctgggaataatttatagagacttaaaaccagaaaatatacttcttgatgaagaaggtcacatcaagttaacagatttcggcctaagtaaagagtctattgaccatgaaaagaaggcatattctttttgtggaactgtggagtatatggctccagaagtagttaatcgtcgaggtcatactcagagtgctgactggtggtcttttggtgtgttaatgtttgaaatgcttactggtacactccctttccaaggaaaagatcgaaaagaaacaatgactatgattcttaaagccaaacttggaatgccacagtttttgagtcctgaagcgcagagtcttttacgaatgcttttcaagcgaaatcctgcaaacagattaggtgcaggaccagatggagttgaagaaattaaaagacattcatttttctcaacgatagactggaataaactgtatagaagagaaattcatccgccatttaaacctgcaacgggcaggcctgaagatacattctattttgatcctgagtttactgcaaaaactcccaaagattcacctggcattccacctagtgctaatgcacatcagctttttcgggggtttagttttgttgctattacctcagatgatgaaagccaagctatgcagacagttggtgtacattcaattgttcagcagttacacaggaacagtattcagtttactgatggatatgaagtaaaagaagatattggagttggctcctactctgtttgcaagagatgtatacataaagctacaaacatggagtttgcagtgaagattattgataaaagcaagagagacccaacagaagaaattgaaattcttcttcgttatggacagcatccaaacattatcactctaaaggatgtatatgatgatggaaagtatgtgtatgtagtaacagaacttatgaaaggaggtgaattgctggataaaattcttagacaaaaatttttctctgaacgagaggccagtgctgtcctgttcactataactaaaaccgttgaatatcttcacgcacaaggggtggttcatagagacttgaaacctagcaacattctttatgtggatgaatctggtaatccggaatctattcgaatttgtgattttggctttgcaaaacagctgagagcggaaaatggtcttctcatgactccttgttacactgcaaattttgttgcaccagaggttttaaaaagacaaggctatgatgctgcttgtgatatatggagtcttggtgtcctactctatacaatgcttaccggttacactccatttgcaaatggtcctgatgatacaccagaggaaatattggcacgaataggtagcggaaaattctcactcagtggtggttactggaattctgtttcagacacagcaaaggacctggtgtcaaagatgcttcatgtagaccctcatcagagactgactgctgctcttgtgctcagacatccttggatcgtccactgggaccaactgccacaataccaactaaacagacaggatgcaccacatctagtaaagggtgccatggcagctacatattctgctttgaaccgtaatcagtcaccagttttggaaccagtaggccgctctactcttgctcagcggagaggtattaaaaaaatcacctcaacagccctgtgaagtgacctcagtgagatatttggtaccatggtgtaagctgatagcacaagttctggcgacaggtagcacgtatctgagagacacctgcaagcacacactgtcccagctggtacccataatgctgctgttcctgctgctgctcctgctttcctctcttctcgctttaaatgattgttagcaagttagattttcctggagcttcggaagaaatgaaaatggaaacatgatgaagatatagtcactgaatcaatgagaaaaataatgaacatatgaataccacctaaaaatacactgaataaagtacaccatatagcattatttttataggaaatatttcatgtcccttaaatattctttgttagttatagggatggacagtttatgttaagcacttagcttaaacaatccgtttatattagcactgtatcccttgtgccatccaacattttgtatgtttttgtaaacagttcatatacagtacatttctgtactgctttctttaatgtatacatgccttgtttaacttggaatctattattattaatcaattgactattaaatctggttaaatagttcacctggattaacagtattgttggacagtcctaaaaatggccagattgtggaacagctgttgaatgtaatacttccaaaatgtacatatctttccccacgtctgtttcactggttcgttcatttgtttgtttcttaaagtcaggtgctctgtcagactaacctagagagctgttatggtagagaaagttatcatatgtgtgtggcatgaaatcaagaatacacctatgaagttagtccatatactttgcaactccttagagtacttttttccttaattaaggaagtagtccttgcacttctaatcttacatagcatccatacttagaatttggcatatcatctgggattttgccaatatacgtcaaagccctttaagagtcatggtaaggagatgggtgaaggaaaatttagcaacaggtaattgaagtcctattggatatttcatgtttaaatagatattctatattaaacactaatttaaatgtaataaaggccaaaggcctctgtatgaaattggatttaaactttcttattttagggaataaaacattattgatcaaacagtatctgttctaacctaaaattataggtagggcaggctaagtgaacagcattgagtattttctgaatccctcatgataatttatagccacatactgcttcctttgacttcaggaatgatcagttttcataatggccactgggcctgcttagattgcagtattcattatctgcatctaatttggtagtttccacaatcgtatttgatgaaagaaacttcagtccccattattacctgtgtctttgccaagctgcctagcatacatcagtatgtaatgtaaaagacatatgagcaagaaaaaagtgatttaacttacctcatcaagaatgtgcccctacaggccgggcgcagtggctcacgcctgtaatcccagcctcaggaggctgaggcaggagaatcgcttgaacctgggaggtggtggttgcagtgagccaagatcacaccattgcactccagcctgggtgacagagtgagactctgtctcaagaagg

SEQ ID NO: 497079 - DNA, 1016 bp, Homo sapiens
tcacatgtccatttgaaccacccaaaccaaaaacaaagtgctaagctggatgtgacctctgtcgaagattataaagcccttcagaaatacgaaaaggagaaatttgaacgagatgattcaacaaattaaagagactggtgctaacctagcaatttgtcagtggggctttgatgatgaagcaaatcacttacttcttcagaacaacttgcctgcggttcgctgggtacgcgaggacctgaaccttgagctgattgccatcgcaacaggagggcggactcgtccccaggttctcagagctcacagcccgagaagctgggcttagctggtctcgtacaggcagcatctcatttgggacaactaaggatacaatgctggtcatcgagcagctgtacagaactccagagctgtaaccactccttattagaggacgcgacctccgcactgactcattgacgacggcgacacgatcccttcacgatgctttgtgtgtcatccggaacctcatccgcgataatcgtgtaggtgtatggaggaggggctagcctgacgatatcctgatagcccatgtcagttagccaagaggcggaataagttgccccaacttagaacagtaatagccatgagagcgtatgccgccgcacctgcaggtcatccccaaggcctctctgaagaacagtcggccatcaagtccccatccaagaattatgaccgaaatccgaaaccagacaggtcacggacgataacagctgatctagaaatcgactagtagcacacgggccaccgcactgaacccccccctgtccacaaacttgatcgcaatccaccgcaattccagcacccaacacgatttcaaccacctcacacttcctcaacccctacccccaccacctccacccacaacacatccacattcacaacccacccacaaaacaaacatagaccacaccacccactccaaactaccacaacctcacaaccacccaccacaccaccgtacacgaaccaaaccacccacc

SEQ ID NO: 497080 - DNA, 144 bp, Homo sapiens
gactggcatgttcgtgcacttatagatcatcttcttgtcagcctgggttaggagcacatggcaactgaagagttcatcatcctgcatccccccactaccactcatatcatgtgctaggaccagaacagcaactgtgtccctgtg

SEQ ID NO: 497081 - DNA, 3249 bp, Homo sapiens
tgaatgtaagatggcgcccaggagctgtgaggagaaaaccctgtcggtcttggagcgacgacggcagaaccaggtccctggcggtgcggcggggccggcgggtgcagcggaggcggcggcggcggcggcagtgacgtcgccgggaaccctaaggactctgcaatatgaataattccctagagaacaccatctcctttgaagagtacatccgagtaaaggcacggtctgtcccgcaacacaggatgaaggaatttctggactcactggcctctaaggggccagaagcccttcaggagttccagcagacagccaccactaccatggtgtaccaacagggtgggaactgcatatacacagacagcactgaagtggctgggtctttgcttgaacttgcctgtccagtcaccaccagtgttcagccacaaacccagcaagaacagcagatccaggttcagcagccgcagcaggttcaggtccaggtgcaggtacagcagtctccgcaacaggtctcggctcagctctccccacaactcaccgttcaccagcctactgagcaacccatccaggtccaggtgcagatccaaggccaggcaccacagtcagcagccccctccattcagaccccgtctctgcagagtcccagtccctcgcagctgcaagcagctcagatccaggtgcagcacgtgcaagcagcccagcagatccaggctgcagaaatcccggaggagcacatcccacatcagcaaatccaggctcagctggtggctggccagtctcttgctggtggtcagcagatccaaatccagaccgtgggtgccctttccccaccaccatcccagcagggctcaccccgggaaggggagcggcgggttggcacggccagtgtcctccaaccagtgaagaagcgcaaagtggacatgcccatcactgtgtcctacgccatctcagggcagccggtggccaccgtgctggccattccacagggccagcagcagagttatgtgtctttgaggccagacttactgacagtagacagtgcccacctgtacagtgccactgggaccattactagccctacaggagaaacctggaccatccctgtttattctgcccagccccggggggaccctcagcagcagagcattacccacattgccattccccaggaagcctacaacgcagttcacgtcagtggctcacccacagccctggcagctgttaagctggaggatgacaaggagaagatggtgggcaccacatctgtagtgaaaaactcccatgaagaggtagtgcagacccttgcaaactctctctttccagcacagttcatgaatggcaacatccacattccagtggctgtgcaggctgtggcaggcacgtaccagaatacggctcaaactgtccatatatgggacccccaacagcagccgcagcagcaaactccccaggaacagacaccaccaccacagcagcagcagcagcaactccaagttacttgttcagctcaaactgtccaggttgctgaagttgaaccacagtcacagccacagccttccccagaacttctgcttccaaattctttgaagccagaagaagggcttgaagtatggaaaaactgggcccagaccaagaatgctgaactagagaaggatgctcagaacagattggcacccattgggaggcgccaactgctgcgattccaggaagatctcatctcctctgctgtggcagagttgaattatgggctctgtctaatgacacgggaagctcgaaatggagaaggtgaaccctatgacccagatgtgctctactatattttcctgtgtattcaaaagtatctttttgaaaatggaagggtagatgacattttctccgatctttattatgttcggttcacggagtggctacatgaagttctgaaggatgttcagccccgggtcactccacttggctatgtcttgcccagccacgtgactgaggagatgctatgggagtgcaagcagcttggggctcactccccctccaccttgctgaccaccctcatgttctttaataccaagtacttcctattgaagacagtggaccagcacatgaagctggccttctccaaggtcttgcgacagacaaagaagaacccctctaatcccaaggataaaagcacgagtatccggtacttgaaggcccttggaatacaccagactggccagaaagttacagatgacatgtatgcagaacagacggaaaatccagagaatccattgagatgtcccatcaagctctatgatttctacctcttcaaatgcccccagagtgtgaaaggccggaatgacaccttttacctgacacctgagccagtggtggcccccaacagcccaatctggtactcagtccagcctatcagcagagagcagatgggacaaatgctgacgcggatcctggtgataagagaaattcaggaggccatcgcagtggccaatgcaagcactatgcactgagatgccttggccatggcacaagagaaaccagccaggaaaaaccagacagactttcacactaaagaagaggcctccatttttttttttcttttttttattggtgtagttacgaagcctttcaggctgcttctgtttaaaatataaaagaaaactttgccccctttgcatcttcataaacctgctgcggcagactcctcagccgatggtggctctgggtttccttgagtgtcatatgtcctagaaagttgctggctgactcttttttgtctggggcctggggaaagggcttggactgtgaaaagaaatgtggcccctttccatcttcaagagagatggaattaatgatggatggaccctggagggaatctccccagccgacttccactgggctgacagactttgctgaccacaggggaacgatgttcttttctttcttcatgatcagacataaacttagcatcttaatggaagaaaaatgaggggaacttcaattatgatttattaaagacaatttctattacaccctcctttatgacaagtgacattttagatgtaaaagtaaaaactttaccatgcctttttttttggtggcaaatgggctaaacctgagccggccggagggatttgtgaaacgggtttataaagaacacgggtagtgttttcacacaggttaaaaaagagtttaaacaagggggcaaatcacggcgaggacatttaggaaataataaaaagggaaaggaaagtggtggtgaaa

SEQ ID NO: 497082 - DNA, 3936 bp, Homo sapiens
atgccgctggcgcagctggcggacccgtggcagaagatggctgtggagagcccgtccgacagcgctgagaatggacagcaaattatggatgaacctatgggagaggaggagattaacccacaaactgaagaagtcagtatcaaagaaattgcaatcacacatcatgtaaaggaaggacatgaaaaggcagatccttcccagtttgaacttttaaaagtattagggcagggatcatttggaaaggttttcttagttaaaaaaatctcaggctctgatgctaggcagctttatgccatgaaggtattgaagaaggccacactgaaagttcgagaccgagttcggacaaaaatggaacgtgatatcttggtagaggttaatcatccttttattgtcaagttgcattatgcttttcaaactgaagggaagttgtatcttattttggattttctcaggggaggagatttgtttacacgcttatccaaagaggtgatgttcacagaagaagatgtcaaattctacttggctgaacttgcacttgctttagaccatctacatagcctgggaataatttatagagacttaaaaccagaaaatatacttcttgatgaagaaggtcacatcaagttaacagatttcggcctaagtaaagagtctattgaccatgaaaagaaggcatattctttttgtggaactgtggagtatatggctccagaagtagttaatcgtcgaggtcatactcagagtgctgactggtggtcttttggtgtgttaatgtttgaaatgcttactggtacactccctttccaaggaaaagatcgaaaagaaacaatgactatgattcttaaagccaaacttggaatgccacagtttttgagtcctgaagcgcagagtcttttacgaatgcttttcaagcgaaatcctgcaaacagattaggtgcaggaccagatggagttgaagaaattaaaagacattcatttttctcaacgatagactggaataaactgtatagaagagaaattcatccgccatttaaacctgcaacgggcaggcctgaagatacattctattttgatcctgagtttactgcaaaaactcccaaagattcacctggcattccacctagtgctaatgcacatcagctttttcgggggtttagttttgttgctattacctcagatgatgaaagccaagctatgcagacagttggtgtacattcaattgttcagcagttacacaggaacagtattcagtttactgatggatatgaagtaaaagaagatattggagttggctcctactctgtttgcaagagatgtatacataaagctacaaacatggagtttgcagtgaagattattgataaaagcaagagagacccaacagaagaaattgaaattcttcttcgttatggacagcatccaaacattatcactctaaaggatgtatatgatgatggaaagtatgtgtatgtagtaacagaacttatgaaaggaggtgaattgctggataaaattcttagacaaaaatttttctctgaacgagaggccagtgctgtcctgttcactataactaaaaccgttgaatatcttcacgcacaaggggtggttcatagagacttgaaacctagcaacattctttatgtggatgaatctggtaatccggaatctattcgaatttgtgattttggctttgcaaaacagctgagagcggaaaatggtcttctcatgactccttgttacactgcaaattttgttgcaccagaggttttaaaaagacaaggctatgatgctgcttgtgatatatggagtcttggtgtcctactctatacaatgcttaccggttacactccatttgcaaatggtcctgatgatacaccagaggaaatattggcacgaataggtagcggaaaattctcactcagtggtggttactggaattctgtttcagacacagcaaaggacctggtgtcaaagatgcttcatgtagaccctcatcagagactgactgctgctcttgtgctcagacatccttggatcgtccactgggaccaactgccacaataccaactaaacagacaggatgcaccacatctagtaaagggtgccatggcagctacatattctgctttgaaccgtaatcagtcaccagttttggaaccagtaggccgctctactcttgctcagcggagaggtattaaaaaaatcacctcaacagccctgtgaagtgacctcagtgagatatttggtaccatggtgtaagctgatagcacaagttctggcgacaggtagcacgtatctgagagacacctgcaagcacacactgtcccagctggtacccataatgctgctgttcctgctgctgctcctgctttcctctcttctcgctttaaatgattgttagcaagttagattttcctggagcttcggaagaaatgaaaatggaaacatgatgaagatatagtcactgaatcaatgagaaaaataatgaacatatgaataccacctaaaaatacactgaataaagtacaccatatagcattatttttataggaaatatttcatgtcccttaaatattctttgttagttatagggatggacagtttatgttaagcacttagcttaaacaatccgtttatattagcactgtatcccttgtgccatccaacattttgtatgtttttgtaaacagttcatatacagtacatttctgtactgctttctttaatgtatacatgccttgtttaacttggaatctattattattaatcaattgactattaaatctggttaaatagttcacctggattaacagtattgttggacagtcctaaaaatggccagattgtggaacagctgttgaatgtaatacttccaaaatgtacatatctttccccacgtctgtttcactggttcgttcatttgtttgtttcttaaagtcaggtgctctgtcagactaacctagagagctgttatggtagagaaagttatcatatgtgtgtggcatgaaatcaagaatacacctatgaagttagtccatatactttgcaactccttagagtacttttttccttaattaaggaagtagtccttgcacttctaatcttacatagcatccatacttagaatttggcatatcatctgggattttgccaatatacgtcaaagccctttaagagtcatggtaaggagatgggtgaaggaaaatttagcaacaggtaattgaagtcctattggatatttcatgtttaaatagatattctatattaaacactaatttaaatgtaataaaggccaaaggcctctgtatgaaattggatttaaactttcttattttagggaataaaacattattgatcaaacagtatctgttctaaccttcatgataatttatagccacatactgcttcctttgacttcaggaatgatcagttttcataatggccactgggcctgcttagattgcagtattcattatctgcatctaatttggtagtttccacaatcgtatttgatgaaagaaacttcagtccccattattacctgtgtctttgccaagctgcctagcatacatcagtatgtaatgtaaaagacatatgagcaagaaaaaagtgatttaacttacctcatcaagaatgtgcccctacaggccgggcgcagtggctcacgcctgtaatcccagcattttgggaggccgaggcaggtggatcacctgaggtcaggagtttgagaccagcctggccaacatggtgaaaccccgtctctactaaaaaatacaaaaattagctgggcatggtggcgtgcacctgtaatcctagctactcaggaggctgaggcaggagaatcgcttgaacctgggaggtggtggttgcagtgagccaagatcacaccattgcactccagcctgggtgacagagtgagactctgtctcaagaagg

SEQ ID NO: 497083 - DNA, 1039 bp, Homo sapiens
catggtggcaggcgcctgtaatcgcagccacccgggaggctgaggcaggagaatcatttgaacctgggaggcagaggttgcagtgagccaagaccgcgccacatgcactccagtctgggtaacagagcgagtctccatttcaaaaaatatatataaaaataaagtgaagccgggcacggtggctcacacctgtaatcccagcactttgagaggttgatgtgggtggatcatctgaggtcaggagttcaagaccagcctggcaacatggtgaaactccatctttactaacaaatcatacaaattagctgggtgtggatggtgggcacctgtagtcccagctactcaggaagctgaggcaggagaatcacctgaacccgggagccagaggttgcagtgagccctgcatcagtgccatgtgcactccagcctgggcaacagagcgagactcagtctcaaaaaaaacaaagcaacaaacaaacaagaacaacaaaaccgaaaagtccaggtccagtgggctcatgcctgtaatctcagcacttgggaggccagacaggcggatcatctgagggtcagagagtcgagaacagacctggacaacaaggtgaacactcaatctttactcataactacaacaaatcagccaggtgtggtgataggacacctgtaaatcgtcagagaatcagggacgccctgaagaccatgaagacatcacgtggagcccaaggtcggaacgacggctgccggcaaagcagacgatacggcccaatggaccaccaggcgcgggatgacaaaagaagtgaaaacctcccgtctcacacacaagaagaccacgaacggagccagaagacatcggcaggccggcgaacagcgcccgcgacgaagaaagcagggccacgacgacatccccaccgccatatcgataagcacacaccagtgcacaggataacaacggcgaccccccacggcccagcaccgccggacaaagacctacagcgacaaccactagcaatgtacaccaacacgtacagcagacaggacg

SEQ ID NO: 497084 - DNA, 1182 bp, Homo sapiens
cctagtcagctgtcatgcctcataccttccctcccccgacctgtataacctagttgggctggctgaaagcctaagtatcctgatctgggcctgaggtaaggcagtctgatgccaggtctgtggtggtggggatgtgtgttttatagttacagatgacatgtatgcagaacagacggaaaatccagagaatccattgagatgtcccatcaagctctatgatttctacctcttcaaatgcccccagagtgtgaaaggccggaatgacaccttttacctgacacctgagccagtggtggcccccaacagcccaatctggtactcagtccagcctatcagcagagagcagatgggacaaatgctgacgcggatcctggtgataagagaaattcaggaggccatcgcagtggccaatgcaagcactatgcactgagatgccttggccatggcacaagagaaaccagccaggaaaaaccagacagactttcacactaaagaagaggcctccatttttttttttcttttttttattggtgtagttacgaagcctttcaggctgcttctgtttaaaatataaaagaaaactttgccccctttgcatcttcataaacctgctgcggcagactcctcagccgatggtggctctgggtttccttgagtgtcatatgtcctagaaagttgctggctgactcttttttgtctggggcctggggaaagggcttggactgtgaaaagaaatgtggcccctttccatcttcaagagagatggaattaatgatggatggaccctggagggaatctccccagccgacttccactgggctgacagactttgctgaccacaggggaacgatgttcttttctttcttcatgatcagacataaacttagcatcttaatggaagaaaaatgaggggaacttcaattatgatttattaaagacaatttctattacaccctcctttatgacaagtgacattttagatgtaaaagtaaaaactttaccatgccttttttttttttgttggcctaacattgaggccttaaaacctgaggctcctgtgcctgatggaattcttgtaacatacacttgtgtatcatataaagataccactctgtttctcttatgtattcttactctagttgtttattaagaatgacaagcacgtcttttcaacaaaaaaaa

SEQ ID NO: 497085 - DNA, 2800 bp, Homo sapiens
atgccgctggcgcagctggcggacccgtggcagaagatggctgtggagagcccgtccgacagcgctgagaatggacagcaaattatggatgaacctatgggagaggaggagattaacccacaaactgaagaagtcagtatcaaagaaattgcaatcacacatcatgtaaaggaaggacatgaaaaggcagatccttcccagtttgaacttttaaaagtattagggcagggatcatttggaaaggttttcttagttaaaaaaatctcaggctctgatgctaggcagctttatgccatgaaggtattgaagaaggccacactgaaagttcgagaccgagttcggacaaaaatggaacgtgatatcttggtagaggttaatcatccttttattgtcaagttgcattatgcttttcaaactgaagggaagttgtatcttattttggattttctcaggggaggagatttgtttacacgcttatccaaagaggtgatgttcacagaagaagatgtcaaattctacttggctgaacttgcacttgctttagaccatctacatagcctgggaataatttatagagacttaaaaccagaaaatatacttcttgatgaagaaggtcacatcaagttaacagatttcggcctaagtaaagagtctattgaccatgaaaagaaggcatattctttttgtggaactgtggagtatatggctccagaagtagttaatcgtcgaggtcatactcagagtgctgactggtggtcttttggtgtgttaatgtttgaaatgcttactggtacactccctttccaaggaaaagatcgaaaagaaacaatgactatgattcttaaagccaaacttggaatgccacagtttttgagtcctgaagcgcagagtcttttacgaatgcttttcaagcgaaatcctgcaaacagattaggtgcaggaccagatggagttgaagaaattaaaagacattcatttttctcaacgatagactggaataaactgtatagaagagaaattcatccgccatttaaacctgcaacgggcaggcctgaagatacattctattttgatcctgagtttactgcaaaaactcccaaagattcacctggcattccacctagtgctaatgcacatcagctttttcgggggtttagttttgttgctattacctcagatgatgaaagccaagctatgcagacagttggtgtacattcaattgttcagcagttacacaggaacagtattcagtttactgatggatatgaagtaaaagaagatattggagttggctcctactctgtttgcaagagatgtatacataaagctacaaacatggagtttgcagtgaagattattgataaaagcaagagagacccaacagaagaaattgaaattcttcttcgttatggacagcatccaaacattatcactctaaaggatgtatatgatgatggaaagtatgtgtatgtagtaacagaacttatgaaaggaggtgaattgctggataaaattcttagacaaaaatttttctctgaacgagaggccagtgctgtcctgttcactataactaaaaccgttgaatatcttcacgcacaaggggtggttcatagagacttgaaacctagcaacattctttatgtggatgaatctggtaatccggaatctattcgaatttgtgattttggctttgcaaaacagctgagagcggaaaatggtcttctcatgactccttgttacactgcaaattttgttgcaccagaggttttaaaaagacaaggctatgatgctgcttgtgatatatggagtcttggtgtcctactctatacaatgcttaccggttacactccatttgcaaatggtcctgatgatacaccagaggaaatattggcacgaataggtagcggaaaattctcactcagtggtggttactggaattctgtttcagacacagcaaaggacctggtgtcaaagatgcttcatgtagaccctcatcagagactgactgctgctcttgtgctcagacatccttggatcgtccactgggaccaactgccacaataccaactaaacagacaggatgcaccacatctagtaaagggtgccatggcagctacatattctgctttgaaccgtaatcagtcaccagttttggaaccagtaggccgctctactcttgctcagcggagaggtattaaaaaaatcacctcaacagccctgtgaagtgacctcagtgagatatttggtaccatggtgtaagctgatagcacaagttctggcgacaggtagcacgtatctgagagacacctgcaagcacacactgtcccagctggtacccataatgctgctgttcctgctgctgctcctgctttcctctcttctcgctttaaatgattgttagcaagttagattttcctggagcttcggaagaaatgaaaatggaaacatgatgaagatatagtcactgaatcaatgagaaaaataatgaacatatgaataccacctaaaaatacactgaataaagtacaccatatagcattatttttataggaaatatttcatgtcccttaaatattctttgttagttatagggatggacagtttatgttaagcacttagcttaaacaatccgtttatattagcactgtatcccttgtgccatccaacattttgtatgtttttgtaaacagttcatatacagtacatttctgtactgctttctttaatgtatacatgccttgtttaacttggaatctattattattaatcaattgactattaaatctggttaaatagttca

SEQ ID NO: 497086 - DNA, 3939 bp, Homo sapiens
cagaaattcttttatcaccatcatggtttcgtagccatgtttaaatttttgtcttttcgtgttcgctctatacaggaagaagtcagtatcaaagaaattgcaatcacacatcatgtaaaggaaggacatgaaaaggcagatccttcccagtttgaacttttaaaagtattagggcagggatcatttggaaaggttttcttagttaaaaaaatctcaggctctgatgctaggcagctttatgccatgaaggtattgaagaaggccacactgaaagttcgagaccgagttcggacaaaaatggaacgtgatatcttggtagaggttaatcatccttttattgtcaagttgcattatgcttttcaaactgaagggaagttgtatcttattttggattttctcaggggaggagatttgtttacacgcttatccaaagaggtgatgttcacagaagaagatgtcaaattctacttggctgaacttgcacttgctttagaccatctacatagcctgggaataatttatagagacttaaaaccagaaaatatacttcttgatgaagaaggtcacatcaagttaacagatttcggcctaagtaaagagtctattgaccatgaaaagaaggcatattctttttgtggaactgtggagtatatggctccagaagtagttaatcgtcgaggtcatactcagagtgctgactggtggtcttttggtgtgttaatgtttgaaatgcttactggtacactccctttccaaggaaaagatcgaaaagaaacaatgactatgattcttaaagccaaacttggaatgccacagtttttgagtcctgaagcgcagagtcttttacgaatgcttttcaagcgaaatcctgcaaacagattaggtgcaggaccagatggagttgaagaaattaaaagacattcatttttctcaacgatagactggaataaactgtatagaagagaaattcatccgccatttaaacctgcaacgggcaggcctgaagatacattctattttgatcctgagtttactgcaaaaactcccaaagattcacctggcattccacctagtgctaatgcacatcagctttttcgggggtttagttttgttgctattacctcagatgatgaaagccaagctatgcagacagttggtgtacattcaattgttcagcagttacacaggaacagtattcagtttactgatggatatgaagtaaaagaagatattggagttggctcctactctgtttgcaagagatgtatacataaagctacaaacatggagtttgcagtgaagattattgataaaagcaagagagacccaacagaagaaattgaaattcttcttcgttatggacagcatccaaacattatcactctaaaggatgtatatgatgatggaaagtatgtgtatgtagtaacagaacttatgaaaggaggtgaattgctggataaaattcttagacaaaaatttttctctgaacgagaggccagtgctgtcctgttcactataactaaaaccgttgaatatcttcacgcacaaggggtggttcatagagacttgaaacctagcaacattctttatgtggatgaatctggtaatccggaatctattcgaatttgtgattttggctttgcaaaacagctgagagcggaaaatggtcttctcatgactccttgttacactgcaaattttgttgcaccagaggttttaaaaagacaaggctatgatgctgcttgtgatatatggagtcttggtgtcctactctatacaatgcttaccggttacactccatttgcaaatggtcctgatgatacaccagaggaaatattggcacgaataggtagcggaaaattctcactcagtggtggttactggaattctgtttcagacacagcaaaggacctggtgtcaaagatgcttcatgtagaccctcatcagagactgactgctgctcttgtgctcagacatccttggatcgtccactgggaccaactgccacaataccaactaaacagacaggatgcaccacatctagtaaagggtgccatggcagctacatattctgctttgaaccgtaatcagtcaccagttttggaaccagtaggccgctctactcttgctcagcggagaggtattaaaaaaatcacctcaacagccctgtgaagtgacctcagtgagatatttggtaccatggtgtaagctgatagcacaagttctggcgacaggtagcacgtatctgagagacacctgcaagcacacactgtcccagctggtacccataatgctgctgttcctgctgctgctcctgctttcctctcttctcgctttaaatgattgttagcaagttagattttcctggagcttcggaagaaatgaaaatggaaacatgatgaagatatagtcactgaatcaatgagaaaaataatgaacatatgaataccacctaaaaatacactgaataaagtacaccatatagcattatttttataggaaatatttcatgtcccttaaatattctttgttagttatagggatggacagtttatgttaagcacttagcttaaacaatccgtttatattagcactgtatcccttgtgccatccaacattttgtatgtttttgtaaacagttcatatacagtacatttctgtactgctttctttaatgtatacatgccttgtttaacttggaatctattattattaatcaattgactattaaatctggttaaatagttcacctggattaacagtattgttggacagtcctaaaaatggccagattgtggaacagctgttgaatgtaatacttccaaaatgtacatatctttccccacgtctgtttcactggttcgttcatttgtttgtttcttaaagtcaggtgctctgtcagactaacctagagagctgttatggtagagaaagttatcatatgtgtgtggcatgaaatcaagaatacacctatgaagttagtccatatactttgcaactccttagagtacttttttccttaattaaggaagtagtccttgcacttctaatcttacatagcatccatacttagaatttggcatatcatctgggattttgccaatatacgtcaaagccctttaagagtcatggtaaggagatgggtgaaggaaaatttagcaacaggtaattgaagtcctattggatatttcatgtttaaatagatattctatattaaacactaatttaaatgtaataaaggccaaaggcctctgtatgaaattggatttaaactttcttattttagggaataaaacattattgatcaaacagtatctgttctaacctaaaattataggtagggcaggctaagtgaacagcattgagtattttctgaatccctcatgataatttatagccacatactgcttcctttgacttcaggaatgatcagttttcataatggccactgggcctgcttagattgcagtattcattatctgcatctaatttggtagtttccacaatcgtatttgatgaaagaaacttcagtccccattattacctgtgtctttgccaagctgcctagcatacatcagtatgtaatgtaaaagacatatgagcaagaaaaaagtgatttaacttacctcatcaagaatgtgcccctacaggccgggcgcagtggctcacgcctgtaatcccagcattttgggaggccgaggcaggtggatcacctgaggtcaggagtttgagaccagcctggccaacatggtgaaaccccgtctctactaaaaaatacaaaaattagctgggcatggtggcgtgcacctgtaatcctagctactcaggaggctgaggcaggagaatcgcttgaacctgggaggtggtggttgcagtgagccaagatcacaccattgcactccagcctgggtgacagagtgagactctgtctcaagaagg

SEQ ID NO: 497087 - DNA, 983 bp, Homo sapiens
aggaaaaggaacaaaaacaataaagaaatacctttgtttttttttcttttttgagacggagtctcgctctgttgcccaggctggagtgcagtggtgcgatctcggctcactgcaacctccgcctcccaggttcaagcgattcttcttcctcagcctcccgagtagctggaactataggcacgcaccaccacacccagctaattttgtgtttttagtagagatggggtttcatcatgttggcagggctggtttcgaactcctgacctcgtgatctgcctacctcagcctcccaaagtgctgggattacaggtatgggccatgggcccagcctatttttatttctttgatgtaggtgatctaaaatagtagatgacggacacggaacactggggtcgacaggtactcactagctattcattacgaacaaacgtctttccactgacacattgcaggcacacttaccatattaaatccgtggaacaaacgatacggtgtgacccccatgtgtcacctttccgtacaccatttattttgttccaggcaccattcttgcacggtcggtgagtcccgataccttgcatcaactgtccattcttcgtacgtcatttgacgtacaaactgggccattgttacagaacttcactcactgtaatttggtcttgcctattatggaacctccataatgaatcgtggggaccttaacttcctaacttcgcatccttaacaccgtgacgtctgacaaaggattcctacgacgtactctgaggctgattcggcgcctctgaaccttgcgtcaatgtagccacacctgatgtctactacatggattccatggtaagcacacataacaacactgtctgcccgccctaagtacacctggtgcgatcccacaatgacagcatgtcttaagactgctaggtgtctccaaccggcaccgtaaactattttactaacgcatactcgtcaaacggcatactcatcca

SEQ ID NO: 497088 - DNA, 550 bp, Homo sapiens
  misc_feature (2)..(2): n is a, c, g, or t
  misc_feature (92)..(92): n is a, c, g, or t
  misc_feature (96)..(96): n is a, c, g, or t
  misc_feature (106)..(106): n is a, c, g, or t
  misc_feature (108)..(108): n is a, c, g, or t
  misc_feature (110)..(111): n is a, c, g, or t
  misc_feature (129)..(129): n is a, c, g, or t
  misc_feature (139)..(140): n is a, c, g, or t
  misc_feature (144)..(144): n is a, c, g, or t
  misc_feature (151)..(151): n is a, c, g, or t
  misc_feature (189)..(189): n is a, c, g, or t
  misc_feature (192)..(192): n is a, c, g, or t
  misc_feature (244)..(244): n is a, c, g, or t
  misc_feature (272)..(272): n is a, c, g, or t
  misc_feature (547)..(547): n is a, c, g, or t
angcacacaacaaagcaagcaagacaaggagtaggcctggacccaatgtgaagcgcaggtggggtgtgaatcctaggcagctggcctctcangcanaggtggtgananannggaggccccatgttcccnaagaaagaannatcncacacantcatgagctcaaagtgtacaggacggcgacagaaattncangcaaccacagacacatcctggaggggcagccccaccgcagtccaagccagcngcagcttctccacaaaatcttccatcanctgagggctgtggtggggggagggtgccaagcgcaggagctcttcaccccgggggaaagcttcgcggtagttgatggcctgcacatagatgccatgcttggagagcaggagatcacagagcttgctgttgagtgctgcattgcccacccggatggggatgatatggctggggcaggggatgacaggcaggcgcgcctgtccataagtagctggcgcatgtgcttgacattgcgctggtgggctcgcgctcagggcttgggccctcctctcccttnagc

SEQ ID NO: 497089 - DNA, 452 bp, Homo sapiens
  misc_feature (223)..(223): n is a, c, g, or t
ttgggggtgatgggtttcatggggggtataccatatggtcaagaccttatcagattgtacactgtaaatatgtgcacttgattaaatggttaaaccctcaattaaaaaagaaaagaggctgagtgtgttagctcatgcctgtaatcccccagcactttgaggggccatggcagggtggatcgccgaggccaagtttgagaccagtctgggcaacatagtaagnccttgtctctacaaaaaaagtaaaaacaaaattagcccgatgccctggcaagaacctgtagtcccagctatttgggagactgagttgggaggatcacttgagcctgggaggtcaaggctgcaatgagctgagatcacaccactgcactccatgcactccagcctgggtgacagtgagatcctgtctaaaacacacacatgcacacatataagcacacacacttttttaa

SEQ ID NO: 497090 - DNA, 3840 bp, Homo sapiens
cagaaattcttttatcaccatcatggtttcgtagccatgtttaaatttttgtcttttcgtgttcgctctatacaggaagaagtcagtatcaaagaaattgcaatcacacatcatgtaaaggaaggacatgaaaaggcagatccttcccagtttgaacttttaaaagtattagggcagggatcatttggaaaggttttcttagttaaaaaaatctcaggctctgatgctaggcagctttatgccatgaaggtattgaagaaggccacactgaaagttcgagaccgagttcggacaaaaatggaacgtgatatcttggtagaggttaatcatccttttattgtcaagttgcattatgcttttcaaactgaagggaagttgtatcttattttggattttctcaggggaggagatttgtttacacgcttatccaaagaggtgatgttcacagaagaagatgtcaaattctacttggctgaacttgcacttgctttagaccatctacatagcctgggaataatttatagagacttaaaaccagaaaatatacttcttgatgaagaaggtcacatcaagttaacagatttcggcctaagtaaagagtctattgaccatgaaaagaaggcatattctttttgtggaactgtggagtatatggctccagaagtagttaatcgtcgaggtcatactcagagtgctgactggtggtcttttggtgtgttaatgtttgaaatgcttactggtacactccctttccaaggaaaagatcgaaaagaaacaatgactatgattcttaaagccaaacttggaatgccacagtttttgagtcctgaagcgcagagtcttttacgaatgcttttcaagcgaaatcctgcaaacagattaggtgcaggaccagatggagttgaagaaattaaaagacattcatttttctcaacgatagactggaataaactgtatagaagagaaattcatccgccatttaaacctgcaacgggcaggcctgaagatacattctattttgatcctgagtttactgcaaaaactcccaaagattcacctggcattccacctagtgctaatgcacatcagctttttcgggggtttagttttgttgctattacctcagatgatgaaagccaagctatgcagacagttggtgtacattcaattgttcagcagttacacaggaacagtattcagtttactgatggatatgaagtaaaagaagatattggagttggctcctactctgtttgcaagagatgtatacataaagctacaaacatggagtttgcagtgaagattattgataaaagcaagagagacccaacagaagaaattgaaattcttcttcgttatggacagcatccaaacattatcactctaaaggatgtatatgatgatggaaagtatgtgtatgtagtaacagaacttatgaaaggaggtgaattgctggataaaattcttagacaaaaatttttctctgaacgagaggccagtgctgtcctgttcactataactaaaaccgttgaatatcttcacgcacaagggctgagagcggaaaatggtcttctcatgactccttgttacactgcaaattttgttgcaccagaggttttaaaaagacaaggctatgatgctgcttgtgatatatggagtcttggtgtcctactctatacaatgcttaccggttacactccatttgcaaatggtcctgatgatacaccagaggaaatattggcacgaataggtagcggaaaattctcactcagtggtggttactggaattctgtttcagacacagcaaaggacctggtgtcaaagatgcttcatgtagaccctcatcagagactgactgctgctcttgtgctcagacatccttggatcgtccactgggaccaactgccacaataccaactaaacagacaggatgcaccacatctagtaaagggtgccatggcagctacatattctgctttgaaccgtaatcagtcaccagttttggaaccagtaggccgctctactcttgctcagcggagaggtattaaaaaaatcacctcaacagccctgtgaagtgacctcagtgagatatttggtaccatggtgtaagctgatagcacaagttctggcgacaggtagcacgtatctgagagacacctgcaagcacacactgtcccagctggtacccataatgctgctgttcctgctgctgctcctgctttcctctcttctcgctttaaatgattgttagcaagttagattttcctggagcttcggaagaaatgaaaatggaaacatgatgaagatatagtcactgaatcaatgagaaaaataatgaacatatgaataccacctaaaaatacactgaataaagtacaccatatagcattatttttataggaaatatttcatgtcccttaaatattctttgttagttatagggatggacagtttatgttaagcacttagcttaaacaatccgtttatattagcactgtatcccttgtgccatccaacattttgtatgtttttgtaaacagttcatatacagtacatttctgtactgctttctttaatgtatacatgccttgtttaacttggaatctattattattaatcaattgactattaaatctggttaaatagttcacctggattaacagtattgttggacagtcctaaaaatggccagattgtggaacagctgttgaatgtaatacttccaaaatgtacatatctttccccacgtctgtttcactggttcgttcatttgtttgtttcttaaagtcaggtgctctgtcagactaacctagagagctgttatggtagagaaagttatcatatgtgtgtggcatgaaatcaagaatacacctatgaagttagtccatatactttgcaactccttagagtacttttttccttaattaaggaagtagtccttgcacttctaatcttacatagcatccatacttagaatttggcatatcatctgggattttgccaatatacgtcaaagccctttaagagtcatggtaaggagatgggtgaaggaaaatttagcaacaggtaattgaagtcctattggatatttcatgtttaaatagatattctatattaaacactaatttaaatgtaataaaggccaaaggcctctgtatgaaattggatttaaactttcttattttagggaataaaacattattgatcaaacagtatctgttctaacctaaaattataggtagggcaggctaagtgaacagcattgagtattttctgaatccctcatgataatttatagccacatactgcttcctttgacttcaggaatgatcagttttcataatggccactgggcctgcttagattgcagtattcattatctgcatctaatttggtagtttccacaatcgtatttgatgaaagaaacttcagtccccattattacctgtgtctttgccaagctgcctagcatacatcagtatgtaatgtaaaagacatatgagcaagaaaaaagtgatttaacttacctcatcaagaatgtgcccctacaggccgggcgcagtggctcacgcctgtaatcccagcattttgggaggccgaggcaggtggatcacctgaggtcaggagtttgagaccagcctggccaacatggtgaaaccccgtctctactaaaaaatacaaaaattagctgggcatggtggcgtgcacctgtaatcctagctactcaggaggctgaggcaggagaatcgcttgaacctgggaggtggtggttgcagtgagccaagatcacaccattgcactccagcctgggtgacagagtgagactctgtctcaagaagg

SEQ ID NO: 497091 - DNA, 459 bp, Homo sapiens
  misc_feature (344)..(344): n is a, c, g, or t
ctggatgattacttgctagcaccattacttccagagtcccatggtgaacggaaagggcactctgcctaaaaaccacagtattctgtgacaattcagttgtacatttagcctcattagacgtcttctacctacctgacggacatagaatgtggtgtccgctgtgcacaagctattggttcaacatacggggattatgccctagaatgacgcacgggacaattccgtagatacgccttattgcgagccaaatactgctgatagtgctcttagatctaacctgactaggctgaaccataatgggcataggtaagctttactgcctctgtttgtgatggccactctgnagttggagatctccagtgatatcgacctgttggtcgcctaggcccatgaccttctagactcgaccaagcatatgcatgaggccgacatataggcctactcgctgactaaagccag

SEQ ID NO: 497092 - DNA, 2713 bp, Homo sapiens
atgccgctggcgcagctggcggacccgtggcagaagatggctgtggagagcccgtccgacagcgctgagaatggacagcaaattatggatgaacctatgggagaggaggagattaacccacaaactgaagaagtcagtatcaaagaaattgcaatcacacatcatgtaaaggaaggacatgaaaaggcagatccttcccagtttgaacttttaaaagtattagggcagggatcatttggaaaggttttcttagttaaaaaaatctcaggctctgatgctaggcagctttatgccatgaaggtattgaagaaggccacactgaaagttcgagaccgagttcggacaaaaatggaacgtgatatcttggtagaggttaatcatccttttattgtcaagttgcattatgcttttcaaactgaagggaagttgtatcttattttggattttctcaggggaggagatttgtttacacgcttatccaaagaggtgatgttcacagaagaagatgtcaaattctacttggctgaacttgcacttgctttagaccatctacatagcctgggaataatttatagagacttaaaaccagaaaatatacttcttgatgaagaaggtcacatcaagttaacagatttcggcctaagtaaagagtctattgaccatgaaaagaaggcatattctttttgtggaactgtggagtatatggctccagaagtagttaatcgtcgaggtcatactcagagtgctgactggtggtcttttggtgtgttaatgtttgaaatgcttactggtacactccctttccaaggaaaagatcgaaaagaaacaatgactatgattcttaaagccaaacttggaatgccacagtttttgagtcctgaagcgcagagtcttttacgaatgcttttcaagcgaaatcctgcaaacagattaggtgcaggaccagatggagttgaagaaattaaaagacattcatttttctcaacgatagactggaataaactgtatagaagagaaattcatccgccatttaaacctgcaacgggcaggcctgaagatacattctattttgatcctgagtttactgcaaaaactcccaaagattcacctggcattccacctagtgctaatgcacatcagctttttcgggggtttagttttgttgctattacctcagatgatgaaagccaagctatgcagacagttggtgtacattcaattgttcagcagttacacaggaacagtattcagtttactgatggatatgaagtaaaagaagatattggagttggctcctactctgtttgcaagagatgtatacataaagctacaaacatggagtttgcagtgaagattattgataaaagcaagagagacccaacagaagaaattgaaattcttcttcgttatggacagcatccaaacattatcactctaaaggatgtatatgatgatggaaagtatgtgtatgtagtaacagaacttatgaaaggaggtgaattgctggataaaattcttagacaaaaatttttctctgaacgagaggccagtgctgtcctgttcactataactaaaaccgttgaatatcttcacgcacaaggggtggttcatagagacttgaaacctagcaacattctttatgtggatgaatctggtaatccggaatctattcgaatttgtgattttggctttgcaaaacagctgagagcggaaaatggtcttctcatgactccttgttacactgcaaattttgttgcaccagaggttttaaaaagacaaggctatgatgctgcttgtgatatatggagtcttggtgtcctactctatacaatgcttaccggttacactccatttgcaaatggtcctgatgatacaccagaggaaatattggcacgaataggtagcggaaaattctcactcagtggtggttactggaattctgtttcagacacagcaaaggacctggtgtcaaagatgcttcatgtagaccctcatcagagactgactgctgctcttgtgctcagacatccttggatcgtccactgggaccaactgccacaataccaactaaacagacaggatgcaccacatctagtaaagggtgccatggcagctacatattctgctttgaaccgtaatcagtcaccagttttggaaccagtaggccgctctactcttgctcagcggagaggttgcttacattttgctggtctccccaagtgaccatggtggagaccaattaatgaaggaactgacaattcactttattgggactgtggttattcaaccagagccacacttaaccacctttttccaatgaagaatctccaggaatgataatgcccaaatatggatggccacgaagatattgtatctacgggtgccttatgtgttttgacactgctggattctgtgtgatcacgtgatttgcgcgtggtttcaatgttgacgagtgttctccaagaattctaataacttaaggtccaccttatatttcttaagccgtggattactcataggcttcaatatacccttgggaatcctacttctttaacgggtcctaacaaggggactaccgaagggtgttgacataagaccactctataccttaaggcagctcctcctaatattggcgcatatactataacgggcggatgacgcgtaaaagtgctctgacactccacagaacattcaactatatcatctgtgtaga

SEQ ID NO: 497093 - DNA, 126 bp, Homo sapiens
atcaaaattaattaaaaaccagtcttcagtttatactagacatatctcacgtactcagtcgctacatgtggctagtggctgctgcattggacagcattgttgaaagagaacatattcatcactgca

SEQ ID NO: 497094 - DNA, 708 bp, Homo sapiens
  misc_feature (79)..(79): n is a, c, g, or t
ggcagacactgaccttcagcgcctcggctccagcgccatggcgccctccaggaagttcttcggtgtggggggaaacctngcgaaagggatggaacaccggggcggggaaagggcaaggaagcttcgtagcggaggggaaggccttcaactcgggggataaccttccgtggaaaagccgccggggcccaaaaaagggggtttggccccggggggcccgggaaacaaaccccggaaaagaggcggtggcggatatgttggattggcccttcccaccaccaccttattaacctgttttggcccccttattaatattatattccgaggaaaacttttttcccggggcccccccggggggggcccacacgggcacacaacgacgggccttattaaggggaattattcccccccccaaaaaaagcgggcaatattttgtgggcccccttggggcttgggcggggctttttggggcctcgggcacaagaggggaaaaaacaacacctggttgggccctttattaaagcaccaaagaaaaccacagcggggcgtgtggggagaccacccttttttacaaccaaccttgtggggacggaggggagggaccccatttttatttcactactaataacaccacccttttgtggggcgcgacgcgacgcggcacaaccgggaaaccattttccacaaaaggggtccacccccccccctgtg

SEQ ID NO: 497095 - DNA, 407 bp, Homo sapiens
aaattggactacccccacgtggggtaagcagaggaggaatcggttcacttaagctcccagcgaacatcctcctgccaatgtaggaggaaacacctccctatgttaccatttatgtttctcagaaccagcagagtcagtgcctagtgtgggcccggaaaatagttggcactcaataaagattggcagaatttaatacagatcttttcagcggttcttagggcattagtaaagggaaatcataacgtgattctaggttatcaaaccatggagtgatgtggagctaggattgtgagtgacctgcaggccattatcagtgcctcatctgtgcagaagtcgcagcagagagggaccatccaaatacctaagaaaacagacctagtcaggatatgaatttgtttcttcaattc

SEQ ID NO: 497096 - DNA, 346 bp, Homo sapiens
  misc_feature (51)..(51): n is a, c, g, or t
  misc_feature (57)..(57): n is a, c, g, or t
  misc_feature (88)..(88): n is a, c, g, or t
  misc_feature (95)..(95): n is a, c, g, or t
  misc_feature (110)..(110): n is a, c, g, or t
  misc_feature (171)..(171): n is a, c, g, or t
  misc_feature (189)..(189): n is a, c, g, or t
  misc_feature (230)..(230): n is a, c, g, or t
ttttttttttaagacggagcttgctctgttgcccaggctggagtgccactncgtgancttggctcactgcaacctctgcctcctgggntcaagtnatttgcatgcctcancctcctgagtagctgggaatacaggtgcatgccaccactctctgctaatttttgtattttnagtagagatagggttttnctgtgttggctaggctggtctcgaactcctgaactcaagtnatctgcccgcctcagcctcccagagtgctgggattataggcatgagccactgtgcctggccaatttagtaggatttctcctaagaatgcaagaatagatcatcatcgggggaaaat

SEQ ID NO: 497097 - DNA, 339 bp, Homo sapiens
cttgcccctccgggaaactgtggcgtgatggccgcgggactcgtccagaacatcatcccgtgcctctactggcgctgccatggactgtaggcagggtcatctctgaagcagaacgcggaagctcactgggcatggccattcgcgtgtccccacttgccaacgttgtacagtggtgcacctgatctggccgtctagcgaaaacctgcgaatatatgatgacatcaagaaggtggtgaagcaggcgtcggaggggccccacaagggcatcctgggctacacctgagcaccagggtggtctcctctgacttcaacacagtcaccacacacacacagtcacca

SEQ ID NO: 497098 - DNA, 98 bp, Homo sapiens
gcttaccagtaaaaaaattttgttttaaattcaacccttcgtttaaatgtattttagttcccccattgggaagaaaataaaatattactatgtccgga

SEQ ID NO: 497099 - DNA, 298 bp, Homo sapiens
ccctcttcagccacagtggctaactaagcgcctcacatttggtatctattcattctctagccagtgcactcagaatgcctggaattcagctgggcatggtggcccattcctgtaattccagcactttgtgaggccaaggtgcgtggatcactcgaggtcaggagttccgagacagcctagacaacatgggggaacccccggtctctaccgaaaaataccaaaaattagtttgggcattagtgggttgcgtgcctgttaactcccaagccacctctggaagggccgagggtaggaggaa

SEQ ID NO: 497100 - DNA, 288 bp, Homo sapiens
aaggggcctcaatgagtgataggaaaatccagttcttttaaaatttcttcaagaaaatccaggctatccccatagtctttctgtgtgcacttatcaggagcatcaggacagagcattgggaaacttgcacagttagctatgcatctccacattcgggttggggggtaagttatggcaattggtcttaaaataggatgtgttcaataacttcacataaacttcctgtttctccaaaaactcaaagagataggagtttaatgagtctgtattacctgcttggggtaccgg

SEQ ID NO: 497101 - DNA, 319 bp, Homo sapiens
aataatatattgcatacctgatatttaccaagagagtagatcctaaatattctcaccacaaacgaaaggtaagtatgtgaggtaacaggtatattagttagcttgattgtggtagtcatttcaccatgtgcacctagatccaaacatcacggtggacatcctggatataattaattttaattggcaggtaaggatccattaagctggaggaaagggtagtacctgattgcatggactggaccatccggccctgttaataatttaatattgtttgtgctagtagttgtggttacctcaatatatattgtgcacagtaaac

SEQ ID NO: 497102 - DNA, 237 bp, Homo sapiens
gctcgacggatggctcacgcctgtagtcccagcaatttgggaggccaaggtgggcggatcaccaggtcaggagatagagacccgcctggccagcagcgaagaccctgtctctgctgaaaatacaaaaaattagccgggcgtggtggcgggtgtctgtgatcccagccctgggctcaaacaatcctcacacctttcataccttaggcccctgagtagctgggtgggactacgggcatg

SEQ ID NO: 497103 - DNA, 343 bp, Homo sapiens
tactctgaggactccccggtcacctgcttcggactgacgacgatagtgacggaacacgttacgccaataactgacgtgacagtccgtggaagcctgtggctacaaaaaactgttgacgccgtagactgccgtcggaaactggtgacagggagacctcgacagtactctgacggcttgtaggacgggtaaaatagacgacccagtacacattgtactaacgcacgtgcttgaccttactttggtttcggattgttttctattacacctactggtgacgctcacggtgacttgactacctcctgactgcgacgtacatacggactgtgttcacggacgctggcga

SEQ ID NO: 497104 - DNA, 803 bp, Homo sapiens
  misc_feature (623)..(623): n is a, c, g, or t
atctcaatttgaatgtatctcccagaattcccacgtatgtgggagggcaccagagggaggtaattgaatcatgggggccggtctttcccatgctattctcgtggtggtgaataagtctcactagatctgacgggtttatcaggggtttccgcttttgcttcttcctcatttttctcttgccccttgccacgcaagaagtgccttttgcctcccaccataattctgaggcctccccaaccatgtggaactgtaagtccaattaaacctctttttcttcccagtctcaggtatgtctttatcagcagtgtgaaaacggactaatacacatggtaattccatgtttaactttttgaggaacagccaaactgttctccacagtggctgcaccattttacattcctgccagccgctcatgaagcttccaatttttccatatctttgccaagatttattattgtctgtctttttgattgtagcctttctagtgggtgtggagtggtatttcattgtggtttgatttgcatttccctagtaattaacggtattgataatcactttcatgaacttatttgccacttgtatgttttctttggataaatgtcttttccggtcctttgcctatnttaaaatggtaccatttgtcttttccatcgacttatcactaactattatgtattctggatactagatccttattatatatatcatttccaaatattttctctcattcctgtgtattgtctcttcactttcttgacagtgtctttaataaacaaaagttttaatttccaaagaaacaacaa

SEQ ID NO: 497105 - DNA, 189 bp, Homo sapiens
gctgaggcaggagaatcacttgaatccaggagggggtgctttgcagtaagcagagaccatgccactgcactccagcctgggcaatagagccagactgtgtctcaaaaaaaaaaaaggaaaggggcccactcatttgggtcggattcttaagttctaagggccctttaacatgggccatttaatggcatt

SEQ ID NO: 497106 - DNA, 102 bp, Homo sapiens
ctcttgaggatccccgtcattttctacaccgtctatctctagttcagccatcatcacacggaagaaaacaacaaaagtatgcctggtcggtgtagggaatgt

SEQ ID NO: 497107 - DNA, 183 bp, Homo sapiens
ttcagatgagcacttcactatcaaaaatactaacatcacactggtcttgaaagagccatcagagctagaatcatccaagtaagaacaacgtaccattgttgattgataagtagagatacattttttatgatgttcatcacagtgtggtaagcttacatatcaaaaggtgtgtctgcgtgtttg

SEQ ID NO: 497108 - DNA, 802 bp, Homo sapiens
  misc_feature (546)..(546): n is a, c, g, or t
  misc_feature (553)..(553): n is a, c, g, or t
  misc_feature (555)..(556): n is a, c, g, or t
  misc_feature (558)..(559): n is a, c, g, or t
  misc_feature (578)..(578): n is a, c, g, or t
  misc_feature (597)..(598): n is a, c, g, or t
  misc_feature (634)..(634): n is a, c, g, or t
  misc_feature (642)..(642): n is a, c, g, or t
  misc_feature (644)..(644): n is a, c, g, or t
  misc_feature (650)..(651): n is a, c, g, or t
  misc_feature (701)..(701): n is a, c, g, or t
  misc_feature (738)..(738): n is a, c, g, or t
ggaggaccgtgtccggagggcgccaagccaagccctagatcgcccagatcagggcgcgggggatccaccaaccccagcactgtcagccttctcgctgcaagaagtgcccctgccacctggcacaagcgacgtaggcgcaggcacgaacagagtagggagaaaccccagtgtaccagacgtgcatcctcccaggcgggatgcaccgagcatctttagggacagcttgagcccctaaccggggccttggcccccgtcattaaccagcagcttctttgtactggggagctcacgaacatcccccaatctcgtacagctccgtccccaatacttggggtacccagcaaccctggcccctcaaccgcctagcgaaatctctaacacactcttagatggtccaaggcttagaacaggcatctcgtagccagccccactgtctcgtaaccactcctgggctaaggagtaacctcccgtcatctcgaagctgccccccatcggggccagggctaccccagaacgttgttaactcttctcaggacagggagcttngggcccncnntnntgtctcctgccccgggggncctgtggctaagtaaaccnnatcctaactacccagtgtgggtgtgggcctctgaanataacccncncccacnnagggggagtctgagccgggagggctcccgagtctctgccttcagctcccnaagtgggtggtgggcccccttcacgtgggacccactntcccatgctggatgggcagaagacattgcttattggagacaaattaaaaacaaaaacaactaac

SEQ ID NO: 497109 - DNA, 357 bp, Homo sapiens
cgtgaacccaccgtgccccagttgagaatgtcttttataaatacccatatgtttactatttctagttctattaactcttttgtgtagaattgcatttctatctcacatcatgttttcttagctcaaagagcttctcttttttttttttttttttttgagacggagtcttgctctgtcgcccaggctggagtgcagtggcatgatctcggctcagtgcaagttctgcttcccgggttcacaccattctcctgcctcagcctcccgagtagctgggcctacaggcacatgctcccaagcctggctaattttttgtatttttagtagagacggtgtttcactgtgttagccaggatggtc

SEQ ID NO: 497110 - DNA, 525 bp, Homo sapiens
cagtgctgtacggccggaagttcgggctagaccgagtcgccccgggagctaagagcctcgcctttgccgatccagcgtccgtccacaggacgacgacaggtcaccatggatgatgatatctgccgcgctcgtcgtcgacaaccggctccggcatgtgcaatggccggcttcgcgggcgacgatgcccccctgggccgtcttcccctccatcgtggaggcgccccaggcaccagggacgtgatggtgggcatgggtcagaaggattccatatgtgggcagacgagtgccagaagcaagagaggcatcctcagccctgaagtaccccatcgagcacggacatcgatcaccaactgggacgacatggagaaaatctggacaccacaccgttctacaatgagctgcgctgtggaatcccgaggagcaaccccgatgactgcatgacacgaggaaccacactgaaaacccaaggccaacacgcgagaagatagaaccagactcatgataagagaccattcaaacaaccca

SEQ ID NO: 497111 - DNA, 474 bp, Homo sapiens
caaagcgccaaccaaggttggcacctacctgagcgtcacctcatccagcacccacatcgccgggcgcgtgtcgccggtgaagttgatgcacagatcaccggtgccctgcgtgcccttcggcagcgtggccttcagggtcacgaagccatcggcatccggcttggccggcagcggtacttcagccagcaccttgccgctgcagtcgccgcgacgcaccagcatttcgccatgcgcccgcttggctttctcgaagcgacgcttgggttcgtcgtgggccagctggaagtagtacggaatgcggcccgcgcggacctccacgctgccgatgccgtccagctgtgcctgcggccagcgccagcacggctggaagatgtcgacattgaacaccgcacgcgttccctcgcgcgggccgtcgtcttccaggcgcagcaccaagcccttcgtgcccacgcagctgagcagctcatcgctgcg

SEQ ID NO: 497112 - DNA, 225 bp, Homo sapiens
  misc_feature (5)..(5): n is a, c, g, or t
  misc_feature (23)..(23): n is a, c, g, or t
  misc_feature (59)..(59): n is a, c, g, or t
  misc_feature (70)..(70): n is a, c, g, or t
  misc_feature (110)..(110): n is a, c, g, or t
  misc_feature (150)..(152): n is a, c, g, or t
  misc_feature (158)..(160): n is a, c, g, or t
  misc_feature (167)..(168): n is a, c, g, or t
  misc_feature (175)..(175): n is a, c, g, or t
  misc_feature (177)..(177): n is a, c, g, or t
  misc_feature (180)..(180): n is a, c, g, or t
  misc_feature (184)..(184): n is a, c, g, or t
cattngtattactcttaaatttnattaacatcttcagttcgtcgccgtcatttaaaatngacgacatgtngctttaaaaacgcattcttatacataaaccaccacacgtnttctgcttctctcttttaaagtatttataaaaatataaannntacatnnngtaaaannctatgtntnganttcnctactgtgtcatatcactaaataaacacggttttattgctg

SEQ ID NO: 497113 - DNA, 91 bp, Homo sapiens
gaagccataccacctcctcttgggcatgtgcttagagctgtgactcgctacctctgttctccaggagccgtcacaggcacaaaggtgtatg

SEQ ID NO: 497114 - DNA, 622 bp, Homo sapiens
  misc_feature (373)..(373): n is a, c, g, or t
tctacaatcacatatgacatacatgtaacataaaaataattggcataacatacttattcaattagtgattaaatatctttttttttggtttaaagagatggggcctcactatgttgaccaggctagacttgaactccttgggctcaagcaatcatcctgccccagcctccctgagcagctggtactacaggtgcaccaccgcacctagctatcattttaatccccagaatgatttataattaaaaatagaatgtttaagggaaagcgtgcatagtgttaatatttttatgtaaagaactctgttggtattggttttggtttagggtatggtttggtatttggagatggagtctcgctctgtcacccagactgnagtgcagtggtgtgatcttggctcactacgaccaccgtctcctgggttcaagcgattcttctgcctcagcctcccaagtagctgggactacagccgcacgccaccacacccagctaatttgtgtatattcagtgaagatggggtttcaccatgtgggccaggatggtctcgatctcttgacctgtgatccgcccaccttggcctcccaatgtgctgggataactggtgtgagccactgtgccacggcaa

SEQ ID NO: 497115 - DNA, 270 bp, Homo sapiens
tgaagcacggacagtgaagaggaaggtcagcctcttccatgagaagtgctgtattgtgctcaaggagatcgtttatttgccagaatgaggtgtggcattatctctgtggacccagtttctgtgaattggctgagctttgtgaggaacagattcaggaatggactttgctctgtaaaggatggggaacctcacttccgtggtggtccaactgcacaggctacatcaaggtctggtccccagacaggtgtttccctctccagtgttcagagt

SEQ ID NO: 497116 - DNA, 705 bp, Homo sapiens
ataatcccaacgtcgcatgttctttgtaacaaccaattctgttctatctttcttctttaattattttacaactgtagttgattcttctggaactcagtctaaaatgaatggaaagaaaacttcaggatatcatttaatgactattaagtattatctggtaaaaacgtgaagataagacttgtagaatcacagcttcaaattttatggaacacaattaccgcaagcaagtacctagccaatagttcatgcttaagcttccttggtgtaagtattttgttggcgattcctataaataatttttcatcacaaaggttttaaatttctgggtgctacttctgactctcaactgagagtggatagagttgtttctttctcgaggattacagtcgttacaatatgtccatcgcctggctggttataaacatttgtcaccttttgaaggtaaaatatactctggcccttcttgactcagttacaggtcattttaggtccagtaataagagtcaggtgtttggttattgctttcagagtcagacattgtcgtagcgtaatatctcaaaaactattagcaggttttcactgacaatgcttttttcaacacataaaaaatgtaatccactttctttaaggcagattgtccattatgcatatacagcttgaactatagtttgggtccatataggaaccatcaccaaaaactctggt

SEQ ID NO: 497117 - DNA, 318 bp, Homo sapiens
  misc_feature (137)..(137): n is a, c, g, or t
  misc_feature (230)..(230): n is a, c, g, or t
  misc_feature (239)..(239): n is a, c, g, or t
aggaagttagggtagccatttgaaaactaatccccgtcggggcgtggtggctcacgcctgtaagcccagcactttcggaggctcaggcgggtggttcacttgaggtcaggaattcgagaccagcctggccaacattntgaagccctgtttctgctaatagtataaaatttagccgggctttgtggtgcatgcctctagtcctggctacttgggaggctgagacaggaganttgattgancctgagaggtggaggttgcagtgagctgagatcgcgctattgcattccagcctgggcaacaagtgaaacttctgcctcc

SEQ ID NO: 497118 - DNA, 151 bp, Homo sapiens
cttggctgcacccagggttattttgcggtgctttctgcgggtcgtaggtgaggagacgggtggagccccacatgcccaggctgcacgcctctgtcccctccacctctgaggagcgtctggggaggcacactttatgcactttgtatcacac

SEQ ID NO: 497119 - DNA, 657 bp, Homo sapiens
gtcctgtttgcgtgtgttattttaaggtggctcgcgtagcgtgcctggtaggtagccggcggcggtccgaggagcgaggtgaccgactcgggagccatgcctgcgctgaggtgggtggccgcacagccgccgtcaccgccaccgccgccggtgtggggtgggaggggcgggagacgccgccgtccgcagtgctccagggtgggcgccgtttcgccgtggactccgatcgttcgggacgagggtttcatcaccttaaatggttttgaaccaatgaaggtgtattcccgttaaaaagacttggacaagcccatcgtgtgaactatagagtttgtggacagatataatattgggttcatagtggcgtcagtgcactgcagacgtcctgtcaagttcccctaagttcgttagaggactgctttgccttttgatctgagagttgcaagagttccgataaagaatggcaccttgtggataagcagcaaatgtcacagagacagcggattgtgacacgcatttgtgaacggtattgcgccgggcagcatggaatgaaaccggtggcccatgaagacacccgcggccgacatgtggattgtcgctggctgcgattggccgcgaattgatatttggagaaatgccccattccgcaaagggagatgc

SEQ ID NO: 497120 - DNA, 285 bp, Homo sapiens
ggctgttctagaggatcccactcagtttacacaacttcagctgagactacactcagaaataagtttagaaaatggcattacacaaggttgggagtgagcagtacacaaacaaccaaacccatgcagggctgtatgtgctgtgggaaatcagatgtgttcagtgccataagtcttcagtgcgtgcaaacttcacaaaacagccctccaaaaaagatgaaggccttcttggacaaatacagcaattccagggtatactatgtctcactctttatgtgtcaactgatt

SEQ ID NO: 497121 - DNA, 349 bp, Homo sapiens
ctagagatccccctgccggacagcaggcagggtttgtaatgcctcttgtgatccacttcttgctgccttcttcacttcttgagctcactcccagggatccatttgctattgtttctcctcgtacccctaaggaccagaacaaaaagtttacttcatttgttcccatagcgaaactcagcttggcttagtgtggtttagctcttacacccaccatcccactggtcctcgtgactaaggctactgttggattgattcgaaatcttgtccctgttgatcccgcaaatcatgcacctttgcgtgagcagtggtgccattccacgactagttcagttccttgtcccgctggggc

SEQ ID NO: 497122 - DNA, 458 bp, Homo sapiens
ctagccgggaaaattcatctgaacatccttcctacagccgctccccacaccaggtggccaggtgggagttccagaccagagctgtctcctgggatgttgacacagcagccacgttgattggtgttggggcagcccctgtcggtgtggctggcttcgggcctggcattggaacggcgtttggcagcttgttggctatgccgggaatctgtttcacaagcagcagctcatctccgatgccattctgggctttgctgtgtctgaggccatggggctgttctgtttggtggtcgtcttcctcatcctcgccacgtgaggctccacaggggtcacctgcctgtccctgctgcccgtccctactccacgccattcctggtgatggggtatgctaatttttaccattaaacacacgtttctctcaaaaaaagtctcccccacataaattttactacgaaaacctg

SEQ ID NO: 497123 - DNA, 452 bp, Homo sapiens
aacaaccgagccaagatgttgcggaatctgctggcccttcgtcagattgcccagaggaccatcagcaccacttcacgaaggcattttgaaaacaaggttccagagaaacaaaagctgtttcaggaggataatgggatgccagttcatctgaaaggcggggcatctgatgccctcctctacagagccacaatggctctgacgcttggtggcacagctatgccatctatctgttagctatggctgcatttcccaagaagcagaactaatgtcgtcatcccagtcttcacgtggttcagtttcatcaacgctcgatggaccaggaatctgatgagtaactgagctcttctttggggatcaatatttattgatgtgtattaactgctgccaataaagcaatccttaaccattttgtgtctcccttttcacttgagaataaattcctggtaatacca

SEQ ID NO: 497124 - DNA, 835 bp, Homo sapiens
tgggatgtgcttctgatgcctggagcattgcatgctgcctgtgatgtgccagatggccgttctgccctgcctcatgtgcctgtgtctggcctgcctgctcccctcccctgcgccctgttccctgtggcatgtggcccagatgatggccgcctgccgtcctgccctggtgtgttctctgtgtgctgaatgtgtgaagcctgcgaagcaggtcctggggaagagctcgcctgctcctgagggaagcagctgataatgatggcgctttgaagtggtgatgcctgagtgcctgagtcactcgtgttcggtcgggacgcctgcctttctaactgcctgccgtcggctcgcaccactctgggcctgctgcccacactgactgctgtgggtccgggagagcgggatgcttggcctggcctgcgcctggcttcttggaaacgagcattgaatggagctgcgagaatgcagttccgctgggcagaaacctctgtagaggagcaggatgcaaccgacatgtgctgtggccggacagctgctgacccagcacatggagcctgcaactgcgcacgggtttggccaaagaagcccccatactccctggtgaaaaagatttccagaagctgttctgtcaataacaaagtctcagagaacaaccacagaaagccagcgcaacagtaagatcattcttgaggtccaagtttgaagaaactaagggtcaagttactgcagaggcattggacgtgacagaaagcagcctgatacccatcgtgtgagggacagatgctctattcagcattcctcaggattctggttctggtacaggaggtctctcttatattgc

SEQ ID NO: 497125 - DNA, 119 bp, Homo sapiens
cgacaggctgtagagggcacaggtactccaggagatagggttttgtgtgtcattcatgaatctctagtatcaaggacaaggcatgattcagtcatgaacctgttgtctgggatgctcct

SEQ ID NO: 497126 - DNA, 446 bp, Homo sapiens
ttcctgtggtcgactctttatgtcatccccggcggccatgtcggctgtggtaccctgtcggctcaggcgcttccggcattcacaacccctcgctctgccgtgcttacagactactgctcatcctgctgaagctgcgtccgtggcttgggaaacccctggcgcccgcggtcagcggctgccccagaagggagacgtggagatgctgtgcggcgggccgccctgccagggcttcagcggcatgaaccgcttcaattcgcgcacctactccaagttcaaaaactctctggtggtttccttcctcagctactgcgactactaccggccccggttcttcctcctggagaatgtcaggaactttgtctccttcaagcgctccatggtcctgaagctcaccctccgctgcctggtccgcatgggctatcagtgcaccttcggcgtgctgcagg

SEQ ID NO: 497127 - DNA, 175 bp, Homo sapiens
  misc_feature (125)..(125): n is a, c, g, or t
ggtaccccgcggttatgtttacgcaagacctcatggctgctagtcgggctggttaccgctgagccacgatgagactccttgtaactaaagtttcttagtggatatacaacataagtagatgtaanctgagagccactgtttcccttcattgctccgtaagacataaccgcgggac

SEQ ID NO: 497128 - DNA, 604 bp, Homo sapiens
  misc_feature (346)..(346): n is a, c, g, or t
cacgagggggatacacgtcttcggatcgatcccttggaagatccttgatcagctgatggtaggcatccgttcgccatgcttccctcgcaggcaggccctggtcgttcttctggaatttggtatccgccatctcggcgtccagaaaggcctgtagcatgcctgtcacctgtgccttcgagttcgccatcagcgccggcaataattcgtcattgaaccggtcttccagggcgcgcgcctgtttcagcgattccttaagacagcccgacacgtcgccgttggccttctcgaagccatcgtgtgcggacgcggcttgacatatcttgtggatcagataaccgccaccggncgcaccgccaacagccagtccgcccagcagcacgaggcccagcggcggaaacgcgaccgtgacgatcagcatcgccagtgcgcccgctacgctggcgatgcccgccaataccatggccttggtgctgggcgattcgttgtctggacattcgtggatttgggtggccaggtgatcgaggtcctgcagcgcgtccgtaacggattttgagcactcctgtatttcgctgcgtaggcgcaagagctcctgacgcgtgatgac

SEQ ID NO: 497129 - DNA, 435 bp, Homo sapiens
cccgcaggctcctaatcacttgggtctttggaaacaactaaagttcaaagaacgtctcaaattctccattggagttgcttcctgttccaataaggagcattctttccttattgaatgattaaatcctatgcacatctccatgtttcaatgaggtttttttgtttgtttgtttgttcatttgttcgtttgtttttttctgagacttaacaaactagtctggtttgcagagctatctgatcttcgccttcatagcactcatttcaatttataattaaatccctgttgtattctttatttaatgcatgttgctctcagacacaataggcaagtaaactaggtggacaatttagaaatgttctctgtagtaagtggtgtttgtcagtgtctgtatgtttcactgtgtgtgaggtaaaagcggccgcgaatttagtagta

SEQ ID NO: 497130 - DNA, 354 bp, Homo sapiens
cttttggggtctttgctggtactgccaccatctccattaccaggtgttttctgttagatctattacgttaacctaaaaggagagagaaaaaagacaaataattatttccagtaaaactgcctctgattcaactccctttatcagggctaagttcacagagaaatactaacttgtataaaggatcaggtggtaaatatgtgtcctactcagacacacggattcttattgatagttggacaaattcccatctatctccacataacagaaaaaaattaaccaagccaggcgcagtggcacatgcctgtaatcccagcattttgagaggtgaagagggggcggatctgtagagctcaa

SEQ ID NO: 497131 - DNA, 634 bp, Homo sapiens
  misc_feature (503)..(503): n is a, c, g, or t
  misc_feature (524)..(524): n is a, c, g, or t
  misc_feature (531)..(532): n is a, c, g, or t
  misc_feature (541)..(541): n is a, c, g, or t
  misc_feature (544)..(544): n is a, c, g, or t
  misc_feature (546)..(546): n is a, c, g, or t
  misc_feature (553)..(553): n is a, c, g, or t
  misc_feature (561)..(561): n is a, c, g, or t
  misc_feature (564)..(564): n is a, c, g, or t
  misc_feature (570)..(570): n is a, c, g, or t
  misc_feature (573)..(573): n is a, c, g, or t
  misc_feature (587)..(587): n is a, c, g, or t
cccggaaattcggccattatggccgggaattcctgaagctgccagcattcggcccgagaggcctggttccggggcctaagttgggctcgggctactctctctttctggcctgaaggctatccagcgaactccaaagattcaggttaactaacgtaatccagcaaagaagggaaggccaaattccctgaatggctatgggcctgggtttaatccatccgacattgaagttgactaactgaagaagggagagagaatggaaaaaggggagcattcaaactggcctttaagcagggactggcctttcaatctctggaactacactgaattaacccccactgggatgagtatgcctgccgggggaaccatgtgactttgtcacagcccaggatagttaagtggaatcgagacatgtaagcagaatcatggaggtttgaagatgccgaatttgaatggaatgaattccaaattctgctggctggcttttaaatatggataggctaatncactaacacttaatgcccttngatgctnnctccatgtngangnatctgancaggttgntcnacaggnagntctagaaggcttgnaacttgtggggagcagagaattctcttatccaacatcaactcttgct

SEQ ID NO: 497132 - DNA, 178 bp, Homo sapiens
tgaggttgttagtgtagaatggagagtgttgggtgaataagtagtgagatgttggtgatgtatattggggtggtgggtgaatcggtgggactggtagtgcgagtacttgggagaggtgggtgaatatattgggactggtaggtgagtacttgggaagaggtagggcgtatacactggc

SEQ ID NO: 497133 - DNA, 613 bp, Homo sapiens
  misc_feature (503)..(503): n is a, c, g, or t
cccggaaattcggccattatggccgggaattcctgaagctgccagcattcggcccgagaggcctggttccggggcctaagttgggctcgggctactctctctttctggcctgaaggctatccagcgaactccaaagattcaggttaactaacgtaatccagcaaagaagggaaggccaaattccctgaatggctatgggcctgggtttaatccatccgacattgaagttgactaactgaagaagggagagagaatggaaaaaggggagcattcaaactggcctttaagcagggactggcctttcaatctctggaactacactgaattaacccccactgggatgagtatgcctgccgggggaaccatgtgactttgtcacagcccaggatagttaagtggaatcgagacatgtaagcagaatcatggaggtttgaagatgccgaatttgaatggaatgaattccaaattctgctggctggcttttaaatatggataggctaatncactaacacttaatgcactggtagggttataataaggttaccagggccatgacctcctttatattcctactttgagggctgctcctgctgaggtatctgaccggttgttc

SEQ ID NO: 497134 - DNA, 157 bp, Homo sapiens
aagtcagcgagataaagacatcctcgcgcagagcccgcagcagagcactgtaaacattggtatctcttgaggagcagagaactgcttaagatgttcagaaatgatggctcagtagagtgaatatctacacacttccaagcacaacacagccaaggcc

SEQ ID NO: 497135 - DNA, 1282 bp, Homo sapiens
tgagagagaactagtctcgagtttgatttatatttttttaggtgcaaagctagctgaggtttaatttgggaccaaaaaaaaaaagcaatggaatggtttggaacctggaggcatggccaaggggggtcccaaggtattaaatttccccatgttggggcatgagggcataagggttagagcctcagttgggtcttcctgtccccagtgcataccctgaataggagggcctcctttccacaaggctcggggcgcagcgacaagagagggttaagcgctggagatggcggctgccagcagtgtgtacactctggccagggaggttcgaggagggaactctcagacagaccagagtgctttcgccatcaaggtgtgttcttcggactcgtctcttatcaacacaccacaggtgtccccttggaaggaaagcgtggtgtgcgagctttgaagagcattgtggaatgcccggaggccaagagagccaaaacagcgtgggagccccaaaggcgttgaatcttgaagagccgcagggcacatttggtagaaggcgcccccccaaataggcgcgaagtctcaaacaaccatctcgtgaaatagccgcgtgtgggtgggctcttcccgtattaaaacatatctcggtgtttcgttgcatatccccaaaatttacgaaacgcggctcatatcgataggacttttcagaaaaaaaatccgcctgataagggttgaaaaatattagaaatgttcccaggggaccaactttgggcacgttttccattcaaggctcctcgggtaacacaacgacagatttgcagcgagacaagtgtcctcagcattgtgacccccatcaagcaggagcggaatcttaagagtttggggaacacaacctgtgtggcgtgtgagcaactccctttaagattggcaccacttttgtcagcaagcattgatacggggaatttttgaaatgtagagggccccccgggtgaaacgcccttctgggcacatttagagggcccccaaaatctcaacccatagagatcccgcgcatgaatgtacccgggtacagtctaacaaaaaattgcaggacaagggagcgccccaaggaggcaaccccgggggaccccacagcaagggacagagagcgactacaacaagagaatccggggaaaagtgaccaaagccaaacccggggagggtagggtgaaaaaaaccgcggacagtggcctataacctaaacaaaagatggtcgccagatcacaggaaacaggatgttgcccatgcgaaccca

SEQ ID NO: 497136 - DNA, 282 bp, Homo sapiens
  misc_feature (183)..(183): n is a, c, g, or t
gggccttttactacgtgggccatgctgtcattaccccttcgtatagacggaactctgatgcgttaggacgaggctgagtgattggtcattgcgcggagaagatatccgagacagccgacatcagcgtgacagcaggagacgcccgggaggaagaggcagaagtgtttcatgggggtcgaggtncgtgcgtggaccacgctggtggcaagaatcctccatctagttcttgtgctcaagagatccagaacagcaatccattacaggcttacttgagtaatacag

SEQ ID NO: 497137 - DNA, 879 bp, Homo sapiens
atgggcagcaactacggctaggtacgaggcctgggtgttagagagagagagagactagtctcgagtttaattattttttttttcttcttggttctcaaaaaggtcaaagggagcccaatggcaggggtaccaaagtgactcctccatcttaaagaaaatcacaacagagtacctagaaagagaggcgggtcaaaaaagtagtgaacaaacgcttttctcagattcaataggctatcccatcaccctttattgtggagaacggacacgcagagaaggacacttacggtgatgctgaggcagaggaagagcaaaggtgaccaaagaagaggcaagataacagatgtatgaaaaaaagcccaagatcgaagatgtgggttcaccactgcaggaggatgcacagcgcgatagaggataagcaagaagaaaactaaagaagatcaacagagaaatcaccttgatcaggaagaaactaaacaaagcaccaagcctatttggcccagcaaaccctgatgacatccacccaaggaggagtatggagaattctaagaaaagcctcactacatgactggcgaagaccaacttggcaagtcaaacgcacctttactgtaggaagcgtcacgtgggacactccagcgacatgagtaatacattcctcgatagagggactcccatattgaacctttttcgagaaccaacgaaggaacagagaacgacagatcgaattctaatgtacgccgtgagttcatcatggcaccgctgtgaatgagtgaaaccaaagatatccacaatatatccggaggagtaggatacatcatgagaatttgcccgtaaatttccagaaaaaggtcacagcaaaaatctagaagtatgcgaaccatg

SEQ ID NO: 497138 - DNA, 208 bp, Homo sapiens
gagcaagacttgtcttttaaaaaaaatttttgttaattaaatgtctttctcagaacccaagggtagaagagtgaccatgggcaaatgaacacttggattgggtttcttgtgggttttagcttaatttgcatcaactggcacttttctggcttaccgttgtgttccaccttaggcacaatcttcagctcttggcttaaagcctgggaaa

SEQ ID NO: 497139 - DNA, 231 bp, Homo sapiens
ttcagtcagcagtcataagtcagccatggagaagacagaggtttacagaggagaataatgagctataacattcagagaagagtatagagggtagggcgatgcccagttggcatgccagtccacctgtccaaatccttcacacatttcctattaggcttcttgtagattatcaagattccttgtgcattctagtatattctgtccctcgatagtcgaataaggtcttgccac

SEQ ID NO: 497140 - DNA, 184 bp, Homo sapiens
ggaacacgtggtccgacgaggcatcggtgggtcggtgacggatgacgtggacgagccccgtccatcggaaatcgggagcgtcctcggtcccatcagcccgagcacccgatgtcgaacaaggcgggacgggtccggtgaaggacgggtggtccgtttgactgggccgtccgggactacacactaa

SEQ ID NO: 497141 - DNA, 803 bp, Homo sapiens
  misc_feature (803)..(803): n is a, c, g, or t
tgccgagatgattggcctggtaatcgcggcactttgcggtgcctaagcatgagcgatcaccttggaggctcagagagttcaatggtctgtgcatgagctagatatgggatgtatccatccaatcatctccatagcccgtagaacatactgaggccgatggtagtagaccagagatagcgagatgtgatattctgcaggtcacttcagggagagtctgatcgaaagagagcaatccgcagcgaagtctcagggtaggcaagatggttgacacgtaagctgaagatcatgccattgcactccatgcctgggcaacaagatgtgggagactccatctcaaaaaacaacaaattagccaggtgtggcttgggcaacggttggcttcatgcctgtactcctagcactttgggaggccaaggtgggcagatcacgaggttcagggagttcgagaccagcctggccaacagagaccccccatctctattacaaatacaaaaaacttcacttgggcagggtaacagatgcctgtaatcccagctattcagaaggctgaggcaggcacaatccattgaacccacaaaggcggagagtgcaagtgagccaagatcgcaaaagtgactccagactgggcgaaaaggaacgagactcaggcttgaaacaatacgataagtaaataattagataaatatccaggtatgacgtaaggttcaacagattattcaatatatacttggaaaggtaaatgtataggcctttcctcaccataaaaagttaacaaggccaagggatgataagtcatgcctaan

SEQ ID NO: 497142 - DNA, 301 bp, Homo sapiens
gaagttcgacctgcaggagaagttcaagcagcagaaaatatgagatcaatgttctccgaaaacaggatcaacgataaccagaaagtctccagacccgcgggaagggctaaagtcaccgggcgctggaaatagagcctcggcctccttcaccaaagatctgctcctcgctcgcactgcctccggctgcactccccagttcccgggccctcctggcaccccaggcagctcctgtttggaatggggagctggcctaggtgggagccacactcctgcttaccccaaaccacttcacacagtatta

SEQ ID NO: 497143 - DNA, 190 bp, Homo sapiens
ttatcatcatctgattcatcttcttccttcagagattccttagcatatttctctgcttcttctcttatatctttgggaacaatttcatgtcttccattagttactggtaaattaagccacatgtgtaaatgtattttaaatttctactccagtccaatgtaactatttagccctggattatacatactgt

SEQ ID NO: 497144 - DNA, 361 bp, Homo sapiens
aacccccctttatggtttattatttttggattcatggagccctcataaaaatatttttaaaatcagaattattgataccctgtagggcaaaatggccatttttaatggataatcagaagtttgaattttcataaaacatatagcataaaaacttccaggactttgggtgacccttgtatgtcccagctttgctctatttattattattttgccaaataacccttttaacctttgataaagcatatttatggacatattttttaataaaaaaaaaatcccttttattacccttttttatttttttcaaaatatgccagttttttcctatatgttttataataaaaaaaattacatttttgga

SEQ ID NO: 497145 - DNA, 208 bp, Homo sapiens
gtggtcccaagaagcatctgaagcgggtggcagctccaaagcattggatgctggataaattgacccgtgtgtttgctcctcgtccatccaccggtcccacaaggttaggagagtgtttccccttaataattttcctgaggacaagacttaggaatgccctgcaaggagttaggtaaggaggttttcatatcagagcggtcacattaaa

SEQ ID NO: 497146 - DNA, 485 bp, Homo sapiens
attataagttattagaaacaaactgaaaaagaaacatctcatgcaaaaactggcaaattggcagatgtcctttatatacagcacgtgcaaggctaaagtcagtaagaacccagagaaaccaaagaacaggcaggttagagatgccctatatactcacacgcgatgacaaggaccatttcactggtcatcaacgtttttgtttttcgtccatcaaaatcagcatgccttaacaacactggagaaggtgtggggtgaagggtcattaagggcacgcagtagccataatgccacaccctttgtgccagccactgcgcttctggaaacctaccccacagcggtcaaccaaaagacagcaaaggcttctggcactaagctggtcacaaacgcattactaattattgtgcacatgtggaacctaccatttaagcctcctttccaaggcgaaaattcccactactacatcttgccacccttctttaacttac

SEQ ID NO: 497147 - DNA, 843 bp, Homo sapiens
gaggcgtcggagcaggcggcggggcgcgcgctcctcctccatggtgtttacccggctgcatgtgggagtttgacctccgcgccgcaaacctgcccgcctcaagttgtgcgcgccggccgccgccgccgccgccggcacggcatatggggagccgtgacttggacgacgaaggtaatacggggaagcgtctcctcatgtgatggaggatggcgtggcttggagatgactcgggagaattactctggctagtgaaggagttcccataaacgtgggtggcaaacctctggctcccagggaaaggagggggaataataaggccaagtaccaacgggtatggttggagcacggctgggtgctcaattggtggatttttccaagggggggacaaaaaacttttaactaaagtattatgaggattatggatttcttcaaggagaaagtgggaaaattttctggacacacactttttcaccacggacaataggacgtggtagcatagctgggaggcacttggaaaaacttggggtggaggtggcaaaaaggcaattttcttttcaagggcaaaaaggggaattcggagaaaaattggggcgaggaattatgactggtgtggggcaaaagggggatttcaagacctattccagaaggcgtttgaggacattaggggaacttagagggctctgggaacacaggaatttaggcgattctttccacactttaaagaaagtgtagacgataggctggaatggggacggaacaggtcactggtcttctagtacattcatgaattaggcacctggacaggtgaaaatctcagggagaggagcaggaagcagctgaacg

SEQ ID NO: 497148 - DNA, 669 bp, Homo sapiens
tggacttgaggctcccagacccccctcctagtatgcccggcttcagtcaccccgctttactttgtaccaggacccccttcccctacgctcacctgctatttattgctgttatttattgacctccaaaatgctgcataacagacctcactggggcaaggaggatcccccgggctcccaccctccacttggcgggccccctggggccaggtcgctgaggggagcctctcttacccccccccatcactagcgttccctctgccctctccccaccccgggggggacccacggttgggcactggctcattttctcgcacaatacctcgaaggggaggggggagggatggggttataactgttttgtttaaattggaactggaagagggatcatgttttgttttatgcccttccccgaaggggggagggaccacccgggagtcgcacctcctgtaactggccacccgcccgcctgtcacacttgtcaccacattgagttcatgtcccctgagaggttgtataaattcaggtcagagctgcagctacacagctgccccgtgtcataggaaagccattcccccacggctgatctctcccttcagaagtgggccgttttaaatgtacagcgataaggaactgttattttatgatcttttcattaaaagcttgattgga

SEQ ID NO: 497149 - DNA, 405 bp, Homo sapiens
ccccgtggaccattctgacaaggactccacgcggatctcatcaagctccgaggcacaccgagctcctcctctgtgataccctgccgcccacagtgcttctgctccttcaggaggctgccccacttctctagaccatctagggtctccatgtcaagacgtcacctcctcagagctactgcctaagcaccttagcttcaactattcccccaaatagtcccccaaatcctccctaccctcccctaactctcatttctcttctcgcttctctcacaagtcattttatatatttttaataatcttgtgcataaaacaaagtttgtatacaacgaaccattttattaccctttgtggaggtgtctgagggaatctgggcatgtgtggaaaagacacatcacagctggaggg

SEQ ID NO: 497150 - DNA, 1883 bp, Homo sapiens
cctcgctgatatcgtgctggtccgtagaatggttggtccggttgcttctcgcttgtcgctgaagggtcgtttcggcggcgttgtttagttgatccaccacctgggggtattttctctccggggcgagttgtgcctgcctcgagggtcatgtgttggtctagaggaagtatttgtgtcgccgaagattggtcgtctgtggatgatgttgctgtgtgtgggcgtgttggtgagctgtggagatgccgccttgatgccctgacggcacggtggtgttcattcggtgggaggggaaatcttgtctgttaggagccgcactttctcgcggaagaggatgtcttggtttctgtgtggtcccccccttggtgcgaggtggtggagcagtttgtactcgtggtgtgtgctgtgctggcaccggttggggggacctcctcgtggggtgttgtaaactttccgtttggatgctcctatacagcgcccaagggagtaggtgtattcgcctctcgcatccacgcgtggcgccgtaacccaccgtgtgtgtagttgtcgcccacaccaatggtcgcaagaaaacatttttgtgctgggggagtatataggaggacacccaacacatgggtgtggttaccaccacctccttctataagaagataattcctcaccacatcctgttggtgttatttattgtaaacattacgctggttgttggttatatgagtattgggagtgatctgtcgtcgggcacataacgttgttgtgtgtcgccctcacagaagaatattggttggggagaggataagggcccaccacctcctctgctgtggagttgtccaacaccaccgacttgctggttgtctccagcaggagtcctggtggagccctcctctgcaggagttagtcttgccagtgttgtggggatgaccacgactagaaggccctacttggcgccccgacatattattagtaccgcccctgttttgacgtcgttgtgggggaccgccctccttggtggacgattgttcttgtgcacttgttgtgttgtgtttcccaccgcgggaatatatatcgctgctcctcaacacaaaggtgatatctgcgtcctgagggcagcgttctgcaccatcatgatagatatagaaatgatatatgttgtaaacacatcatgtgtctttgggaaagggaggtactctggagggtgtgtgctccactgcgctgtgctgtgggagcatcgtgttctcacggcggtactctcacagagaagcgctttgtagtagagagagcgataatctctgtgagacacaccctctggggataagagacactgtttggtgtgtctgcctcgccacataccacagagtcgtgagtcttagtgagatatatatctgttaagactctagtgcgagatacttcgatataggcacacacacagggcgatatatgtgtctgcggtgtgtgtgagatcgcgatatatatcacatatatctatatattgcgctgggccacatagaaattatgtgggtgcgcctgtctgtgtgtgtctctgtgtggacactctacagtctcacatctgtgtcttgtctctgtctcacactcacactgtgtgacacacgtttctccctgtaatatggggctgcacctgtgtaacatgagtgtaagaatgtcgtgagcgtgatgaactcttccaatgtgtgtgttctatatatagagagaccacacacctgttgataaagagatagggggagtactgtgtgttccaaaaggcacacaattgtggtaaccggctctcgtgtgcccaagagcccaccattaccttgccagaggccccttcttgatgtgtcacacctataggcgtccttatgcctattaaattatttcgcaggtccgtt

SEQ ID NO: 497151 - DNA, 853 bp, Homo sapiens
cgcgccccccttctccgggtccgcccctcccccttctcggcgtcgtcgaagataagggggagttggccggcgagcgcctagtgtgtctcccgccgccggattcggcgggctgcgtgggaccggctgtgggatccctggccagccggccatggcgtgtggctgtactcgctggggagtgagctgtcttctccgaccagtgcgtggaggaagtacatggaggacgttactcaaatcgttgtggagcccgaaccgacggctgaagaaaagccctcgcctgcggcggtctgctgtctcagcctgtttgcctcctgctggccgtcgcctggcctgccttccctggctggcgaagtctcggggcaaatggcccatgtggttggcagcccgagaggctcgcgagcctctccctggatctgccggggccctcggcctggcaccttagccgctgcttgcctgcctgcggtatccgtcctgtggccctttttctgcccgttgtgcggactgtgtgcactggccggcccaggtgaaggcggggcaccacgtttgtggcctggggaagccacatatgatagagaggtatatccatcacaacgaaaggcaagaaggggttacaccatcgtccagagaccgggcctaaacggggatctatggccgcctgggccacattacccggcgactaaagggagcatatatccattcggcctatggtacaccccatttggcccaatggttgtgacaaccgaacacatcattgcgtcagagcacattgggcccccaaaatgcaccagtattgcacccgcggaggattcatatcaccgtaagcacacacatacaggtgtggacacaaacctggacc

SEQ ID NO: 497152 - DNA, 576 bp, Homo sapiens
ccgccggggtaaacatcctggtttccggtgtcacggcgttgtgtgtcctttcgccaccctccgtaggtcgcctcttggggcgggctatttccctacatcctaggggggctgatagcaggtccgcctgcgttatgtttgtagcccccgcgggctactacgtggcccagagtgccagatgcttcaccccttgtggaacggggcttctctcccccgcttgcgttcagcacgggtctgtttcatatcgcctcgatgacgctctcgaattactgtgtctccgcagccccagtttttgatcctccggtcctgctcacataatctcctttcattgacccgttgacacgggatccaagtctgtctcgacgtcatccccccccccactctctttgacgaagacatcttctgccccactccacattgtcccctgcgctcccgcagggcggctgatctgtgatgtccacgggttgtcatgtcccagcgcaaaaatagcgatctcccaccttgtgtatggtgcgaggctcccggggaacgtcttaattgacccctttaaaaaaagaacccacaacgccaaacatgaca

SEQ ID NO: 497153 - DNA, 100 bp, Homo sapiens
cacattgtgctggcttaaagtaattaatctgtaaatatactcctagtaatttaagatttgtttttaaactggaaataaaagatgtatagtgcatgtttag

SEQ ID NO: 497154 - DNA, 926 bp, Homo sapiens
tcctattgcagccgccgggagtactgcagcgaaaaagccggagtggacgtgtcttttgaaagtgctgctctttcacttctcaggcgtccgcgagagctcaggacccaggctgatctctgtaccattgggaacagtgacagctgatgcgtctgtgccgtgttttccagagttcctggagcatcagttgcttcagattaccaaaactgggggaggaacattgggattcctgaatttcaaacaactggatcagatggctgaggcatgacttggaacgccttagagaaaagagactccaggcactaaggaaagctcaacagtagaaacaggaatggtttctaaaggccatggggcaatacaggagaaatccctagtgaaccgagccatttcctcacgatgtcaccgcaggaagttgaacacttgtggtttgccatttctacagagaactccacattcaggtgtccaaatactaagacggacatctggcaatatttgtccacgaaacattctcgtagaccaccaatttttggaacttgctgtggacactgcacctttcttttgtgagagactgcaatatcaaaggtcatttctcatttagcagttgctaaaaagtactgggaaacaccatgatatgttgttgggggtaactggccttggaaaattgagatgactttcacaaagcacctttacgccatggggggcccggacttctgaattctcactactgtggacttacttgcgcccatatctgacctaagaatttgccacacttcacacgtggaataacttccgggcaaacacttgtccactcgaggtgtaagccctatttggagtgctaaccgcgaaacgtttacacctatggtaatgggccaacacatcgtacgcgtacctagctcgtttgcgcctttatagacccttgggggttgatt

SEQ ID NO: 497155 - DNA, 105 bp, Homo sapiens
tggtgcctcgcgtcggaatcgacagcctcgcgaggtctgggcggacccttcggacgactggacgtcgagcgtgacgccgttcttcgcgaggatcgtcttgtattt

SEQ ID NO: 497156 - DNA, 410 bp, Homo sapiens
  misc_feature (76)..(76): n is a, c, g, or t
  misc_feature (92)..(92): n is a, c, g, or t
  misc_feature (114)..(114): n is a, c, g, or t
  misc_feature (192)..(192): n is a, c, g, or t
  misc_feature (194)..(194): n is a, c, g, or t
  misc_feature (238)..(238): n is a, c, g, or t
  misc_feature (277)..(277): n is a, c, g, or t
  misc_feature (313)..(313): n is a, c, g, or t
ataaaaagcccatcactcctctagccaaaaggaaacaaaataaaaatgcccttttacttgtacaaggaagccttgncttggtgtgtttgttncttactatcccaattcttgagncctgggaggggtctgggaattggaccttagcacatttggggaaaggaggggaatagagggaagagaaatcaaaggggntngcaaagttctggctaagaaggagagattggaagaaaagcaaggnctgccccccccagatcccactcacccattcatgtggatncccactactggcggtcttagagcccataaaacctcntttcacctaatccacctgcagagccctcagagatgacgtcagccaacccagctggactgccttacttctgcctttttcacctgtatgttaaaaaaaa

SEQ ID NO: 497157 - DNA, 493 bp, Homo sapiens
  misc_feature (473)..(473): n is a, c, g, or t
caccacacctggcaagggtacctgacattctaagatatcaagacacttaatatgtgggctattagctgcttatttaaatgttgaccaaattgtctgatatatctgattaatcatgatttcacttcatttcggaagaaaaattatccatatcatttttaaagacgcaaatgactttggatttttgcatagagtacaatagacacttcaaacaatagattctaacattctctgaaacacctgagatgtttgagcgaccatttatatgggttatctatatttagtttaagaaacgcgtataggttaaaagatctgttaaaaatggtccatatctgtaaaattgtctcaaacgattaatatattgttcgtcgtcgttttttcttcatacgttatctagttatgcagcactggaaacagactgaagatcataaaccagttttatcagacctatgtgcaataaagcctcttgtttgtgncatgtggagaaaaaaagagg

SEQ ID NO: 497158 - DNA, 651 bp, Homo sapiens
ggggaaatagtttgcagataatggaggagtaaccctacaactatatgtccttagttcttacagaacctcatagtttgagaacaagagctgatgcaactgtatttatacaaatatgaactttggtccagaaaaataacattaacctcattgtttatggccatgctttgtgcataatcaaagtttatgattacatgtaaggaagtggtatctagtcagtccataaagattgtgctaattctgttcgtggaaaagtagccattagttccaggaaactcagtgtctgccttcagatgtcattgatgtttctcctgtgtggaaagctgatgtgtccagctcaacctttgtgctgacatcataccatttctgatcatgaaatattggctactggtgtatgtagcagttcttaaatcagcagtattcatgagaagagaaaattgccccctcattagacactgttgtaacgaaatcttctttaatacaagtagacaattctgtcagactacaaatgtttagctgttactcatttctagggaacgaaattctaaagtccctccttcactttgagcagtgtcctaatccggactcaatggaggagagtagttttactgctgaaggtaacttaaatttgagactatgtagtcatgtgaccga

SEQ ID NO: 497159 - DNA, 179 bp, Homo sapiens
  misc_feature (90)..(90): n is a, c, g, or t
  misc_feature (92)..(92): n is a, c, g, or t
  misc_feature (103)..(104): n is a, c, g, or t
ctaattatgtttttagacacttagaagttattgaggactttaaagagcttttgtttatttgggttaataccccccgacatttgacgttgnancaaaaaaatannatgttatcttttaatttatgttaaaatagcattaataaatcagttataggttaatgtagataggatgttttgtga

SEQ ID NO: 497160 - DNA, 813 bp, Homo sapiens
agcggaccagggtcggccagggcgcgctgcggatacaccgggacgccccctcagccgcgacagtaacggcctccggccaccaggggcggccaggcgcgctgcggatacaccgggacgccccctcagccgcgacagtaacggcctccggccaccagagggcggccaggtcgcgctgcggatacaccgggacgccccctcagccgcgacagtaacggcctccggccaccagggggcggcacacgggcctcaaactgtaaacggctccgggcttcggaatccgggcggggagcggagagcggttcgcaaaagccagttggttgcccggatgccgggcatttgtccacgggaatccgcggccacaagcgggcgtacgacagaccacgcgcaaacagttcgctcctttctttgcatgaaagctatatgcatctagtgtgacggattatcctaacctggagactgtctttttcagctcggcatcacggggggcggggggcggtgaccccccatcccggttcccggggggcggtgacccccatcccgggttccccgggggagcggtgaaccccgaattacagggttcccgggctttcttctgcatcagaccgggttcctgggcttcccctttcgtggtttaaattcttccttcggggttcacacacagggtccacgtccggggggtccctggctataccaaacattaccttcctccctaatgttgaaaaccgggttctccacggagaagaaccttggccattccgaagttttaccagcctcgggcaggaattcgtacatgcactttttttccagttcaag

SEQ ID NO: 497161 - DNA, 466 bp, Homo sapiens
gagaaattgcgtgaccggacagacagttgctcaggaagaaacagccccaggatctggagagtgaatctgaccagacatggatggggccacaccccatcccccgatttcaaaaggcagctgctaatttctgtccactttggtggttcccttccctgaccacccaggagttagccctgtgtgcagataacgtgattcccatcttaacacataaaccgcatttccccgccgaggacagagcccctctcatcactgctctatccctgacctggaagacagcagcaccccaggtttaaagagaggtgaagactagggcgatcctgagagatgacgtctaaagcatctcccgtgggtccctgcaccagtcgtgcactcccggcaaagtctaggctcacagttactgtccacagtgacagaggcattcccgtcctctcactcctcactccccaattcgctcatcctttggagg

SEQ ID NO: 497162 - DNA, 211 bp, Homo sapiens
agctcgcaccgctctcgtgaacttccgtgagactcgtacaccatgctcatggcaatggcagatccttaaccactgagaaaggccagagatcaaatccgcatcctcatggatactagtcaggttcttaacctgctgaaccacaacaagaactccctagtctctgtcttttgattagagaacttaatcctcttacatttaaagtaattcctgg

SEQ ID NO: 497163 - DNA, 417 bp, Homo sapiens
tgggaacatcctatactgcacaggagaatccttggaacaatccgacatatcagctgtgccaagattgagaaaccctacatcgaagaatactggccctacagaaacactgaacagacacatgtaattcacaaagggaatgttattaatacagctacctataaagaaataccaaggaagctgggcgtggtggctcacacctataatcccagctatttggctgattcaggcggatcaactgaggtcaggagttcgagaccagcctgaccaacatggagaaacccagtctctacttaaaaatacaaaattagccgggcgtggtggcagtcgcctgtagtcccagcaactccagaggctgagacaggagaatcgcttgaaccccagaggtggaggttgcagtgagctgagatggtgccactg

SEQ ID NO: 497164 - DNA, 535 bp, Homo sapiens
  misc_feature (469)..(469): n is a, c, g, or t
  misc_feature (483)..(483): n is a, c, g, or t
aagtgcagctttgttacatggatatattgcgtggtggtgaagtctgggattttagtgtaccatcccccaagcaatgtacattgtacccataagtcatctctcaatcccccatcccccatccttccacgcctccagtgtctgtcattccaccttctatgtccatgtctgcacattatttcactcccacctacaggtgaggacattcggcgtttgactttctgtgcctaagtcatttcacttaagataatggcctccaggtccatccatgttgttgcaaatgacaggatttcattcgttttgaggacctagcagcattccgtgtataaatgcaccacattttctttatccagccatctgtttatggacactcaagtcgatccctgcaagaactaaggcatgaaaggtgggagaaaggaagactaggcattttttgggatgcctactgtgtgacaggtgctttcacttggcntcctcatttaaccntttcaggcaatccactcagtaaatacctggggcccgatggcgggtttcatga

SEQ ID NO: 497165 - DNA, 444 bp, Homo sapiens
cataatctcgaaaaactggaaggagaaagacaagaggctcaagacatgcttaatcactcaaaaaaaaaaaaaaaaaaaaaaaaaaaaactttgggggcggccggaggaccctggaagaaagctttctataacaacaattgtgggtgtgggggccgggggccccccaagatgggttaggtggaacaagtgggccaaaaaggggtgacacatagaggagaaatcggggaaaggagaaaagagggggggggaatttcttcacccaaattaaaaagacggcccgggggggggaaaacgaggaggcggtttgtgagaaaacaaacttccaaaagggggagttcagggaggggggcaaaaaagggggggactaattaaaaaccggggggacgtcccaaagaggagagccgaagaaatttaaaaattttaagcccccgagctcgggggggg

SEQ ID NO: 497166 - DNA, 970 bp, Homo sapiens
gatataagagatcgcgcagagtcattgactccttgtgtcgtcctcttatggtacttcccgcgtgttttcgggacactccttgttggccccgaggacataacaaacgtgggcactaaaaattttggcgggggcagaaaatattaaaaatttgacagcacgtgtgctcgacaaccaacacatttccgcggcccacatccaacaatctgtcgcccttgcaggcctgggtttttccccggccaggatcttttggggtaccaaggcctccccccctaccccgtcgggtttagggaagcccttgcgatttaagccttgtgtccccgccgccccctttgcacctgctcgcctggggaagaagacgccggtcttctcccctaggggcgccaacacggagtcatgcccccgatgggcgccacagggggccttgtagtagacccccttcggggcggccgccagttggtgatttcaacacccgggcgttttcttacacggacctcccgcggagttccttagtccttcatgagatacttcaccacctctcgcccccgcttcatacattgttccaaggcaacttaattggcgagactctgtactatgcagggagcccgttgttgtgcgtggcaatcggcccacccccggggatgcccccccctctctgactcgaaatcccctgtgaaggttttttttgtcaaaaataaagaataggtgtgacacacagacgaaggagaaaaccgcggtatgtattgtaaacagatggtgtccctcgcagagcttgagtggtcaagggcacattccactctccacgggccaccaactgtctacacccataggtggatcgtggtagctaaccagggttgggcgggcaaattggatcgcaggacctccacctctccccgcgccccattcctgaggcttccaaggcctgattcttccccaaaaaagtttttaacccggctttcgccccaaaaaaaca

SEQ ID NO: 497167 - DNA, 221 bp, Homo sapiens
ggctgagcagatcctgtctcaaaaagaaaaggtgcagccactgtggctcacatctgcaatcccagcacctcgggaagctgaggcaggcggatcacttgaggtcaggagttcaagaccagcccagtcaacatggtgaaacctcgtctctactaaaaatacaaaaattagctgagcttagtggcatgtgcttgtagtcccagcccctcaggactctggggtag

SEQ ID NO: 497168 - DNA, 800 bp, Homo sapiens
  misc_feature (43)..(43): n is a, c, g, or t
  misc_feature (94)..(94): n is a, c, g, or t
  misc_feature (114)..(114): n is a, c, g, or t
  misc_feature (152)..(152): n is a, c, g, or t
  misc_feature (155)..(155): n is a, c, g, or t
  misc_feature (159)..(159): n is a, c, g, or t
  misc_feature (218)..(218): n is a, c, g, or t
  misc_feature (227)..(227): n is a, c, g, or t
  misc_feature (298)..(298): n is a, c, g, or t
  misc_feature (333)..(333): n is a, c, g, or t
  misc_feature (379)..(379): n is a, c, g, or t
  misc_feature (382)..(382): n is a, c, g, or t
  misc_feature (386)..(386): n is a, c, g, or t
  misc_feature (400)..(400): n is a, c, g, or t
  misc_feature (441)..(441): n is a, c, g, or t
  misc_feature (447)..(447): n is a, c, g, or t
  misc_feature (459)..(459): n is a, c, g, or t
  misc_feature (472)..(472): n is a, c, g, or t
  misc_feature (484)..(484): n is a, c, g, or t
  misc_feature (549)..(549): n is a, c, g, or t
  misc_feature (575)..(575): n is a, c, g, or t
  misc_feature (592)..(592): n is a, c, g, or t
  misc_feature (617)..(618): n is a, c, g, or t
  misc_feature (621)..(621): n is a, c, g, or t
  misc_feature (682)..(682): n is a, c, g, or t
  misc_feature (764)..(764): n is a, c, g, or t
gcgtgcagaggtgctcaagcctcctcgcggtccgcagtcattnccgccgcgccctgcctcccgcacgccccgcagttagcgcccccgctccgcngcccagtagttgcgctcgcnccggcaccagctcccggataaacggcgcgccgcgcggnagnatgnacagccgcaggagatgaaggctgaccgatagcggggcgcagtcggcgccgctgcccatngagggagtngacatcatgccccaatacaggacgaaggcgttctgaaggtcatcaagatatagggcacaggtacagatttnccctttttttgggtaccgattttttgttccattanatggttggtttttatgttggcacataatttgattccagtctggatngcnaggncaaattctcctttnacctgggaaaatgggaggtcatcaaggcttgggacatttcnatatcnaccatgaaggtnggggatgtgtgcnacatcacctgcnaaccagaatatgcctactgttcatcaggcagtcctccaaagattccccccaatgccacgcttgtnttttgaggtggagttgtttgagtttnaagggagaagatctgancggaagaggaaagatggccggaatnnttncgagaataccagactccgcggtgaaaggctatgctaagccccaatggagggtgctatcgtnggaggttgcactggaaagggtactacaaggacaagctctttgaccagcgggagctccgctttgagattggcgagggggaganctggatctgccttatggtctggagagggcattcagc

SEQ ID NO: 497169 - DNA, 83 bp, Homo sapiens
ttatcttttgtgtataaatctcaaaatatggaattttggaatatttctaccattatataaatatttttaaaggtaaaaaaaaa

SEQ ID NO: 497170 - DNA, 407 bp, Homo sapiens
cggagaggatcccaggcactagcgtcatggcacgtgttattagattatattaacagagaagatcctttcaaaaatatctggttaccgggggctgggagtgcagtgacggtgatcacggctcacggcagccacagccttccagctcaggtgatccttccacctcggtgctccccacccggaggggctgggactacaggcatgtgccaccacaccaccaggctaggctaagggttggtattggttggagagatgcagttgccctaagttgcttaggcttctttggacctcttagactcaaataatctggcctggcatgggtctccccaagtgctggaattacagggccatctaaatcttttatctcaggttggccttgtgacaaagggtggggtactttttctgacatg

SEQ ID NO: 497171 - DNA, 153 bp, Homo sapiens
ttctgtggtcctatgtgctcctgttgtgtgtgttggtggttgtctccctccagaaccttcactgtgcggggcgcaccgcaaagcggaggctgtcatggctgcagttgctggggtgcgggcgcctttctctcttgggtgcggccttttccctcc

SEQ ID NO: 497172 - DNA, 140 bp, Homo sapiens
tacgatctttaccatccggccttacctcggtaccttacctcgtgaccttaacctcggagccttaacctccggagccttaacctcggagccttaacccttcgacttcaagtctcgttgaatatttgtactaccaccaagat

SEQ ID NO: 497173 - DNA, 521 bp, Homo sapiens
ggctgacgccattttaggccttagcctgcctgcgacccaggcgctcattaaaacagcaggttgctccacactgcctcgtgtggtctagttggcgacacatctcaatgagtttgaacggatacaagaatctttcatctggtgccgaaacccgggaggggctccggtcttcgtcccccgtgtacttacccgttcccgccccaagaaaggcaggccacagagccggacaaaggaagctcctcagcctccagttgcttctctgtgcatgcacatcaggcactgatctcacctactgaaaggaatgacaggattctccccagggcctggaaggcttgaaggaatgaataacgtcgctcccttctcaggcccgagtcccgaaggcgcgaaggccactggtgccaggaggtgagtcagcgagatagcagaagcaggaagagagccggccagaagacacctactcggacggggagacacgtgacccctgaagatgagaaagaggcatccaggcagtgaagatggaatga

SEQ ID NO: 497174 - DNA, 250 bp, Homo sapiens
  misc_feature (155)..(155): n is a, c, g, or t
  misc_feature (189)..(189): n is a, c, g, or t
  misc_feature (206)..(206): n is a, c, g, or t
  misc_feature (220)..(220): n is a, c, g, or t
gccgagattgcaccactgcactccagccctggcaacagagcaagactccgtctcaaaaaaaaagaaaaaaaaaacacagctgcctactgcttgcaaccaagctgtagctcttattaaagtaaagagaagagagccctggagaccagcagaaactngacatttgaagtcaggcctctacctcctgagctngagtcagcagcctgggntcctccaatgaatnattcccatctttacttgccctcttccgatt

SEQ ID NO: 497175 - DNA, 414 bp, Homo sapiens
ctcggaacgtgttatccctgctagctggacccagttagcaggtagaacacgtgtgttgcgatgacagactatgccaagataggtaatggatggagaagaaatgtgggcttatagagggggatacatgattcccctttgagaatagatgttgaaggagcaggagggtatcctgtggggaagattcataagaggggatgcagaggagaaggtcgtccacatattgaataaggtgagaaacagatggagagaaagaaagtaaatcatgagaaagagcttgactaaagtaatgggggttgtctctgaagccttgtggcagtacagtccaggtaagttgctgagattggtgggtgacaggatcagtccatgtgaaagcaaaaagaggtcgggatgaggggtgcaaggaatagtgaagaa

SEQ ID NO: 497176 - DNA, 728 bp, Homo sapiens
agtgatctatcaagctagccaggctcttaactgctgtgtggatgatgaacatggaacagggtccctagaagaagctgaagcagaaagagttcttctaactggcaactgggaagagaacactttgattgatgaattgcataaattgaagaacgaagggcctcagaggaagaataaggctagttccccagaagtgaatttatgccatccaaaggatcagttacttgtcagaaatccgcttgcctctaaaagcagattgtcgtctgcagtacggttcagaaagccagatgcagcagattactatgtacttaagtcatactaaaagcaggagctgaaagatatggtagccacacgcattagcaagtacttcaagactctcttaacggctgattgctctgacacttcactactacatttactctgcaaggatgtatccaatgacttccgaaatagctatcgaagtcttacagctgtggctgcttccagaaagatccctcaggccttgcttacgacagacccaatatctcacgtcacaaggcttatcacctccaacgtgctgactccttcacattctattgtccctcactctgctccagcttcactccttccagcccatggctcagctcctgcgaggtcccagctgtccgctgcgactgccagccaacctcccgccccttgtgttggccctccctgcacattgttcctcgcccttcccgccgggaccaccattc

SEQ ID NO: 497177 - DNA, 547 bp, Homo sapiens
catcccctatgttgtcctgccctgatgccgctagagcagagatggcaggaaggacgtatatgtttatcgtattagacagctaaagattcctgttagcagcaccacgaaggccagctcatagggtgacagtatcacagatgcgtttatgtgcctacagttcatggactccttgcatcagcgtgcagtcgactggaacgtctctggccttgaaaacccctgggcgccaaggttgcagtgagaaagcgagaagtgaacgcgaacccaggtctatcagctccaagctcctaactggcgggccacttgacgtttcctcaggagtgacatgcggaccgcctgcaagctacacagcctgggtcggcccggggtgaccacccttcgggcttggcacactctgaggtggagcaggttggggaagagctggagctggggacacagccttgcccgtgggtgggcagggcctggtgggctcaggggccccaccggctgctcaatgaccctcagcaccgtccgcttgatgtcggcgatggcttcagtgtacacgggcgcc

SEQ ID NO: 497178 - DNA, 560 bp, Homo sapiens
tggttgaaagacaccagaagatttagaatattccataaactgagttgacaaagcagcagggtttgaaagaaatgacaccaatgttgaaagcagttctactgtggataaaatggtattaaacagtaccgcatgctatatgaaaatctttcatgaaaggagagtcaatccatgtggcaaacttcatcatcttattttaagaaactgccaggttgggcaggcgcagtggctcatgcctgtaatctcaaaaaaaaaaaaaatggccaggttaccccaaccttcagaaaccaccacactaaggggtgagcagtcatccacatggaggcaagacactctaccagttaaaagataaggactggctgaaggctcagatgattgttagtactttttagcaagaaagggttttttatttaagatgtattcatggttttcttagacataatcctatggcacttaatagactacagcataatgtaaacataacttttattttattattattattatttttttttgagacagactcttgctctgtcgtccaggcgggagtggagtggggtgaa

SEQ ID NO: 497179 - DNA, 332 bp, Homo sapiens
  misc_feature (28)..(28): n is a, c, g, or t
  misc_feature (161)..(161): n is a, c, g, or t
  misc_feature (175)..(175): n is a, c, g, or t
  misc_feature (216)..(216): n is a, c, g, or t
  misc_feature (262)..(263): n is a, c, g, or t
  misc_feature (287)..(288): n is a, c, g, or t
ataaatgtcaggaatgtgggaaagcctntgatcgcccaagtttatttcagatacatgaaagaactcacactggagagaaaccctatgaatgtcaggaatgtgcgctttcatttctcttccaagttttcaaagacacatgattaggcacactgggagatggnaccttataaagtgntgcaggaagtgtggataatagccgtttgacgcgctcccagnttctatttccgagagtacagtgagaaggaaactccatagcatgganngagaataccccgaatgaagtgtannaacagtgtagggacaggccccttcatttgcgtttcaacaaattt

SEQ ID NO: 497180 - DNA, 161 bp, Homo sapiens
gcccttccccaccactaacggaggaaacaagttggctcgggatcccgggacgcagggcaccagcagtccctactcttcccgggaaggatcaatctgaagtccccggcggcaagaagagaagggtgctcgagccgccgccatcttccccaacggaacttccc

SEQ ID NO: 497181 - DNA, 116 bp, Homo sapiens
aggagcgttgctgtctcctttctcccgccaatgggtgtgctcgcccacctgaataatcgggtgtactccgaaaaagggggggaggtcaatctggcaaaaaaatgtcacttttgcct

SEQ ID NO: 497182 - DNA, 1094 bp, Homo sapiens
  misc_feature (140)..(141): n is a, c, g, or t
  misc_feature (143)..(143): n is a, c, g, or t
  misc_feature (176)..(176): n is a, c, g, or t
  misc_feature (253)..(254): n is a, c, g, or t
  misc_feature (268)..(268): n is a, c, g, or t
  misc_feature (336)..(336): n is a, c, g, or t
  misc_feature (401)..(402): n is a, c, g, or t
  misc_feature (432)..(432): n is a, c, g, or t
  misc_feature (490)..(490): n is a, c, g, or t
  misc_feature (494)..(494): n is a, c, g, or t
  misc_feature (553)..(553): n is a, c, g, or t
  misc_feature (574)..(574): n is a, c, g, or t
  misc_feature (632)..(632): n is a, c, g, or t
ggggaagcgacgagtccgggacgcccagcgcgggcccggagcagtggggaagggaatgtgctggctcggtctggcgctgggtggatgggggctgtgatggcctgccctactggtgtgccgtctgatgggacggcgctacnngntcccacgctaggccaaacgcctccggcggccgngccctgagagccccttcacctgcagggctgacccagccggcgacgctgtgaaccacgccctcagcctgccttgccanntgcccccagcctgngcgccccagcaccatgcggcgccctgcgcacggagccccgagggacatggggcacccgcaggcccggnccctagcaccgcctgtgccggccccgaggtccgggacgccggctgccgccgcggagagggcaccnnggccgacgcctccccccagggtcagctgcngggctcccaggcctaggcgcccatgacccctacgccaacagccgcctggacaccgccngccngccactgcgacctagcgccgccgccgccggggcccaatgccggtcatgcccattccgcnggctgggtgcgctccttccancgtggccgcacaccaactgcgctgcatgctggcctgcgggcccgtgcgcgcctcccanctggcccggaccaagtacaacaacttcgacgtgtacatcaagacgcgctggctgtacggcttcatccgcttcctactctactttagctgcagcctgttcactgcggcgctctggggtgcgctggccgccctcttctgcctacagtacctgggcgttcgcgtcctgctgcgcttccagcgcaagctgtcggtgctagctgctgctgctgggccgcgggcgcgtgcacttccgcctggtgaacgagctgatcgtctatggcatccacgttacaatgatgttggtcggggctgggttggtggatcagtgggaccgtaggagacattgtaaggggcggtggttggagtttagtggtatcgaccgggcttagggtgaggttactccaatgggtgggatggcagggcatcgcttgaaaaccaaggagacaaggtacgagggacacaggggagagaaggggagattgag

SEQ ID NO: 497183 - DNA, 1121 bp, Homo sapiens
  misc_feature (459)..(459): n is a, c, g, or t
  misc_feature (517)..(517): n is a, c, g, or t
  misc_feature (521)..(521): n is a, c, g, or t
  misc_feature (580)..(580): n is a, c, g, or t
  misc_feature (601)..(601): n is a, c, g, or t
  misc_feature (659)..(659): n is a, c, g, or t
cggtgctcacgcggagttggccggggcccgttgcgtctctgcggcccgaggaaacagtgcctgggtccatggtgcctgggcctgagcgggcgtctgcagaaacgcagggacccggatggagccgcgggccgcgagaccctgctgtgggacacatgctcctgccgagtcagctgtttgatgtggcacctgccatggcctggggtccctggcctggggcgagctccagtgccaatggcctggccttaaatagtggcctgctctggcccctgcaccccgtggaggagcctggtgcggagtggacgagggcgatggtctgggcccctgcgggcacgggagggtcagtgcggccccggcccctccctcctccgccctggccatggtccccacggcatgggccccaggctgaatctgaagattatttcgtgcaaggcccgacgcctccccccagggtcagctgcngggctcccaggcctaggcgcccatgacccctacgccaacagccgcctggacaccgccngccngccactgcgacctagcgccgccgccgccggggcccaatgccggtcatgcccattccgcnggctgggtgcgctccttccancgtggccgcacaccaactgcgctgcatgctggcctgcgggcccgtgcgcgcctcccanctggcccggaccaagtacaacaacttcgacgtgtacatcaagacgcgctggctgtacggcttcatccgcttcctactctactttagctgcagcctgttcactgcggcgctctggggtgcgctggccgccctcttctgcctacagtacctgggcgttcgcgtcctgctgcgcttccagcgcaagctgtcggtgctagctgctgctgctgggccgcgggcgcgtgcacttccgcctggtgaacgagctgatcgtctatggcatccacgttacaatgatgttggtcggggctgggttggtggatcagtgggaccgtaggagacattgtaaggggcggtggttggagtttagtggtatcgaccgggcttagggtgaggttactccaatgggtgggatggcagggcatcgcttgaaaaccaaggagacaaggtacgagggacacaggggagagaaggggagattgag

SEQ ID NO: 497184 - DNA, 237 bp, Homo sapiens
cacactagagtatcccctgtattgctggtgctggcatacctaggctactaacagaccgcaacgttaaaattaccttttttaaccccgcgggaagaggacaccggatcctataccaacacctaaagggaactacccgccaacgagaacttgagattcttaccccaccatgcttgggaccagaccaccataaaggcacttactgctacggacaaaacgaaccctagggacacctatgca

SEQ ID NO: 497185 - DNA, 126 bp, Homo sapiens
ccaagaggtgaatagagagtagacacctgaacaatttagtgattctgcaagggcaggtgatgatttaaggggttccgtatggtctcatctggtgttcaaaacaaaacagtcatgaagtcttggtgc

SEQ ID NO: 497186 - DNA, 833 bp, Homo sapiens
ctcagtggcttatgcctgtaatcccagcacacgcctgtaatcccagcacacgcttgtaatccagcacttggggagccaaggtgggaagatgccagaagccaggtgtttgagaccagtctgggcaacaaagtgaggcacccatctctgttaaaaatttaaaaattagccaggcacagtgatgtgcacctatagtcccagctactccagaggctgagacagggagatcatttgagcccaggagtttgaggctgcagtgagctgtgatagcaccactgcactccagcctgggcgacggagcaagacactgtctctaaaaaaaaaaaaaattcatcaatcctccatctgtgactcggcggcttactactggtatgtgacctgtggcaagttacttatcctatctgtgcctcagtttccacatctggaaatttcggtaatagtatctattcataaggtggctccagattgtacccccatttacttacttagaataatgtgtgtcccatactaggctgtaaatgagtgtacgctatgcggcatatcataatatgctctgcttataaaacccagaagttaaaagtccggttcacctgttacagaggtagtacttcccccgcggtttacggggagtaatcggtaactaacaggcacgcgggactaccttgggaccggtgacgcaattcttgcatatgggggaccccttggctagataatttccaaaaacacacaaaaaaattttggcgccgccaagattaactcctggcggcccagaagaaggcacgccagacgcgaagggttcacaaagcggcggctgacacaggcgctcgcaagcggcc

SEQ ID NO: 497187 - DNA, 409 bp, Homo sapiens
ttcaatcatctagctaatggtcagtcttgtctcatctctacttgcttatttttaaacaaatgctactatcagttcaatatatagttcagaattctctctacagtgtttagaagaaaacatgcatattacacgtagcacaacagcacctatgagtaattaattttaatgtcagatattcagacagatatcaaatttccccagttgtaactcactacctcccacccccatgcatatgtggtataggttgttggagtcaggatccaactcacgttcataattcattgataattggttacgatcgataactgtcacgcttataaactccccacctacctcttcttagagctcactagaagagaaacttggctttttatacattatctagagaatcttttgctgcatcacggtc

SEQ ID NO: 497188 - DNA, 180 bp, Homo sapiens
cgggcacagtcggtggtttgtcgcccggcgagctgcaggacgcacggtgccgggtccccgcgcagaggatcgctggccgggccgggggagcggcgctgacaccggcgctgtccccgcaggcagccggctgcgcatggcgacacctgatgctcgccgagggctaccgctggtgcagaggcc

SEQ ID NO: 497189 - DNA, 966 bp, Homo sapiens
  misc_feature (390)..(390): n is a, c, g, or t
tcgagacctgaccgtcatacttcaaggagcagtttctggacggagacgggtggacttcccgcgtggaatcgaagtccaagagcacaaggtcaggattttgggcaacattgcgttctcagttccggcgagttctacggtgacgaggagaaagatcaaggtttgcagacaagccaggatgcaggctgtttatgctctgtcaggccagtttcgaggcctttcagcaacgaaggccagacgctggtggtgcagttcacgggtgaacacatgatgcatgagacatcggactgtgcggggcggctatgtgaagctgtttcctaatagtttggagccagacagatcatgcacggagactcagaatacaatatcatgtttggtcccgagatctgtggncctggcaccaagaaggttcatgtcatcttcaactacaagggccagaacgtgctgatcaacaaggacatccgtagcaaggaatgatgagtttacacacctgtacacactgattgtgcggcagacgatacctatgaggtgaacgattggaacagccaggtggagtccgggtccttggaagaccgcattgggacttcttgcaaccaaggaagatcaaggagtcggagggttaaaaacggacactgggatgtgcgggccagattgaatattccaaaacattccaagttggggactgggcgaagcccgagaaatattctgacctgatgtataaaagcccgggctggggcaaacacatggcgggcacagtggtgggcccccgtggatgtaaaacacgcgtaaacaggggggtggggcaccggagctatgaaaaaccagatcaaaggaggggaggacacaagaagatgagaccagaattcctacccagcaagttatcacaaataatcaggcggagcacacagtaaacctttcgactcagaagtgcacaccccagaaacagcttcgggatggcagcggacacat

SEQ ID NO: 497190 - DNA, 374 bp, Homo sapiens
  misc_feature (91)..(91): n is a, c, g, or t
atgagaacccatctcaaaaaacaaaaacaaaacaaaaaaaagaagaatgagtctttgcaccaatcccaaaggtgatgtgactctctgtgtnacctggtctctgctcacaggaagaatcgtgacctttcacagcatatggttgatttttttcctgagagactataaatcatgatgaaatgttttgggaatatttttggtactttaaattattgtagaaatttataaatgtgtcggattttggccaaagtggcttaaactgtaatccaaacactttgggaggccaaggtgcgcagatcacctgagggtacgaatcgaagaccagcctagcctacatggtgaaacccagcctctatgtcagattccggggatcctct

SEQ ID NO: 497191 - DNA, 206 bp, Homo sapiens
  misc_feature (91)..(91): n is a, c, g, or t
atgagaacccatctcaaaaaacaaaaacaaaacaaaaaaaagaagaatgagtctttgcaccaatcccaaaggtgatgtgactctctgtgtnacctggtctctgctcacaggaagaatcgtgacctttcacagcatatggttgatttttttcttttatttcttactttttcctgcaggaaagatggtgaaatattaatgaactaagt

SEQ ID NO: 497192 - DNA, 105 bp, Homo sapiens
tgtggatcgggggcacgaggagggctgcgaggccatcagcttcctcctgtccctcatctgacagtgctggtcctctactgcgggagcctggctgggcaaatactg

SEQ ID NO: 497193 - DNA, 335 bp, Homo sapiens
ctctgaggatcccgatgtatccccaacaccattaaaaatacaaaaattagccgggcgtggcggtgcgcgcctgtacatcccagctacttggcaggctgaggcaggagaatcactcaaacctgggaggcggaggttgcagtgagctgagatttctccactgcactccagcctggtaacagagcgagactccatctcaagaaaaaaaaaaaaatccccatttaatgtccttaataaggggtggtacatttattacatggatttatgaagggactagggtagaaattgcagaagggaaaaggttcccatctggtgtggtggggcgataccatcggggt

SEQ ID NO: 497194 - DNA, 452 bp, Homo sapiens
atatacaagatcattactgtatatgagagctgcagtgtggctataatcatcctctagttgtgtgatccaccgggggtgctctatatacgctgcacgtcgcgtatagagagcgctctgactggtacacgatgctttacaacccaagtccagattacgttaccacagtacactggactcatgaagccggctacccactatataccattgtatttatctattacgcattctgctatggtattaatgatgctgctccggactcttctggtgaagaagattgcatgtgggttagggaaatctgatcgatctaaaagtatttatgctgcactttacttcttcccaattttaaccgtgcttcaggcacgtggtggaggccttttatattacgccttcccatacattatattagtgttatcttaggttactctggctgtgtacatgtctgctactgaaat

SEQ ID NO: 497195 - DNA, 327 bp, Homo sapiens
tagtcggtacctggtacgggagtggtggctcacgcctgaaatcccagctcttgggaggctgaggcgagcggatcagttgaggtcaggagttcaacgccagcctggccaacgtggtgaatccctgtctgtactaaaagtacaaaaaaattagctgagcgtggtggtgcgtgcctgtaatcccagctactcgggaggctgaggtgggagaatcgcttgagcccaggaggcggaggttgcaggagcagagattgcgccactgcactccagcctggatgacagagtgagacccaatctcaaaaaagaaatcgtttcccactcccgtaccag

SEQ ID NO: 497196 - DNA, 156 bp, Homo sapiens
attgctggtgtgagtgtaagccaatatgaagaacaatttgtaacactatttactctgacaatgaagttctgttcatcatcttttccatttgagtacgcaagtcgaatattggtatttaaaggaagcatctgctttagttgcatcattggtcgacgc

SEQ ID NO: 497197 - DNA, 514 bp, Homo sapiens
ttggtgtgctgagcgccggtcccctggacccactgttgtttctctatactttgtctctgtgtcttatttcttttctcagtctctcgtcccacccaactagaaatacccacaggtgtggaggggcaggccaccccttcagtgagggaaagaatcagtgcctaataaatgtaggcacctaccccacactccaacttgtgctgtctgaagccttgggcacaatgggcaattcgtgagagtaaggaagtggtggggagggacaagagagagaatcatgaggaactgtgcttagttttgggaaggaggcagccccagaaaagggcactcctccccgtgggcttggaagtgtcactttttacatgacagtgtaagatatttggttgaattgtgtgtgtgtgtttgtgtttgcatatatgtctatattacatgtacatgtagattatatataatatacaatgtactttttccacgtgtatgtataatcaacaataaaatgttttaaaattgagattataaa

SEQ ID NO: 497198 - DNA, 584 bp, Homo sapiens
ggatggcctggccagcacggggaggagcctgggcgagacccatatcgtgctctacggtgacgcggaggagccttacaggagtgtgggcgagctccccagcaccgtggaatcactccagaaggtgcacgagcacgtgtacacgctgctcagttaggaccaagcccaagccgaccgagtgtctcctcaggactttctggacagactttcttctctagacaacctgtaagcctcagtcagccaagtggaggcggacttgaaaatgctcaagactgatgaggacagtattgttgcatactctgtcaaaatagaaaccaacgagaacaatcttgtatcagccaaagggttactagatgacctgaggaatgaactggataggtgtttgtgacagtggggaagattcacgaaaaggtctcaatgaattgtgtgtgagggcagcgctttaaaagccaaatttttatgaccaaaaatgtgagggttttttccatgtgtccactaaccccctttttggaaccttcttgagggagttgtgacaacctgacaccaaggcattggggttattattgccaggttacttatttaccctt

SEQ ID NO: 497199 - DNA, 359 bp, Homo sapiens
  misc_feature (315)..(315): n is a, c, g, or t
gaatcatttgagcagcaccatcttaattggctcattaacatatttgtgaccaggcacagtggcgcatgcatgtagtcccagcacttcgggaggccgaggcgggcggatctcttgaggtcgggagtttgagaccagcgtggccaacatggtgaaaccccatttctactaaaaatgtaaaaattagctgggcttggtggcgcgcgcctgtggtcccagctactcggaaggctgaggtgtgagaatcacttaaacccgggagatggaggttgcagtgagcagagattgcgccactgcactccagcctagggtggacanagaatggagacgtccgtcttaaaaacgaaaaacaaccatatttt

SEQ ID NO: 497200 - DNA, 103 bp, Homo sapiens
gaaacattacacagactgggcagatactttgtgaagtcatggatgcctatgctgagcacaagttacagttctgggcagtgacatgctgaaatccctgggctgg

SEQ ID NO: 497201 - DNA, 247 bp, Homo sapiens
accctatacactatacagcagatcgcgtatactgtagcctttaaattacttaaaatacctaacacaatgtaaatgtatagtaaaactttacacgctgttaaactgtatttttaaaattttacattctttttttcttttttttcttttttctattttggatctgtggttggtttaatctggtggagctgataccacctccccatttttttgtcccttgggattttacaattttttatacctccatttt

SEQ ID NO: 497202 - DNA, 572 bp, Homo sapiens
  misc_feature (329)..(329): n is a, c, g, or t
  misc_feature (455)..(455): n is a, c, g, or t
gcagcctgtgagccatcgagcaatagctaaattctaggcatgagtgtagtctcatgataaggagcttggggctgcaccaaggggagaacattctcctcctgtcattctcctccgtcgtctcgtcagatgtatgaaaatatgcctgtgtatcacagcaacaatggtacaaattggatggttaagcttaatgattccgattcagacggcagtatttttctgctgtcatgagtcccttggcataagtgtggagtgtcgtgatacaggtccacgtgaagacgaggaaactgatgtacttggaagtcgcctcgtttctggacctgctttaccgnagtgaggccaggacattactcgtaccaaggccgttatctgtgctgctcagcgttacacacgccagttattccttgtcctcccttttggggggggggccctttaaaagtttatcccaatgctgtggngcgttcatacaagacaagcttcgaatctgcactgagctggagatccatgagtttatgtatcgtttggtcatgcagggtacaagctctacacatgtctggcatcttcctatccctcac

SEQ ID NO: 497203 - DNA, 743 bp, Homo sapiens
  misc_feature (205)..(205): n is a, c, g, or t
ctcgtggacgaagccgcccgagaaacgagcggtggttgtcgcacggggagtggggtaaaccccgagagggggggttccccccaccgaaacgagaccacagggctcgcgtctgggtaagccacccggtgctggagtacgttggtaagcagaagttgtgagtcattggtagctcctcgcccgccctcgtctccctacagaagtatgngttctgttgttcaacacactttagttctttctaagggacgctccacttttataccgagcatcattttaacacctatgtctatctacaaagggcgaaccaacttccgtcgccttccttccccaatctttttgtgaaaatacataatttttaaccccaccttctcttagataatatctgtacaaacgatgttgatttgttagaaatacaataaaactactcggcgggaaatagccctaagagctaatagagaaaatagaatactcccgcccaatctcctctcaacgcagacgcctctgtctatttgccgccgccgattattctttctgacatgccactctccttcccgcatttcttgtgaatctttttgttgacgcagccacaggacatataaggagaatcactggacacaccgctagtctgtgccttgaaatatcgtggccctcatagtcagtcgtgcaaacggtgtagtgagtttacgcttcaaatggtatataaacagataattagattgggctgtccccatcaataaacgcagaaa

SEQ ID NO: 497204 - DNA, 779 bp, Homo sapiens
  misc_feature (96)..(98): n is a, c, g, or t
  misc_feature (117)..(117): n is a, c, g, or t
  misc_feature (119)..(120): n is a, c, g, or t
  misc_feature (123)..(123): n is a, c, g, or t
  misc_feature (140)..(141): n is a, c, g, or t
  misc_feature (145)..(145): n is a, c, g, or t
  misc_feature (190)..(190): n is a, c, g, or t
  misc_feature (265)..(266): n is a, c, g, or t
  misc_feature (272)..(273): n is a, c, g, or t
  misc_feature (285)..(285): n is a, c, g, or t
  misc_feature (292)..(292): n is a, c, g, or t
  misc_feature (301)..(301): n is a, c, g, or t
  misc_feature (303)..(303): n is a, c, g, or t
  misc_feature (308)..(308): n is a, c, g, or t
  misc_feature (315)..(315): n is a, c, g, or t
  misc_feature (325)..(326): n is a, c, g, or t
  misc_feature (333)..(333): n is a, c, g, or t
  misc_feature (340)..(340): n is a, c, g, or t
  misc_feature (344)..(344): n is a, c, g, or t
  misc_feature (360)..(361): n is a, c, g, or t
  misc_feature (363)..(363): n is a, c, g, or t
  misc_feature (528)..(528): n is a, c, g, or t
ttttttttttttggggttggagcacagggtacttaatggatgggtacatgacaagggggggctccctaggcccctcccctcttcaaggggtctacnnnggcaactggtaaggagggnannatncagtggtggtggggganntgangtgtggcaggaactccccagcagtgagggtctctctcttcctctngtgctcttggctgggggctgtgggtggtccagggggttctatatacctccttggagaggccatgtggtgggccanngaggtnncaccaccctggntggctgntagccaaantncggtnggtcatnaccaggaaanngagcttngacaaangtgngtctgtggagggcaanngnccagcccacagctgtacaaatgtggtggaggacgttgggttgtccgcgtgttgagacagctcaagagggaagacccacctgtgggtgcttcagtgatacgcccatggattgcccttaggagggggcccttccagaggcctgtgctttcaccaccttctttgtgantgctcactcactattgtggcgcaggtttttcataaacgggcacaggtcaggttccaccattggacatctgtcggcgcatgtggggcgacacgggaaggcgccatggccagtggaggcttcccctgtcacagctcaggggattagactcttcgcccacacagccttgggacagcgccatgaaaaacggcaaggggatgatgtgcctggaaaaagccccggcggaccatccacggcaaaagttccccggaagg

SEQ ID NO: 497205 - DNA, 245 bp, Homo sapiens
cccctcacactttttgcagacagcaccatcacaggatccaggaacccagtgttctgatgaagcttacggactgagcgacctacgcgagcaagcagcagtttcgtggctgaatatcggagaagagtccaggacgccagctgcgatttggtgaaggacgctaggaagaacgaaggagcgctaactatttgcgtggtcaagctcggaatacacggattccaggatggagcgagtgcaacaagtgtgct

SEQ ID NO: 497206 - DNA, 1561 bp, Homo sapiens
  misc_feature (646)..(646): n is a, c, g, or t
atcatatctaattgctcgtgtcctcacagcccaataatctagtactagaactactcatgaagccaaactagattccaataatgatgtgatcattgactacggaatagtgcattgtaatcagtataacgtatggccgtcattgtgacggggaacatcctaccttgatagaacatcaccataataagcatcatgttctaaagccgcacacggtacggacgtggggtgcctagtaagtgcacttgtagctcgttatgtactactaactaagtgagccgcgggactagtggtgttgatgacaattaacgactcttgccatctaaccattccaatcttcttcgacaacacacactctgttgaagctataaaaagcaatcataacgtctctaatctccctcatattcgcatatgggtcaccttaatttcacccttattggagcgcaacttagatattattcaatcgagagactctccatactaagccatacacgagattccagatcagaaaacatttatacgatacagcaatccgtatcgccgtaaacgttctttcctatattcggggacactaaccatagttcctctttcgttagagctaacatctaagggccacagtaatttagcatatcccaaaccaactccctctggnaaaggtctactcaacacggtgccgtaccagttccggtctccttccaataaagttcgtcccctacctgggcgacttggagcgatttccgtacaagtataagcttaatatgcttgactcgttagatctaaaaatccttccatagatcatatggtaaagcgtacgtaataactgtttggtcaatctattacaatccctaactccgtcaagggaagtatacttggtacggctaactccccgggttggaatgagccaatcctagtaaggacccttcgtaaggggaaagctcgtgcgtattagacccctaccgccttttaatcccgcgcctattagtttaacaactcattaatttggttgacgacacctttctcctggtagactttggttaaaccaatggtcttcgccttgatcccatgggagacaccggtcttccaacttggaaggggagctccaaccaaactaaattcagcaggggctaaggaagccccgggggagaaactcttacccgcaaaaaactcaggggtgggtaaaataccccgcacggggtaaattcccataaaagcgccacacggaaggggggggagaaccctccgggcgtagaaaaggagtatccacaacataacaaagagacaacccccgcatagtaaaaagggggagggccctctgagagaagaacaaagcacaaacccaaacaacaaaaagagggggggcgacgtacacacgaacgacgacgaatcacaatcgctgtagagactacaacgagcagtaaaaactaagcgcgcctcagcccgaccgaccatgagagatgagtagcattaggcggcagcacaacataaaaatgagcggacgtatatactcaaacagacaatcacaaaagaaaacagaagaaaaagcgagaacctacagaagtgggggagt

SEQ ID NO: 497207 - DNA, 174 bp, Homo sapiens
aggatcccctgcctgtaaaggattttatttctccttcacttaagaagcttagtttggctggatatgagattctgggttgaaaattcttttctttaagaatgttgaatattggcccccattctcttctggcttgtagggaagctgctcataggcactttataccacgacacagtg

SEQ ID NO: 497208 - DNA, 124 bp, Homo sapiens
cttaaggatccgtgggagacgtcgggggctgggatagagttctgttggactggtggaggacccgcgaggtagaaggcaccgcgaggtagaaggagccgcgaggtagaaggacccgcgaggtaga

SEQ ID NO: 497209 - DNA, 1072 bp, Homo sapiens
ttgctggccgcggcggctcgtgtcgtcgtcgcgagtgtggagtcgggactggagctgcatggcgcggtcgacgccgagtgatcttatgtcgctagctcccggcccttctgccccgccggcttccctcagtcagcgttgcccactcctctccggccgggcgcccctggctccatatctcgctctctgtccaccacagacacggtccccgccgatcatggaaccgggcagtggcggcggcggcggcggcggcgggagcagcagcggcagcagcagcagcgactcggcgcctgactgctgggaccaggcggacatggaagcccccgggccgggcccaagcggcggcggcggcttccctggcggcggcggcgaggcccagcgggagaaactcagcgcggcctacagccggcaaactcaacgtcaacgccaagccctatacgtgcccaacggtcccacgccgccggagtacgtgcacgacacattcccagcaggtgcccggcaagcgccggcaccccccaggactagggggaggcgccaaataacccacgggaagccgagacagccggggcggggaggccgtgcggcaaacctgagagaactcctccacaaggagggaccagcaatgcggtgacggggacacaatacaggcagtagcgatggaaacttaggcagcaaccctatagacgactgggagagaccggaagtgtctcccgaagaagtcatgcgcgcccaagaagaactacagtggcggccgaaccaaggggggatgttacttgggcagaaggaagggcgccagagcacagtcccagtgacatgaggcgcgaagaagcacgccaacagtctacgctagtgaatgccagcaaggggcccaaagacaggacatggatgctgcatgccgggcgtaagtcgacgcacatgtgggccaagactaggccaacagcagccaacacatacgacgaaggcgaggtgcgcagcgggaaagcagccgacgagggaccacaaacaaggaagcaggagagcaagcacagccacacaacgtgcaccagagcaccgaagagacgcggataagagtcac

SEQ ID NO: 497210 - DNA, 458 bp, Homo sapiens
  misc_feature (108)..(110): n is a, c, g, or t
  misc_feature (142)..(142): n is a, c, g, or t
cttttcctctaccatgctgatggcaccatcttcctgtctttcagccttcagcatggtagaggaaaagagaaagatggtgccatcagcaaatattattcttaattgaannnttgaaatgtgtatgtttcttactaatttttanaaatgtattccttgccagggcaggcaaggtggctcacgctgtaatcccaagcacttcaggaggctgaggtgggcggatcacctgaggtcaggagtttgagaccagcctgatgaaaccctgtctctactaaaaatacaagaattagccgggcgtggtggcgcatgctggtaagtatcagctactcaagaggctgaggtgagattatcgcttgaacccaggaaacggaggttgtaagtgagcggagatcgcgccactggactccagcctgagtgacagagtgagaaatccatctcaaaaaaaggaccaaaaaaaaccc

SEQ ID NO: 497211 - DNA, 621 bp, Homo sapiens
gcctggctggtgatgccgttctgcgaggatctgtatctctggagcgagcgttcgttcgatctccgtccggcttctctcctatctaagctgactgtcggctgggcactcacgattgtgacacgcattcggagttggcacatggacatgagccccctgaggtcccagaattatcttttcgggtgtgaactaaaggtccgaccaaagtattatcacttgaaggtgtggactaatgacttgataggatagtgtatccacacaggttgaatctgtttaaagaatcaggttcaagcttgtagggggaggctgggtgcaaattatgcgaattgagattagtaacaatctggtgtagataacggcaatgcatggcctagaatagaaactctgacagagaaggagccaggaataccccacactctcacaaacgctcaaagcaaccttgggcaaaccttgttcttgcagatagattgtcctcgctaacgatgcccaacacagggctattcgccctctgtggtggctgttgatagatatacactcaccgagtggtctataagggttagaacgtcgtggttcacgggtccagtgcatattagtggacagcacttagtagctgtggcaggaaga

SEQ ID NO: 497212 - DNA, 128 bp, Homo sapiens
  misc_feature (10)..(10): n is a, c, g, or t
  misc_feature (54)..(54): n is a, c, g, or t
catcgataantgagctttctcatctgtccgatgctatggttttcgtgagatgtnacaattctagatctatccaccttgtttttttattgtccaccaaccattaaatgtaaatattgtttttagagtcc

SEQ ID NO: 497213 - DNA, 229 bp, Homo sapiens
gatcagccttggaaacatggcaaaaccttgtctctgccaaaaaaaaaaattagctagacacagtggcttgcacctgtagtcccagctacttcggaggctgagatgggaggattgcttgagcccaagagctggaggctgcagcgagccaatgatcacaccgcttgccctccagcctgggccacagagcgagaccctgtctcaaaaacaaaaaaattactttggacacaat

SEQ ID NO: 497214 - DNA, 1840 bp, Homo sapiens
  misc_feature (1840)..(1840): n is a, c, g, or t
ggctggtcagtgtgacgcgtgacgcgaggagcgaactggatcgtagtgcatgatgcgtgcaggagatgacacacagtggacataacatgggagcatgcgagaacgtcagatgctatcgcggaatgtcatgcgtcggctgcatccctacgcatgcgacgtgcacacagtcaaagaagcatgaactggggaaacggcttcagccaggcatgccacgtagtagccaggcctgcaatgccacatggttcagtctcctgcaattgtgatggcagataccagctggcgagaagatcagcaatccaccatgatctcaatcgttgaccaagtggggtacgagagacttaagatccccaaagcaagaagactgaagataaaatgggattgtggctcggagccttatgaagtccctaataaaccggctggatcgagtagaattctggcaacactcatacaaggccggaaagctaaagctctcaccgttcgtacctgggagtatgtcccctaagcgattttgcgctcctcccatatgaaaactctccaaggagatggccttccctttgaagaaggaaagtgctattcaaggttactagcttggaaagttgcatgggtagggagaaataatttcaccaatagggggcatatactgaactagagcaaaggccttcaatattgcatcaacctgacattaccaggatgcagcccgtagttaagtaagagactaaggacaagcagcgtcatatatttttagcccccacaacggaacgttagaagtctacttagggaactatgaaccccaaacaactgattggccggtgaagactacgaaaggaaggcggaactattagagttatctaccattaataccaagcgcatttgcatgggagagaatacctgaacgctattgccacgtgaacacggcaccgaggaaacacccacaacatatcccctcatttgggattgaccccaacattgcaagtaggttcaccattcaaaggaacagccccaccgtacgtggagaagacacaagggacagcataatactccttggataaaccctaagacaaaaaataaagcctaaaggcaaggtgctaaaaagaaggattaacgcgaaacacggtgaagagccgaagacacaaaaacaaaacgccgccacagaaacggggcaccaccagataatatacactggaaaagcgcgcccacaacacattaaagcaaaaaaccaggccacatacataggcaaacacagcgagagtcacacgaaaaagagtagacaggacagaaaacaaacaacacaacgccaaaaacacccggagtaacaacacagcgtaagagtgagggactcaacaagtggaccagaaacggcaccacaatgttggcaggaaaccacatttcgagacaccgccgctcccaccacagcgaccgagccaccatgggaaacgaaaaacggcacacgggcaaacaagcgatgacgcacgcggactaccgatgtcgacgcacaagcataagacgtatcgagcgagcaacgtggacaatatctgcgcgacgcaacagaaataagagcctgcacagatacacatgacagcgacactacgcgatccgaccgagcacgcaggacgtccagcaaccagacaggcacggcagcacagtgagagacgggagaacgcaaagcccagacgagcaagcagccacgagcacagaaagccgcagcaacgaaacagtactcgacacggcggaactaccaacagacagaagacgcggaccgccgccagaccacaaccagcacacaccacggagccaagagacgcaagtccgacaccaccggcatgacgcggtgcaggagggn

SEQ ID NO: 497215 - DNA, 239 bp, Homo sapiens
cgtggccagcacggatgtgacgatctggccccggtaccggaatcccttctggagtcaccgtctacatattctatcctgggtttaccccgtgtggctggtatcccagtcaggaacttgccgggcagtgccttgcaggcacagattaaataagggatgacggtgggcttctccttcttagttttgatgagcagctcctctgatttctcgcggtccccaccgctgcagtccttactaggggt

SEQ ID NO: 497216 - DNA, 924 bp, Homo sapiens
ggctggaatgcagagttgcaagtcatggctcgctgcatcctcggcctccctgggttcgggtgatccatcccgcctcagcctcgatgaggtagctgtggggagctacgggacactgtcatgcaaccaccagcagttctggcgtagacttgttatctgtactgtcctggtctgtatgactggggtgtgtttgcccactggtggcccaggtcatggatcttggatctcctggatatcaaggcaatgcggagctcatcgttcagccatccctagggtacttgcggattgtacacgggtgactaggccagctgcatccatggtcgcacgtagctttagttttcgatacctaggagactggaagagtaggtgacatacagtgttgccatacacttaggacagtaaggttaatctaaatatttgctgtatattatccttgtattagaacgttcattggcatggaatagaagagctttcgcaatagttgcttctaggactcatgttatgaggaattcgttttctaagtgctggttgacttcttgtataggtcaaggctcaccatttttttaattgtgacaggggaatgcctgggaaagagagcacgtgcaagagaaggtgagaagtataatttgttggtgacttcttgttgaacagtcactttcgtggagtggctttgaatactcgagttactaccgtgtagtgggcaagtgatttctattcgtagaaatcggatgttgataagtactgggggctgtcattggatggaatcagtgagtctagtgagcatgtttggtaactttagggtcaggtggtgttgcatgttggagggaaggttttggaagttcaggagaagggtggcccatgtttggaaaggaccgatgatctgtggatctggaaagaagttaggcgtgaaatggtttaaaggtctta

SEQ ID NO: 497217 - DNA, 231 bp, Homo sapiens
  misc_feature (26)..(26): n is a, c, g, or t
cttaaaaaaaaaaaccccgggggggncccctcaggtttgttttttaaattaaccccaagggccctttttttttagaaaatttcccccccccccgcaaaaaaaaaaaccctttgggttaaagggggggaaaggttttttttttgttttttttttaaaaaaaaatgtttccagggccccaaattttttccccaaatttgggtttttttttaaaaaaaaaaaagggccccttta

SEQ ID NO: 497218 - DNA, 100 bp, Homo sapiens
tccggtggcgtgggggataggtgtatgaacatgaaggtgttttctcgtgtgaatgaaggttttatgatagtaatgtggtgggtgagatagcctcattggg

SEQ ID NO: 497219 - DNA, 448 bp, Homo sapiens
gcggccccttttttttcccaaggttggggaccctttccggtccctttgcctcccggggaattaaaaggtttttttccccttccccctttgggggggccaggccggaggaatttttggggaggggtttaaagttcgggggttttggtttaggaaaaaccaattttccggtttttggaaactttggttttgggacccgggaccccttgaatttggggtccaatttggcccccgcctttggttttacgggcttgggtttttttttgtggtggggtggcccgggttttgcctttccggccaggagggccgggccgggttcctttgggccccaccccgggttcgccaagggggggccctttccttttttcccccggaggtttgtggggacctcccttcttgcaaataaatttcccgttttttcccaaagggcccttaaaaagttttcgtggga

SEQ ID NO: 497220 - DNA, 1062 bp, Homo sapiens
ggctttaggctggccggctggcgctgggagtgtggagtcgtctgctgttgctgtttgtgagcctgtgtgcgcggctatctgtgggccggaatccttaaagatagccggcaatggttgaaaactggtgataatgaaaacgatggtctgccctggagggcaaaatctgtcatcaaattgagtatatttgggcgacttcaatttgccgaggggcacaatgtttctacaaggaacgagataaaacagtggattgaaggcttgggtaacctttttgcgcagcataatgcataaaaattcaaacagggtatgaacctgtctaaacagacagactttacgtgtaattgtggaagcatttgagcaaaatccaaggcagaactcatggaactcagttgaagataaaagtaaaatcagaaggtctccaaggcaaaccctatacctgaagtgactgatgagtatagaagaatgatgtaagaaaaacagatcgtgttgatattacaaaggatatccccaattgattgcaagttctttgaatgaccagtaaaagagaactgggttatgaaggattagaagtgtacaatggtaggtacgaatattacaggatagaggacaggaaccaattgggccatagcggcagtttacgcggatcaagtttgggagagggtagggagaaggcatttggacttcgctggctacagcaaaatttgtaagaggagcgccttggcccaaaagttacgaaaggaaaaggaagaccgtgggtagatactgtatgcatgtgcacgaagtatatttttgaccaaagagaagaagtgggcaggagacggggagcgccgacacagattaaagaggttggggaatgcactatacgcatatacagggaaggcgtaaggcgagggggaggcaaggaaaggggagggagacacaggagagtagttgcgggagcaagtgacttggcgtcggcaaatggacagtcggcgcaagaggacagggggaattgtggagtggctagtggtgaggaagtttcggcgggtgtggttaaggtattcggcggcgtgagcggggtggatg

SEQ ID NO: 497221 - DNA, 3055 bp, Homo sapiens
tttttactataaaaggaaccatgtataacattgatttttaccttcagttttgataataggctgaagactgccttcaatcactttaatttttggttccacaactttggttataattttagttgctgaaagtatagaaagtggaacatgaaaaatatttacataaaaacctgaacaaaggttttttttttttttccttttcttttttgtctctgtaggatactaaggtacaggatgtggtaatatgttcaggcagtcagatacaggaaatatttatggtacataatataatatcttctcatgtccaggtgttgaactctgaagtctagtgacttgaatttgatctagtgaaatatatactcacaaagtgaggaattatatctagaaatctgtaatttttaattgtaccgctaaagcgctttaccttcttttgtacttcttgaaaatactggctgcattgcaacagaagacaaatatgattaatgtcatgcaattcataatatcttaaattgcattgctggattctttctcaattaaaagaaaaaatgaaagaaaaaggcttttaaaatgtttttcatgcatctgataacagtgacatagaaaggaaaaaatgaaacatagttcagaatacttaaaagtaagaataaatttcagccagccagacatgagctctattcaacaaacatgatatgatcagtatttaagttataggctaaaaggtctttaattttcagctttgttatcactatccttttttttttttaatttaaaggtatatattttaaacgtgtgtcgtctacctaagtaagataatagtctttgaactaggtactatgtttgctgtttgggtgatgggttcactagaagcctaaaccccagcattactcaatatatccatctatcaaacctacgtgtgtacccccctagatctataataaaagtaaattaaaataaattaaataccagtcaactatttggttgactttggttgtactgattaactggaaatgtgcctctgaagccacacagccagagcaactggctttttgtcatttctaatgaaaagccttgaaagatggttctattagataacgggccacactgaagctaactgtgcatctagatcacatcaaagcagtagaggtgagatgttagcacagctttggtttctgcagttctcacctcatgcttgtaagatgtttagctgtgtcaactttttgaattaatgtgggttcttagccttcatagaccctgtgtttcagccttattaggttttgtattttgagatctcaaattgtgaagctctaaaataaaacaaatctgtgtgtttaggtactagttccacaggtggtcttgccacagaagaacctttccatgaaagtcgaatacgaatacacagggctctctattgctgctatcaaaatggactaattccttttagcttacattttttacatcatgttaaggaatttgacgttttggatgttcagctggttggtagttttcatttcaatcttgattttctgcagacttaaatagttttgacaggtgaagctctgaggattaaatattgattttagccctctccaggtcaaatgttccatatttgacaacttataccaaaaacagcatccttcccctcaactatacactttaaaatggatgttattttggggatgaggataatatgcagcaaaaaattataggaattttagaaacaagtcaacaacgaaatataaaaatagaaaatttggtttaatttacctttacttctactttaaaatacttcttaataacagcataccgtctaaggaggagtaaaagaaacatcttacattggaatgtaaatgttagagctgtttcaaggcctctgggtaggtagggaaggaccattgaacatgtgtgtcttaataaaatgtagcttatgctctgtgagtgaggatgtaatttagtaggagaaaataattatatttttgctcattgtaatcaagatattgcattcacatatatagaaagtagtgaaactaagatggataaagaagggaagctaaagaaatgtagtgggaatgtgtatatatatatgcatatgtatatatttatacctttgatgaagaaagatggcataacatgtctgatgaatagagcccataaggattgcttaattttcagaaaacatattttttacaagattgtattcccatggtgaatcataactattccaattaaatctttaatacagtgctgagctggcctgatcctggaattgcatgttattattgcataattgaaatcaacaacagcagcagacattttgttttgctccttacattggctttactccttttccatatctagtataaatcttaagggaaattttcttaattaaataactggatgctcatggtataaaatggaatgattttctagccagaataaatgtgggtattgaagtaatgttttagctactgatacactttgagtgtttaattacagagccaaaacaaaatgaaaagaatttctgcttgaaagctacagggaaataaagaaagagagaaaagataaacagagaaaaagccatgatggaaaagatatactactagctacacttatgagaatgaaataccctttatcattgttaagtagtagaggtttaattttgataatctggttgtgtcagagatcaaagaaccctggaatttggaaactttaaatttgtcacatggcagatttttttgttcctttgtccaattttggatgggagagtttttgaactgccaccttataaacattggtattcttcaacacgtgcttctcagcctgcccttagatagctcagggcttgagggtggcgtgaacaacaagtcttggctaaggtcatttctgtgtccacacatctgaatttttagatatttctagagggtcttttcgccatctcttccctttatatgtcttttaattttcctggctctttgccacgctaatattatattttgctgtctttctcatgtcatatcatttctgtttttccaatgagtggggaagaagttcattggagtaa

SEQ ID NO: 497222 - DNA, 1152 bp, Homo sapiens
  misc_feature (401)..(401): n is a, c, g, or t
  misc_feature (517)..(517): n is a, c, g, or t
  misc_feature (545)..(545): n is a, c, g, or t
  misc_feature (559)..(559): n is a, c, g, or t
  misc_feature (602)..(603): n is a, c, g, or t
  misc_feature (609)..(609): n is a, c, g, or t
  misc_feature (624)..(624): n is a, c, g, or t
tgggacaggcagacctagataagggagcggggaactacttggagaaccgtttatgtgctgtaattggacattcagcgtaccctatggaccccggttatcccatactggggataaatcctagaggaacgtcatacatgtacacccggagatggtgtaccagaatattcatagccaccctattcaccaaagccaaagcctagaaataaccccgatgcccatggagccagagagtggaccagtataactgggatattcacataatagaaccttataccattgtccaatgagactataatgatacctaccatatggatgaatctgagccattaaataattaatagtgaaaaaagttttatccccgaagagtaaatgtagcatgatgccctttctaaatgaaaggntttttcttttctatggagttattctttacatacaatatagttcataaattttaaatatattgtttaataaattttgataattgtatataatagtatagtcaccatcaagatgtagnaaatagaaaataggctaggcacagtggntcacgcctgtaatntcaacactttgggaggccaaggtgggaagatcacttgatcccnngaattntagatcagctggacnatgtagtgagacctggtctttaccaaaaaaaaaaaaaaaaaaaattagctgggtgcgcgtggcttgtgcctggtggctcccagtttactcaggaggctgaggcaggaggatcactttgagcacaggagttgtttggagggctggcatgtggacgcagcctggggcaagaaggacgtggaagactcccggtttggttggccactggcactcccagccaggggtggacacgagtggacgactctggtctcaaaaacaaaatcaaccaaaaacaagacagagggctgtgtgggggaatctttaacccagggcggggcgctgatacaaacaggtctcgctgaaagcctcgcgcgcccagtggggccggggggtccgacagccctgtcttaattccccaaaaacttgtggcgaagaggctggaacgagcagggggtggtaaacaacctcggaagggtcgcgaggaaggaggttcgccagcaacccccgtgcggggccaacacggggctgggaaaacccgcctttctcttgtaa

SEQ ID NO: 497223 - DNA, 719 bp, Homo sapiens
  misc_feature (303)..(303): n is a, c, g, or t
  misc_feature (340)..(340): n is a, c, g, or t
gatgcctgacgtttttacgactcctctttcatgtttgtgtcccatctcttctcagaagaattagccatgttttgtgaattccaggtgccatcttcaaaaacacccttggattctagccaatcaccaaaatggcagagacggccacctgagaccaattagaatatccacaccagtggaagagagctccagtggtaaatttcctagatgtacaactattgatttcatgatgtattgttccataaggtgactttaaaacaggacaaaagtcatgattcgtatctttgtttcatcttgtcgttaatnttatatctggtaattttcttgaaaacataaggacttnttttacaaatttgtatgctttcataagtacttcattgtaactttaatagtaaataaactttggctttattaaggtgtaggagagaaaaccctacgaacagaaataaaacaattgtgatgaatcattcattaatccctgggagaagcagagtgggcgtactgtgggcttaggctcactaagaaggacctggattcacatcctagctttgtccattgtatgtggccttgggcaggtctcataagccacactcctttgcaaaatgaagataacaatatctacttctgagagctgttttcagaggatgaaagtgcataataagtgccttatcttacacatggcccagtcttggctcaaaaatgttacttttgtttcttgaata

SEQ ID NO: 497224 - DNA, 511 bp, Homo sapiens
aaagcaataaaccgggcagcaaaagttgggatctttggaaaaacggtaaagtaagcccagtaacaaaatgaatccaaaatggccaagacaaagaaaactaaagaaaaatttgccttccctctccaaccagctatggagcacagcatgttgggagatgaacagggaaaaggccaaggtaaggagcctgggaaggaaggtatcaacaatttaaactgaactcgtgccgaattcggcacgaggcacatttctatatgagtgggtttactggtaaattatgttattttttacaactaattttgtactctcagaatgtttgtcatatgcttcttgcaatgcatattttttaatctcaaacgtttcaataaaaccatttttcagatataaagagaattacttcaaattgagtaattcagaaaaactcaagatttaagttaaaaagtggtttggacttgggaacaggactttatacctcttttactgtaacaagtactcattaaaggaaattgaatga

SEQ ID NO: 497225 - DNA, 545 bp, Homo sapiens
tgcgcgacgcttccatccactactgtgattctgcagactggaaaaaactcctgcacagcctgcagactgcacattattagcgcgaaccaggatgcttttaagggaatgactagtgaagaaaaagaaattctgatacgggacaaaaatgctcttcaaaacatcattctttatcacctgacaccaggagttttcattggaaaaggatttgaacctggtgttactaacattttaaagaccacacaaggaagcaaaatctttctgaaagaagtaaatgatacacttctggtgaatgaattgaaatcaaaagaatctgacatcatgacaacaaatggtgtaattcatgttgtagataaactcctctatccagcagacacacctgttggaaatgatcaactgctggaaatacttaataaattaatcaaatacatccaaattaagtttgttcgtggtagcaccttcaaagaaatccccgtgactgtctataagccatttattatatatacaccttcatcatgatgaagctcgcgctgggtcctgctggtcag

SEQ ID NO: 497226 - DNA, 3314 bp, Homo sapiens
  misc_feature (230)..(230): n is a, c, g, or t
  misc_feature (232)..(232): n is a, c, g, or t
  misc_feature (234)..(234): n is a, c, g, or t
  misc_feature (240)..(240): n is a, c, g, or t
  misc_feature (244)..(245): n is a, c, g, or t
tctcttcctccctgtgttctttgtttctttgttctgtgtttcttgcttttttgcttttcgtcccttctattctgtcctggtgtgatagtgcttgactctcgccacccgtgttaagccgtcccggtttttgggggacccaccgttgcccgtgttctgtgacccttgccacttacatacaatggcgcgccccaccgaaggtttaaatttttgtggccaagccgcacacattntntngtgttntttnnttttacttcaatttcctttaatgagtacttgttacagtaaaagaggtataaagtcctgttcccaagtccaaaccactttttaacttaaatcttgagtttttctgaattactcaatttgaagtaattctctttatatctgaaaaatggttttattgaaacgtttgagattaaaaaatatgcattgcaagaagcatatgacaaacattctgagagtacaaaattagttgtaaaaaataacataatttaccagtaaacccactcatatagaaatgtgcaaagccttttgatataaaaagttttgtacaccaagcacctatttttataacttagcttcccatggagagataatggcttgcgtgcattttatgtatccataacatacatacaaggctcggtcttttcaatgggataacagttcacaactcttcgatttgaattgtaatgaatctggtgacaaggatttttctctaatggattccaaagttagccagaacttttaatgtcaagatgaaaaagggtgtaaggtgttatattttcttcaattcctttaccacaggaggctaactccacaatttccctcatgtttctcattcagaaaaaaaaatattaaatttgtgttcagaattatttgatgattgcttctttgtgctgatgtttcagttcctgaagtcaacttggctctcacaattttctaaggtcaggttattgacttagggttgtataaacatttttttctggtttttggattttcactgagaacgaccttcccttaatcgtcttctagatccttgaacttttttgttggcttgcaacttcctcacgggtgtgtctccctgaagcagtcttttaatttcttcatcttcaaataaatgaccatcaccaccttcaatgaatttggtgaccttggtgacctcttcttgtaacaatttcttcagagtttcttctgtttctccacctccagtagaaatcctagtgtattttatttcaggacctgtaatgattcgttcttctcgtgtctctttttcagttatttccacaggcactccatcaatgattttggtgtattttttaataattggctctccatggatcacttcagttattgtttcaactgctggaaatacttaataaattaatcaaatacatccaaattaagtttgttcgtggtagcaccttcaaagaaatccccgtgactgtctatagacccacactaacaaaagtcaaaattgaaggtgaacctgaattcagactgattaaagaaggtgaaacaataactgaagtgatccatggaggtgcgttccttatgttacctggggccgactaccttcgctgtgattattttgaaatagtgttggtttagaaatattgaacatctgatattttctcttagttcttattttataaaaattgtgggaattatttcctcagctatgagttcttattagctggtcagaaataaaacatagttagcttttaatggatctagttggaattaatttatctattaagtcactgggcccaacaaaatgtcatgatttttgcatatacaagtgaggattgtggaataaaattgtaacattaatgtcagtataaaaggaaatattagaaacagtaggaaaaaatgaccattgtataagtctctgtctaataagccactccactactaggatttatgatagggctcccattccaatgatatagaactccctggattctcactaagtatttattccacatccagaaaacaagtatggcatggagagttaggatgtcaaatggccctctctctcaaccaagattcaggacatagctattaccttttagatccctattgatatgatttttgggggatatgttctaaaaatgtttatgattgaatcttaaatggtaatatttgtagaaatatagttaatcattacaatgtctagcttatggatgtatagtcacaatatgagggtaaatcaaatgcatttgtattcccctgcttttagagccaattattaaaaaatacaccaaaatcattgatggagtgcctgtggaaataactgaaaaagagacacgagaagaacgaatcattacaggtcctgaaataaaatacactaggatttctactggaggtggagaaacagaagaaactctgaagaaattgttacaagaagaggtcaccaaggtcaccaaattcattgaaggtggtgatggtcatttatttgaagatgaagaaattaaaagactgcttcagggagacacacccgtgaggaagttgcaagccaacaaaaaagttcaaggatctagaagacgattaagggaaggtcgttctcagtgaaaatccaaaaaccagaaaaaaatgtttatacaaccctaagtcaataacctgaccttagaaaattgtgagagccaagttgacttcaggaactgaaacatcagcacaaagaagcaatcatcaaataattctgaacacaaatttaatatttttttttctgaatgagaaacatgagggaaattgtggagttagcctcctgtggtaaaggaattgaagaaaatataacaccttacaccctttttcatcttgacattaaaagttctggctaactttggaatccattagagaaaaatccttgtcaccagattcattacaattcaaatcgaagagttgtgaactgttatcccattgaaaagaccgagccttgtatgtatgttatggatacataaaatgcacgcaagccattatctctccatgggaagctaagttataaaaataggtgcttggtgtacaaaactttttatatcaaaaggctttgcacatttctatatgagtgggtttactggtaaattatgttattttttacaactaattttgtactctcagaatgtttgtcatatgcttcttgcaatgcatattttttaatctcaaacgtttcaataaaaccatttttcagatataaagagaattacttcaaattgagtaattcagaaaaactcaagatttaagttaaaaagtggtttggacttgggaacaggactttatacctcttttactgtaacaagtactcattaaaggaaattgaatga

SEQ ID NO: 497227 - DNA, 247 bp, Homo sapiens
agcggccgcctttttttaagcaaaaagggtatttatgggttcacataactgaaaagtccaggggatattctagcttcaggcacggtgggatccagggcacaaacgctgtcatcaggattcaagtctctccatatttgggctctgctttccccggcacgggcttcattctctacatggtaggcccggttagttggaggttttcatcctacaaagctaaagcaccctcagtaaagaaagggcggccgct

SEQ ID NO: 497228 - DNA, 3230 bp, Homo sapiens
  misc_feature (230)..(230): n is a, c, g, or t
  misc_feature (232)..(232): n is a, c, g, or t
  misc_feature (234)..(234): n is a, c, g, or t
  misc_feature (240)..(240): n is a, c, g, or t
  misc_feature (244)..(245): n is a, c, g, or t
tctcttcctccctgtgttctttgtttctttgttctgtgtttcttgcttttttgcttttcgtcccttctattctgtcctggtgtgatagtgcttgactctcgccacccgtgttaagccgtcccggtttttgggggacccaccgttgcccgtgttctgtgacccttgccacttacatacaatggcgcgccccaccgaaggtttaaatttttgtggccaagccgcacacattntntngtgttntttnnttttacttcaatttcctttaatgagtacttgttacagtaaaagaggtataaagtcctgttcccaagtccaaaccactttttaacttaaatcttgagtttttctgaattactcaatttgaagtaattctctttatatctgaaaaatggttttattgaaacgtttgagattaaaaaatatgcattgcaagaagcatatgacaaacattctgagagtacaaaattagttgtaaaaaataacataatttaccagtaaacccactcatatagaaatgtgcaaagccttttgatataaaaagttttgtacaccaagcacctatttttataacttagcttcccatggagagataatggcttgcgtgcattttatgtatccataacatacatacaaggctcggtcttttcaatgggataacagttcacaactcttcgatttgaattgtaatgaatctggtgacaaggatttttctctaatggattccaaagttagccagaacttttaatgtcaagatgaaaaagggtgtaaggtgttatattttcttcaattcctttaccacaggaggctaactccacaatttccctcatgtttctcattcagaaaaaaaaatattaaatttgtgttcagaattatttgatgattgcttctttgtgctgatgtttcagttcctgaagtcaacttggctctcacaattttctaaggtcaggttattgacttagggttgtataaacatttttttctggtttttggattttcactgagaacgaccttcccttaatcgtcttctagatccttgaacttttttgttggcttgcaacttcctcacgggtgtgtctccctgaagcagtcttttaatttcttcatcttcaaataaatgaccatcaccaccttcaatgaatttggtgaccttggtgacctcttcttgtaacaatttcttcagagtttcttctgtttctccacctccagtagaaatcctagtgtattttatttcaggacctgtaatgattcgttcttctcgtgtctctttttcagttatttccacaggcactccatcaatgattttggtgtattttttaataattggctctccatggatcacttcagttattgtttcaactgctggaaatacttaataaattaatcaaatacatccaaattaagtttgttcgtggtagcaccttcaaagaaatccccgtgactgtctatagacccacactaacaaaagtcaaaattgaaggtgaacctgaattcagactgattaaagaaggtgaaacaataactgaagtgatccatggaggtgcgttccttatgttacctggggccgactaccttcgctgtgattattttgaaatagtgttggtttagaaatattgaacatctgatattttctcttagttcttattttataaaaattgtgggaattatttcctcagctatgagttcttattagctggtcagaaataaaacatagttagcttttaatggatctagttggaattaatttatctattaagtcactgggcccaacaaaatgtcatgatttttgcatatacaagtgaggattgtggaataaaattgtaacattaatgtcagtataaaaggaaatattagaaacagtaggaaaaaatgaccattgtataagtctctgtctaataagccactccactactaggatttatgatagggctcccattccaatgatatagaactccctggattctcactaagtatttattccacatccagaaaacaagtatggcatggagagttaggatgtcaaatggccctctctctcaaccaagattcaggacatagctattaccttttagatccctattgatatgatttttgggggatatgttctaaaaatgtttatgattgaatcttaaatggtaatatttgtagaaatatagttaatcattacaatgtctagcttatggatgtatagtcacaatatgagggtaaatcaaatgcatttgtattcccctgcttttagagccaattattaaaaaatacaccaaaatcattgatggagtgcctgtggaaataactgaaaaagagacacgagaagaacgaatcattacaggtcctgaaataaaatacactaggatttctactggaggtggagaaacagaagaaactctgaagaaattgttacaagaagacacacccgtgaggaagttgcaagccaacaaaaaagttcaaggatctagaagacgattaagggaaggtcgttctcagtgaaaatccaaaaaccagaaaaaaatgtttatacaaccctaagtcaataacctgaccttagaaaattgtgagagccaagttgacttcaggaactgaaacatcagcacaaagaagcaatcatcaaataattctgaacacaaatttaatatttttttttctgaatgagaaacatgagggaaattgtggagttagcctcctgtggtaaaggaattgaagaaaatataacaccttacaccctttttcatcttgacattaaaagttctggctaactttggaatccattagagaaaaatccttgtcaccagattcattacaattcaaatcgaagagttgtgaactgttatcccattgaaaagaccgagccttgtatgtatgttatggatacataaaatgcacgcaagccattatctctccatgggaagctaagttataaaaataggtgcttggtgtacaaaactttttatatcaaaaggctttgcacatttctatatgagtgggtttactggtaaattatgttattttttacaactaattttgtactctcagaatgtttgtcatatgcttcttgcaatgcatattttttaatctcaaacgtttcaataaaaccatttttcagatataaagagaattacttcaaattgagtaattcagaaaaactcaagatttaagttaaaaagtggtttggacttgggaacaggactttatacctcttttactgtaacaagtactcattaaaggaaattgaatga

SEQ ID NO: 497229 - DNA, 2531 bp, Homo sapiens
  misc_feature (230)..(230): n is a, c, g, or t
  misc_feature (232)..(232): n is a, c, g, or t
  misc_feature (234)..(234): n is a, c, g, or t
  misc_feature (240)..(240): n is a, c, g, or t
  misc_feature (244)..(245): n is a, c, g, or t
tctcttcctccctgtgttctttgtttctttgttctgtgtttcttgcttttttgcttttcgtcccttctattctgtcctggtgtgatagtgcttgactctcgccacccgtgttaagccgtcccggtttttgggggacccaccgttgcccgtgttctgtgacccttgccacttacatacaatggcgcgccccaccgaaggtttaaatttttgtggccaagccgcacacattntntngtgttntttnnttttacttcaatttcctttaatgagtacttgttacagtaaaagaggtataaagtcctgttcccaagtccaaaccactttttaacttaaatcttgagtttttctgaattactcaatttgaagtaattctctttatatctgaaaaatggttttattgaaacgtttgagattaaaaaatatgcattgcaagaagcatatgacaaacattctgagagtacaaaattagttgtaaaaaataacataatttaccagtaaacccactcatatagaaatgtgcaaagccttttgatataaaaagttttgtacaccaagcacctatttttataacttagcttcccatggagagataatggcttgcgtgcattttatgtatccataacatacatacaaggctcggtcttttcaatgggataacagttcacaactcttcgatttgaattgtaatgaatctggtgacaaggatttttctctaatggattccaaagttagccagaacttttaatgtcaagatgaaaaagggtgtaaggtgttatattttcttcaattcctttaccacaggaggctaactccacaatttccctcatgtttctcattcagaaaaaaaaatattaaatttgtgttcagaattatttgatgattgcttctttgtgctgatgtttcagttcctgaagtcaacttggctctcacaattttctaaggtcaggttattgacttagggttgtataaacatttttttctggtttttggattttcactgagaacgaccttcccttaatcgtcttctagatccttgaacttttttgttggcttgcaacttcctcacgggtgtgtctccctgaagcagtcttttaatttcttcatcttcaaataaatgaccatcaccaccttcaatgaatttggtgaccttggtgacctcttcttgtaacaatttcttcagagtttcttctgtttctccacctccagtagaaatcctagtgtattttatttcaggacctgtaatgattcgttcttctcgtgtctctttttcagttatttccacaggcactccatcaatgattttggtgtattttttaataattggctctccatggatcacttcagttattgtttcaactgctggaaatacttaataaattaatcaaatacatccaaattaagtttgttcgtggtagcaccttcaaagaaatccccgtgactgtctatagacccacactaacaaaagtcaaaattgaaggtgaacctgaattcagactgattaaagaaggtgaaacaataactgaagtgatccatggagagccaattattaaaaaatacaccaaaatcattgatggagtgcctgtggaaataactgaaaaagagacacgagaagaacgaatcattacaggtcctgaaataaaatacactaggatttctactggaggtggagaaacagaagaaactctgaagaaattgttacaagaagacacacccgtgaggaagttgcaagccaacaaaaaagttcaaggatctagaagacgattaagggaaggtcgttctcagtgaaaatccaaaaaccagaaaaaaatgtttatacaaccctaagtcaataacctgaccttagaaaattgtgagagccaagttgacttcaggaactgaaacatcagcacaaagaagcaatcatcaaataattctgaacacaaatttaatatttttttttctgaatgagaaacatgagggaaattgtggagttagcctcctgtggtaaaggaattgaagaaaatataacaccttacaccctttttcatcttgacattaaaagttctggctaactttggaatccattagagaaaaatccttgtcaccagattcattacaattcaaatcgaagagttgtgaactgttatcccattgaaaagaccgagccttgtatgtatgttatggatacataaaatgcacgcaagccattatctctccatgggaagctaagttataaaaataggtgcttggtgtacaaaactttttatatcaaaaggctttgcacatttctatatgagtgggtttactggtaaattatgttattttttacaactaattttgtactctcagaatgtttgtcatatgcttcttgcaatgcatattttttaatctcaaacgtttcaataaaaccatttttcagatataaagagaattacttcaaattgagtaattcagaaaaactcaagatttaagttaaaaagtggtttggacttgggaacaggactttatacctcttttactgtaacaagtactcattaaaggaaattgaatga

SEQ ID NO: 497230 - DNA, 630 bp, Homo sapiens
agcctgaaaaagtcaccctgccgaggatcaacttcttcaccccagaacaaggcagagcagaaggatggatctgagtgcaaacaggtccaggaccacgccacaccatatgccgaggcttgagaaggaaattcactgagccattccttacgagtgttcccaggagaaacaggaaagtgagaacgtcaagtcagtccaagaagaatacagaggccaagtcccagttgctatatcagcaatctcacagagagagcggcctcagtcccttgaggcgtctcgtttctgcaggccagtgctggagtgcactgggccatctgtggtcactgcagccttgactctggagctcaagtgatccgttctcatttcggcctccaagtagctgggatcacagcacgaagtgacccatgatattcagggtggtggctccttggtcagagtgaagttcctgagtgaccataaggcaggagatctcctaacagaccatgatgggtcagtgtgagccagtatgaaaaccatctagtggagcaagaaaatagtgcctattttagcatggagacttggggatgttggttcccgaaaattggctaacttatccggggggtaaccggtgtaaaaattacctctgggggggtg

SEQ ID NO: 497231 - DNA, 3230 bp, Homo sapiens
  misc_feature (230)..(230): n is a, c, g, or t
  misc_feature (232)..(232): n is a, c, g, or t
  misc_feature (234)..(234): n is a, c, g, or t
  misc_feature (240)..(240): n is a, c, g, or t
  misc_feature (244)..(245): n is a, c, g, or t
tctcttcctccctgtgttctttgtttctttgttctgtgtttcttgcttttttgcttttcgtcccttctattctgtcctggtgtgatagtgcttgactctcgccacccgtgttaagccgtcccggtttttgggggacccaccgttgcccgtgttctgtgacccttgccacttacatacaatggcgcgccccaccgaaggtttaaatttttgtggccaagccgcacacattntntngtgttntttnnttttacttcaatttcctttaatgagtacttgttacagtaaaagaggtataaagtcctgttcccaagtccaaaccactttttaacttaaatcttgagtttttctgaattactcaatttgaagtaattctctttatatctgaaaaatggttttattgaaacgtttgagattaaaaaatatgcattgcaagaagcatatgacaaacattctgagagtacaaaattagttgtaaaaaataacataatttaccagtaaacccactcatatagaaatgtgcaaagccttttgatataaaaagttttgtacaccaagcacctatttttataacttagcttcccatggagagataatggcttgcgtgcattttatgtatccataacatacatacaaggctcggtcttttcaatgggataacagttcacaactcttcgatttgaattgtaatgaatctggtgacaaggatttttctctaatggattccaaagttagccagaacttttaatgtcaagatgaaaaagggtgtaaggtgttatattttcttcaattcctttaccacaggaggctaactccacaatttccctcatgtttctcattcagaaaaaaaaatattaaatttgtgttcagaattatttgatgattgcttctttgtgctgatgtttcagttcctgaagtcaacttggctctcacaattttctaaggtcaggttattgacttagggttgtataaacatttttttctggtttttggattttcactgagaacgaccttcccttaatcgtcttctagatccttgaacttttttgttggcttgcaacttcctcacgggtgtgtcttcttgtaacaatttcttcagagtttcttctgtttctccacctccagtagaaatcctagtgtattttatttcaggacctgtaatgattcgttcttctcgtgtctctttttcagttatttccacaggcactccatcaatgattttggtgtattttttaataattggctctccatggatcacttcagttattgtttcaactgctggaaatacttaataaattaatcaaatacatccaaattaagtttgttcgtggtagcaccttcaaagaaatccccgtgactgtctatagacccacactaacaaaagtcaaaattgaaggtgaacctgaattcagactgattaaagaaggtgaaacaataactgaagtgatccatggaggtgcgttccttatgttacctggggccgactaccttcgctgtgattattttgaaatagtgttggtttagaaatattgaacatctgatattttctcttagttcttattttataaaaattgtgggaattatttcctcagctatgagttcttattagctggtcagaaataaaacatagttagcttttaatggatctagttggaattaatttatctattaagtcactgggcccaacaaaatgtcatgatttttgcatatacaagtgaggattgtggaataaaattgtaacattaatgtcagtataaaaggaaatattagaaacagtaggaaaaaatgaccattgtataagtctctgtctaataagccactccactactaggatttatgatagggctcccattccaatgatatagaactccctggattctcactaagtatttattccacatccagaaaacaagtatggcatggagagttaggatgtcaaatggccctctctctcaaccaagattcaggacatagctattaccttttagatccctattgatatgatttttgggggatatgttctaaaaatgtttatgattgaatcttaaatggtaatatttgtagaaatatagttaatcattacaatgtctagcttatggatgtatagtcacaatatgagggtaaatcaaatgcatttgtattcccctgcttttagagccaattattaaaaaatacaccaaaatcattgatggagtgcctgtggaaataactgaaaaagagacacgagaagaacgaatcattacaggtcctgaaataaaatacactaggatttctactggaggtggagaaacagaagaaactctgaagaaattgttacaagaagaggtcaccaaggtcaccaaattcattgaaggtggtgatggtcatttatttgaagatgaagaaattaaaagactgcttcagggagacacacccgtgaggaagttgcaagccaacaaaaaagttcaaggatctagaagacgattaagggaaggtcgttctcagtgaaaatccaaaaaccagaaaaaaatgtttatacaaccctaagtcaataacctgaccttagaaaattgtgagagccaagttgacttcaggaactgaaacatcagcacaaagaagcaatcatcaaataattctgaacacaaatttaatatttttttttctgaatgagaaacatgagggaaattgtggagttagcctcctgtggtaaaggaattgaagaaaatataacaccttacaccctttttcatcttgacattaaaagttctggctaactttggaatccattagagaaaaatccttgtcaccagattcattacaattcaaatcgaagagttgtgaactgttatcccattgaaaagaccgagccttgtatgtatgttatggatacataaaatgcacgcaagccattatctctccatgggaagctaagttataaaaataggtgcttggtgtacaaaactttttatatcaaaaggctttgcacatttctatatgagtgggtttactggtaaattatgttattttttacaactaattttgtactctcagaatgtttgtcatatgcttcttgcaatgcatattttttaatctcaaacgtttcaataaaaccatttttcagatataaagagaattacttcaaattgagtaattcagaaaaactcaagatttaagttaaaaagtggtttggacttgggaacaggactttatacctcttttactgtaacaagtactcattaaaggaaattgaatga

SEQ ID NO: 497232 - DNA, 1818 bp, Homo sapiens
  misc_feature (230)..(230): n is a, c, g, or t
  misc_feature (232)..(232): n is a, c, g, or t
  misc_feature (234)..(234): n is a, c, g, or t
  misc_feature (240)..(240): n is a, c, g, or t
  misc_feature (244)..(245): n is a, c, g, or t
tctcttcctccctgtgttctttgtttctttgttctgtgtttcttgcttttttgcttttcgtcccttctattctgtcctggtgtgatagtgcttgactctcgccacccgtgttaagccgtcccggtttttgggggacccaccgttgcccgtgttctgtgacccttgccacttacatacaatggcgcgccccaccgaaggtttaaatttttgtggccaagccgcacacattntntngtgttntttnnttttacttcaatttcctttaatgagtacttgttacagtaaaagaggtataaagtcctgttcccaagtccaaaccactttttaacttaaatcttgagtttttctgaattactcaatttgaagtaattctctttatatctgaaaaatggttttattgaaacgtttgagattaaaaaatatgcattgcaagaagcatatgacaaacattctgagagtacaaaattagttgtaaaaaataacataatttaccagtaaacccactcatatagaaatgtgcaaagccttttgatataaaaagttttgtacaccaagcacctatttttataacttagcttcccatggagagataatggcttgcgtgcattttatgtatccataacatacatacaaggctcggtcttttcaatgggataacagttcacaactcttcgatttgaattgtaatgaatctggtgacaaggatttttctctaatggattccaaagttagccagaacttttaatgtcaagatgaaaaagggtgtaaggtgttatattttcttcaattcctttaccacaggaggctaactccacaatttccctcatgtttctcattcagaaaaaaaaatattaaatttgtgttcagaattatttgatgattgcttctttgtgctgatgtttcagttcctgaagtcaacttggctctcacaattttctaaggtcaggttattgacttagggttgtataaacatttttttctggtttttggattcacacccgtgaggaagttgcaagccaacaaaaaagttcaaggatctagaagacgattaagggaaggtcgttctcagtgaaaatccaaaaaccagaaaaaaatgtttatacaaccctaagtcaataacctgaccttagaaaattgtgagagccaagttgacttcaggaactgaaacatcagcacaaagaagcaatcatcaaataattctgaacacaaatttaatatttttttttctgaatgagaaacatgagggaaattgtggagttagcctcctgtggtaaaggaattgaagaaaatataacaccttacaccctttttcatcttgacattaaaagttctggctaactttggaatccattagagaaaaatccttgtcaccagattcattacaattcaaatcgaagagttgtgaactgttatcccattgaaaagaccgagccttgtatgtatgttatggatacataaaatgcacgcaagccattatctctccatgggaagctaagttataaaaataggtgcttggtgtacaaaactttttatatcaaaaggctttgcacatttctatatgagtgggtttactggtaaattatgttattttttacaactaattttgtactctcagaatgtttgtcatatgcttcttgcaatgcatattttttaatctcaaacgtttcaataaaaccatttttcagatataaagagaattacttcaaattgagtaattcagaaaaactcaagatttaagttaaaaagtggtttggacttgggaacaggactttatacctcttttactgtaacaagtactcattaaaggaaattgaatga

SEQ ID NO: 497233 - DNA, 772 bp, Homo sapiens
ggtgcatctgaccccgaaaggttaaagcttccatcagagtgggaagggccaggagtggggaggtcccagacagggacagcacagaagggagaatgagttgggagatggctgccgggagcagaaccgggttggaggagactaaggaggccagaggcgcccgacggcacgtgcatctcgctctatggggcttctgagtggcctctccctttctagacaatctgacagatacagtagtggggtctgcgcggaacgaggctgagagggacgaagtgcatgagtgagtgggacgcgtgacgggtgcctggtgggcaaggagggccactacctggcgcctgatagacatgttgctatgtggagcgtggtagataagacgggtgtggaaggtcatgccgaattgaggcgccagcatgacatgagtagcttccgtcatgccacatactatgacatcaaggcatagtagacccataggtacaccatcagcacacacgacgacaagggtaccaactgcccacaagagccccgaagacgaggcgaagaggtaacaagccacaacagatacgcacgcgtgcgcccccaaccacgtggagtgcgccttggacagatgtggcgcgacgaaacaaagggacgagacgacgcgcggaaggacatacaaaaggcagaccaggagcagccgagcaaatccaccaaggagagggaggagagacggaacaaacaaaccaacagaaaacatacaagaggacaatcatcaacaaaaacaaacgcgtgaccgaac

SEQ ID NO: 497234 - DNA, 1568 bp, Homo sapiens
tgcgcgacgcttccatccactactgtgattctgcagactggaaaaaactcctgcacagcctgcagactgcacattattagcgcgaaccaggatgcttttaagggaatgactagtgaagaaaaagaaattctgatacgggacaaaaatgctcttcaaaacatcattctttatcacctgacaccaggagttttcattggaaaaggatttgaacctggtgttactaacattttaaagaccacacaaggaagcaaaatctttctgaaagaagtaaatgatacacttctggtgaatgaattgaaatcaaaagaatctgacatcatgacaacaaatggtgtaattcatgttgtagataaactcctctatccagcagacacacctgttggaaatgatcaactgctggaaatacttaataaattaatcaaatacatccaaattaagtttgttcgtggtagcaccttcaaagaaatccccgtgactgtctatagacccacactaacaaaagtcaaaattgaaggtgaacctgaattcagactgattaaagaaggtgaaacaataactgaagtgatccatggagagccaattattaaaaaatacaccaaaatcattgatggagtgcctgtggaaataactgaaaaagagacacgagaagaacgaatcattacaggtcctgaaataaaatacactaggatttctactggaggtggagaaacagaagaaactctgaagaaattgttacaagaagacacacccgtgaggaagttgcaagccaacaaaaaagttcaaggatctagaagacgattaagggaaggtcgttctcagtgaaaatccaaaaaccagaaaaaaatgtttatacaaccctaagtcaataacctgaccttagaaaattgtgagagccaagttgacttcaggaactgaaacatcagcacaaagaagcaatcatcaaataattctgaacacaaatttaatatttttttttctgaatgagaaacatgagggaaattgtggagttagcctcctgtggtaaaggaattgaagaaaatataacaccttacaccctttttcatcttgacattaaaagttctggctaactttggaatccattagagaaaaatccttgtcaccagattcattacaattcaaatcgaagagttgtgaactgttatcccattgaaaagaccgagccttgtatgtatgttatggatacataaaatgcacgcaagccattatctctccatgggaagctaagttataaaaataggtgcttggtgtacaaaactttttatatcaaaaggctttgcacatttctatatgagtgggtttactggtaaattatgttattttttacaactaattttgtactctcagaatgtttgtcatatgcttcttgcaatgcatattttttaatctcaaacgtttcaataaaaccatttttcagatataaagagaattacttcaaattgagtaattcagaaaaactcaagatttaagttaaaaagtggtttggacttgggaacaggactttatacctcttttactgtaacaagtactcattaaaggaaattgaatga

SEQ ID NO: 497235 - DNA, 3343 bp, Homo sapiens
  misc_feature (230)..(230): n is a, c, g, or t
  misc_feature (232)..(232): n is a, c, g, or t
  misc_feature (234)..(234): n is a, c, g, or t
  misc_feature (240)..(240): n is a, c, g, or t
  misc_feature (244)..(245): n is a, c, g, or t
tctcttcctccctgtgttctttgtttctttgttctgtgtttcttgcttttttgcttttcgtcccttctattctgtcctggtgtgatagtgcttgactctcgccacccgtgttaagccgtcccggtttttgggggacccaccgttgcccgtgttctgtgacccttgccacttacatacaatggcgcgccccaccgaaggtttaaatttttgtggccaagccgcacacattntntngtgttntttnnttttacttcaatttcctttaatgagtacttgttacagtaaaagaggtataaagtcctgttcccaagtccaaaccactttttaacttaaatcttgagtttttctgaattactcaatttgaagtaattctctttatatctgaaaaatggttttattgaaacgtttgagattaaaaaatatgcattgcaagaagcatatgacaaacattctgagagtacaaaattagttgtaaaaaataacataatttaccagtaaacccactcatatagaaatgtgcaaagccttttgatataaaaagttttgtacaccaagcacctatttttataacttagcttcccatggagagataatggcttgcgtgcattttatgtatccataacatacatacaaggctcggtcttttcaatgggataacagttcacaactcttcgatttgaattgtaatgaatctggtgacaaggatttttctctaatggattccaaagttagccagaacttttaatgtcaagatgaaaaagggtgtaaggtgttatattttcttcaattcctttaccacaggaggctaactccacaatttccctcatgtttctcattcagaaaaaaaaatattaaatttgtgttcagaattatttgatgattgcttctttgtgctgatgtttcagttcctgaagtcaacttggctctcacaattttctaaggtcaggttattgacttagggttgtataaacatttttttctggtttttggattttcactgagaacgaccttcccttaatcgtcttctagatccttgaacttttttgttggcttgcaacttcctcacgggtgtgtctccctgaagcagtcttttaatttcttcatcttcaaataaatgaccatcaccaccttcaatgaatttggtgaccttggtgacctcttcttgtaacaatttcttcagagtttcttctgtttctccacctccagtagaaatcctagtgtattttatttcaggacctgtaatgattcgttcttctcgtgtctctttttcagttatttccacaggcactccatcaatgattttggtgtattttttaataattggctctccatggatcacttcagttattgtttcaactgctggaaatacttaataaattaatcaaatacatccaaattaagtttgttcgtggtagcaccttcaaagaaatccccgtgactgtctatagacccacactaacaaaagtcaaaattgaaggtgaacctgaattcagactgattaaagaaggtgaaacaataactgaagtgatccatggaggtgcgttccttatgttacctggggccgactaccttcgctgtgattattttgaaatagtgttggtttagaaatattgaacatctgatattttctcttagttcttattttataaaaattgtgggaattatttcctcagctatgagttcttattagctggtcagaaataaaacatagttagcttttaatggatctagttggaattaatttatctattaagtcactgggcccaacaaaatgtcatgatttttgcatatacaagtgaggattgtggaataaaattgtaacattaatgtcagtataaaaggaaatattagaaacagtaggaaaaaatgaccattgtataagtctctgtctaataagccactccactactaggatttatgatagggctcccattccaatgatatagaactccctggattctcactaagtatttattccacatccagaaaacaagtatggcatggagagttaggatgtcaaatggccctctctctcaaccaagattcaggacatagctattaccttttagatccctattgatatgatttttgggggatatgttctaaaaatgtttatgattgaatcttaaatggtaatatttgtagaaatatagttaatcattacaatgtctagcttatggatgtatagtcacaatatgagggtaaatcaaatgcatttgtattcccctgcttttagagccaattattaaaaaatacaccaaaatcattgatggagtgcctgtggaaataactgaaaaagagacacgagaagaacgaatcattacaggtcctgaaataaaatacactaggatttctactggaggtggagaaacagaagaaactctgaagaaattgttacaagaagaggtcaccaaggtcaccaaattcattgaaggtggtgatggtcatttatttgaagatgaagaaattaaaagactgcttcagggagacacacccgtgaggaagttgcaagccaacaaaaaagttcaaggatctagaagacgattaagggaaggtcgttctcagtgaaaatccaaaaaccagaaaaaaatgtttatacaaccctaagtcaataacctgaccttagaaaattgtgagagccaagttgacttcaggaactgaaacatcagcacaaagaagcaatcatcaaataattctgaacacaaatttaatatttttttttctgaatgagaaacatgagggaaattgtggagttagcctcctgtggtaaaggaattgaagaaaatataacaccttacaccctttttcatcttgacattaaaagttctggctaactttggaatccattagagaaaaatccttgtcaccagattcattacaattcaaatcgaagagttgtgaactgttatcccattgaaaagaccgagccttgtatgtatgttatggatacataaaatgcacgcaagccattatctctccatgggaagctaagttataaaaataggtgcttggtgtacaaaactttttatatcaaaaggctttgcacatttctatatgagtgggtttactggtaaattatgttattttttacaactaattttgtactctcagaatgtttgtcatatgcttcttgcaatgcatattttttaatctcaaacgtttcaataaaaccatttttcagatataaagagaattacttcaaattgagtaattcagaaaaactcaagatttaagttaaaaagtggtttggacttgggaacaggactttatacctcttttactgtaacaagtactcattaaaggaaattgaatgaaaaaaaaaaacccccaaagggcggccgct

SEQ ID NO: 497236 - DNA, 850 bp, Homo sapiens
agcggagggttcaccctccgctccacagggtcggcagcagggcggggcctccggaagctccgccccacgctttcccggggcgcatgcgacgtgggccggagcgtctggaagctccgcccgtcgcactgtagagtcggccgaggcgcacgaggtatttttcacgctccgcccctctgcaggctaaagtgcgtgggcgggaagcggtgggcagggtgccatctggctccgcccttctcctgtggtgtgggccaggcggcggcttcctcctcctgcagcagccacaggctccactctgatccttctcccgcggcatggatccttctcccgcggcgtggatccttctcccgcaaatctccgtgcgcgtccccagtcagtacccgcagcctcccgacgcacccgcttggctccaagcctcccttaccccaggtttcctggctaagagagagacagagggagagaggggggaagacgagagaacaggcaatgggaggtgatggtgagagcttattggaacagacaagagggaggaaacccacattccttcattccccatccattcatttatggccttatgtattccattgaatcttcacagctctagaaaaaagtgtgctacaattattccctttattacatgaggtcactgaggcacagtttaagaaaatttgccagcaggcacagtgggtcactccggtaattcgcagaactttgagaagggggaggaaggtggatccattgaagcccaggaagttggagaccaggtctgggcaacaatgggggagaccccgtttctacaaaaacttaggcaaaattagcaaactggttcacacttgtagtcccagggtattca

SEQ ID NO: 497237 - DNA, 240 bp, Homo sapiens
agaagaaagagcgcaatgacataagacgatcactgcctggctccacagtgctgggattacaggcgtgagccactgacccaggctattttacctttttcaatgactctgtctcctcagacctgaaagtgattcacagaccatggggcccagaaacccgatcaaagtaacgtgtgcattgagtagacatgaggacatgaggatctccactttcttcctcttgctaaaaagtgccctacaacg

SEQ ID NO: 497238 - DNA, 1628 bp, Homo sapiens
gtgggtaccactcgtgtccatgtggtaccacgggaagaccacgctgactgcagaacagtcacgaagattctagctgagcggaggtgggtgctaatgttcaagaagtacgaggagattgacaatgccccggaggagcgagctcggggtatcaccagtcaatgcgtgttcattgtggatgtataacactgtcctgacctgtccatgtacagcccacgacgatgacttgcccggtgtcaagtgctaagcattatgttaatgaatatggatcacaggcattgaatgcgctcgacggtctgcaatcctggtggtagcagtcaactgacgagccctatggcgcctcagaagccccgtagaaagccacgtaatttactagggaccagaaagcagcattttgctgcgctggcactgcgattgctgtggcgggctgatattgattgaaccgaagggtgctgtaacgagctggttccccagcgtaacttcttgcgaagcaatgggcttgggagaactgtggtgggcacaaggttggggaacgagatccgggtggcaaggaccttgcttcctagcaccggaacggcttttggggctttagttagcggatgcgggcggacggtggacgtaacccccccgaagcttcaactaccggtgagatggggctttcgtcggcggtccgtcttgggtgggcgcgccgtattgagacgtgtggattccgcgaggaagcccacgttggcaagggttaagggggcacttgaacacgattgtcctaggtggcaagggaaaagggcctaagcgtggtggattagcgattgttagtcgaaccaacggtataatccactttctcgccaatgggtatggccacgcaggaggccctggtcagcgaacctcgtttggggccctgacaaaatgccctattatccgcatttggccatatgcacccttggtttagaaaaagcgtcgaggcagtcgtttacctccccttggatctcaggcgttggtagtccgcgagaatagggattcaacgccgtagagtggtacttggacactaccgtgcattaacaagcataaaagaaagggctggggttgcggttacttttcctggacgaccacagaacaactgggggaatgcgaacctgcataggtatgttggaaagagcctttccacattaaaggggcgacatacttcaccgcacacacaaggaaggaacgagttacatgctgagcacagacgtttggctctgtgcgttcgagagccaggcgcggcgacagtttctggacatgaagttatggtgtaaccgccatcgcagccgggaagtcgacacgatgagaggaatcagaatgtggggacacggcgcaagaggacccccgtgcgaagcgaagtataaagccccactccggcaggggacccacagttggcctacctggcccggggccgttgagagacaggaccaggcggacaggagagaccattgtcgccggcgccagagtgagggccactagtgtgtgacagatttggggagacagcagcgcacccaagcgtggaagcgcacaacacggagaggtagcaccacagatcgccaaaaacgaggtgatagcgaagagggcgcccagagagcggtagagaaaacggttcc

SEQ ID NO: 497239 - DNA, 346 bp, Homo sapiens
gagatcccctcccacgccgcgtctccatacagccaatttcagaacattttcatctcttcaaaagaaaccctgtacccttcagctgtcaccctcctggtccccgtccggtcctcgtcccgccctcagcagccacgcactgcctgtaaagtcccctgtcctgccctgtaggtggaatctataccttggggtctgttctgacgttcacctaacagcctttccaggctcagctgtgctattgtatggaccagggggttgttttgtttttgttgtttgttgattgtgtgtgtgtgtgtgtgtgtgtgtgtgtgtgtgtgagagcctggtatggggcttcggcgtgtgcagg

SEQ ID NO: 497240 - DNA, 411 bp, Homo sapiens
aacgtgacggtgagcttgtcacttgtgccacggacactccagccagggcgacagatcacgactccgtctcaaaaaaaaaatgccgagatgttataacgtcgcggggaaaaaaatagagcccagagtgaaaatatcctacggaatccgcagggaaggcttttctgataggtaggcactgaagcaaagctgaaagacgaacgggaccaagtgaatcagtcatctcagagaggagtgcttcaggctgagggaacacagatgcaaagaccctgaggtgggaaaaagctcagcatgttgaaggaaaagaccagtgtggctgaaatgacgtgagcaaaaggaagtactatcagggtcttccaggcaggatgaccaggtactttatcattcaaactgaaaggctctgactcggatctt

SEQ ID NO: 497241 - DNA, 735 bp, Homo sapiens
gtacctcagcaaggtgccactagaagcgccaggctgggtgcctgcctctgagcgccccgcggggtgccatggatgtgtgaaacagcatgaggagcaggtggggccctgtgcccccgccagttgcaccctgtgcggaccctggcttgtggctggtgctccggggtgggctggctgggatgcccaagaagtacgcagtgacctgacgactaccatgttgtccaagcaggtgctggtgcctgggtgtgaactggcaaagtgctggagtgcttccatctggcgcactggacagaagtgtgccctgaagctcctgtatgacatgccccaatggccctggcaggatggtagaccatcactggcaggcttctggctggcccccatattgtcttgcatcctggatgtgtatgagaacatgcaccatggcaagctgctgtctcctcatcatcatggaatgcatggaaggtggtgagttgttcagcagtgattcaggagctgtggctgaccaggctttcactgagagagaagctgcagagataatgcgtggatattggcactgccatccagtttcttgcacagccataacattgcccaccgagatgtcaaggcctgaaaacctactctacacatctaatggacgaaagacgcagtgcttaagctcaccgatattggctttgctaaaggagaacacccaaattgcctgaagaacctggtatattccctaatattgggccttagtcc

SEQ ID NO: 497242 - DNA, 381 bp, Homo sapiens
gatctcccgtcatgcgcggcaaggcgtcgatggtctcagcgacccgctcatggaaccactccgcggagatggaaccatcgatggtccccaggtgggtggcgaacagcggcaggacccagtcgcgactgtatgcgccgagaagacgaagaggcgggttggtgtcgacggcttcagccaactgctgtggtgttgctgtcaacgggtcccccctgccggcctcaggtgtcgccagtatctcctataccgacgacacggtgccgctttggcgggcggacgggggctcgaggagggcgaggatgcgtgcgcctgggcaccctcatccgccagatgccctcggcggtatgtggtcggggtcggcagcccggggtacgtagcgttctt

SEQ ID NO: 497243 - DNA, 832 bp, Homo sapiens
agcggaagggaataaatgctggccccgcggagcatctgtggcaatgtgcttgggtctgtggaatgtttgttatttggctatttacagtagatcttgctgctgctcactttttgggacggctctctatttatgagctgtgatactcgctgcagaggtctgtgggtttacttctgaagtcggctagagtaaccagcccacgaacccaccgggaggaacgaaaaactcgggatacgctacctttaagagctgtaacgctcgctgcaaaggtctgcagcttcacatagataatgaactcagagtaccaacccaccagaagaaaaaaaaaaaaactctggacccgtcttaacagttggaggaaggaactccaggtactgcattccttaagagctgtaacactccctgcgagaattggcggcttcgttttggaagttcgtgagaccaataacctgctgctcagtggtgaacgatcccgggaacatgtccttggtgaaggagacggtggacaagctgttgaaaggctacgacattcgcctaagacccgacttcgggggtcccccggtctgcgtggggatgaacttcgacatcgccagcatcgacatggtttccgaagtcaacatgccttcttactgtgggaggtgcttagcaagcggaatacaatcaaaaggcgtgaagacacaggcggaagaagaaatcgaggagcagactggaacccgttaaacactttttctaaacagatttccaatccgtggccaacatggcaatagtgcaattcctccaaggtccttcctcctggaaccaaactctgggcattagcacgaattaccccggagaa

SEQ ID NO: 497244 - DNA, 174 bp, Homo sapiens
agagcagaggcccaggctggagtgcagtgccactataacgtcttacagaaggcttgaactcttgtgctcaagggatgtcccacctcagactaccaggtagccaggacttcaggtacacgccaccatgcctagctaagcttatgacttttgtagacacaaggtctccgctgatgc

SEQ ID NO: 497245 - DNA, 907 bp, Homo sapiens
gatctctgctatggctggtgagcgctgaagggagggactcggcagcaatcttgtcatgcatgacctgctcaccgctctctctcacgtcgacgccttctcgatacgacatcgcactatgggtccgtggagccacagtctagtgattgaggcgagacagtcctcgagtgttgcatgcgaggcccgaggactggaataggtctagccatcttcctgcgtactggagtcaggcttccaaccattgggaagaataacatgtatgttagtcctagggtagctctagctaggcttcgctcgagtgcaacatgtctctcctaaactaccttctatttcatgaccatacaattacacgagatccctgagggtatgccattgacacgggttctctggatggcacattgtcttggacgaactgtcaaggcacaacctctggagtcaatctacctggactctcgaggttatgagtagcactgagggcctgatgtatgacttagcagtgatacaatcgggatatgcgtagcctgagattgtatactgtcttcaggagctggaggaccaagggtcacccggcctcaggtcacgcccaaggccaaacccagtgttcagtctgttcccggcctcctactgaggaggctccaagcccaatcaaggccagcactagtgttgtctgatcaggtgacttctacccgggagctgtgacagtggccgtggaagggcagattggaatgcccgtcaaggccggagtggaagaccaccaaatccatccaaagtagagcaacaacaaagtacgcgggcagccagatacctgagccttgaaggccgagcagtggaagtcccatgggaaggctacagctgcagggtcacgcatgaaggggagcaccgtggagaagacagtgggccctacggacat

SEQ ID NO: 497246 - DNA, 159 bp, Homo sapiens
gtatataagcttatggactcacagtaaacattgacattactcactgcacatcatttgttagtcgctaggcagatagcgatcaaacatttgatttttgacattatgatacccgtcaagtcaaagcccagacactatttgttgtcaaaggggcttttcggg

SEQ ID NO: 497247 - DNA, 332 bp, Homo sapiens
attcttgttattctaagaagttgtgctacataaagttactgcaaacactgaattagagaacagccaactatcgttcctaggaggaatacagggttgggttcctgcagacctctggtcacaacattgtcatcatccagtcaacacataaccttgttttatgtgtgtttctgtttaaagaactcactgtaactcaggcctgaatggcgcttatctagcacacctgttttctccagaaggcacatcaccgcctcttgcacttaggaacactagagagcactgcagcaccatgcctgggagccagtttaagcagcaaaatcaccaacaggaaaagc

SEQ ID NO: 497248 - DNA, 322 bp, Homo sapiens
tgggacaaaagagtctgaacaacagtcttcagccctagacctttcctctgacagagtctaccaaaatgagaaggaaccagaaaaccagccctggtaatctgacaaaacaagacttttcaacaccccccccaaaaatcacaccagttcatcaccaatggatccaaacaaagaagaaatcactgatttatctgaaaaagaattcaggttagttattaagctaatcagggaggggccagagaaaggtgaagtccaatgcaagaaaatccaaaaaatgatacagccactgaagggagaaccattcaaggaaatagcttaaattaaa

SEQ ID NO: 497249 - DNA, 421 bp, Homo sapiens
ggcggacagatcaagaggtcaggagatcgagaccatcctggctaacacggtgaaaccccgtctctactaaaaatacaaaaaaagaaaaaagaaattagctgggcatggtggtgggtgcctgtagtcccagttacttggggggctgaggcaggagaacggcgtgaacctgggaggcggagcttgcagtgagccgagatcgcaccactgcactctagcctggacgacagtgacagactacgtcaaaaaaagtcagtggaaaggtaaccaaaaatgacacagattatagaattagtagacaatgaaattcagttaaacaactgtatcccacatgttcttaagctagagaaaagactgaacatgatataagtagagacacagaaaataggctgggcacggtggctcatgcctgtaatccccggca

SEQ ID NO: 497250 - DNA, 159 bp, Homo sapiens
gtggtgtggcgttctagaggatcccatgggagatgtcacattcttccaatggggcaatcatgccgtggctcgtagaaggcggtgtgccatctctttggtccattggtatctgtattcttagcacttagtatcaggattcgcccggaggtgttgaagctg

SEQ ID NO: 497251 - DNA, 1271 bp, Homo sapiens
gttctagatcgcgagcggccccctttatttttttttattttattctgtagaaaaacattataataatagggaggtgacacggaaaaacaaagcaagggcaggaggtgtggggcattcaaaccagggccagggctgtggacactatagggaaaagcaaaccagattaagaaggcgaggctatacttacaggttagcaaagtggagaagcccttcttcacctcgagccaacttccaagaagataccctcatgtgagtcccatgggtgccctcataccgccaaaacttatagccccacagcaccgtggtctccatcatcttccagaacaaagaaacagcgagggcagagacactgaacgtggctcttcattttacagggagcgtgtcttgtgaaaacagtggtgtgtgtttatacgcaacacacaatgtgtagagctgtgccccaagaggtttcccatacaaacgccacacctgtgcgtgtgcgacacatatgagggggttgtgttttgcaaacccacatgtgtccacggtggaataacacaagtgcaatttggaacacccgtgggattcttataaacatgtgggccatagcgaacccaagtcccgtggacattcatatggggaataaaatacccctgttagactatgggggtgccccaatatttcgtgagaaaagtgaatcacatatgtgagcgacgtgatctacacagaactcccatgggtcattggaggaagccacattacaaaagtgggggtttttccccataggtttacaaggtttgataaaaagagtacacactctgacccacaaaagaacaggggtattctcacccccggaaaaaaacgcgcaagagacccaagagtcagaagcattgggggacccacaaccaaacaaaaaatcaccccagaccaccgagaactgggcccgggggaacaaaaaaggggtaaccccacatagacaacatcacggcaaggagaggatggcaaccaggagacacaagagagacaacacccactcagacacgggggaccaaaaagcaaaacacacacacacacgcactatatagaccacatgggaacacacagaggaagggaagtgccccaaagcgaaaaccgggggaaacaagaaacagccaagggaaaaaacacggtgcagagaaaaccccaggagcaccagcgacaccgtacggccgtcacgggacagcgaaacacgagaaacgaaaaactacatgaaaaacaggcagccccgagaaaacagggaacaaacccagaaa

SEQ ID NO: 497252 - DNA, 223 bp, Homo sapiens
tactaatggtggtactaatggtgtactaaatggctgttacctaaatagctgttactaaatggctgtacctaaatggctgttacctaaatggctgttacctaaatggctgtggtagaatcataccccatggataccacatattaaaccatgtggtatgattctaccacagccatttaggtaacagctatttaggtaacagcaatttggttcccgcgctttgggt

SEQ ID NO: 497253 - DNA, 171 bp, Homo sapiens
cgatacacgcgcacacgctctgaagctcactagcacggtgtgtcttgtcacgttccataaatgtcattcctcatagcgttgtgtacatcaccatgtctggctgtcattgctgaagccacgaagaaggtgtcacaaaatcgtcatggatgctggagtctctgcccttgggtg

SEQ ID NO: 497254 - DNA, 353 bp, Homo sapiens
atatcatatacacaatcataatactacatgacaatccatagacatcgctgtcagacataaccagagcctacgttattcacacatctagtaagccatctacctgcacgacaacacatcatgacccaccaatcacatgtctatcatatagatacaacccagcccatgaaccctaacagggagacctcatcgagccctcctaatgacctcacggactagccatgtgctttcacttccactccataacgctcctcatactaggcctactaaccaacacactaaccatataccactgatggcgcgatgtaacacgagacagcacataccaaggccaacacacaccaactatccaaaaa

SEQ ID NO: 497255 - DNA, 878 bp, Homo sapiens
gagatgaacgtccatgcgagagagtgtggggttataaggtggtcatgagtgcgagttctggatctggtcttattactgactagtgctgatctgtgtggcggattccaatcctgttcaggagccgttggctggcctgtcttgacaatctgggagctgacgaccttgctactgagttggtatgtgacacgaagttaccatggataccgtagcaagcatgctaacatgctctggtgctcctgaatacagctggtgccacagtatgtgagctgaccatataggttcgtcattccataagcgttccaccactgaatgttgtgaaggacccacataattgtcgaacaacttacgcgtggtgcgtcacattttccctagccccactcgcaaggggcttggggggtgggcagaatggcgttgtcgggaatgcattcggggtcatcgaacattgggataccccttgcggtgttggcttcacctcggggggttttccacatgggctaatttccatattcctttgatgccgtacggcggtgccatacactctggcagtttccacggccttgtggtggagtctggcaatgtggggaacgcgtaagctcattgccacaaaaaacgcacggaattcaatgtacccacggtgtaaatctttctcaggggtaaggtacgcatttgtgtgccactttggctacctccaagtggtacgtggactgcatggccataggtttgcgttcggaaaacttgctcctgggaaggcctttcaggggctagaatactcgactcgccgtggcattcctaagacctttccctcgagaatgtgttacctaggggggcacttaaccacagtggctgtggaagccgcgaccactgggagctgcgaggaa

SEQ ID NO: 497256 - DNA, 300 bp, Homo sapiens
ttccgcgttgaagacgcgcagctcggcgatttcgccgttggcggcgaagtcaaggcggacatcttcgaagtcggccagatcgtcgacgtccagggtgtcaccaagggtaagggcttccagggcaccatcaagcgccacaacttccgtatgggcgatgcaacccacggtaactcgctgtcgcatcgcgcgccgggttcgctgggtcagcgccagaccccgggtcgtgttttcccgggcaagaagatgtcgggccagatgggcgcggtgcagcagagcacccagaacctggaagtggtcaag

SEQ ID NO: 497257 - DNA, 462 bp, Homo sapiens
gggggaaaaacccccgctttttttttgcccaagcttgatcccatggggcgggggctttcccctgggggggggggggggctttgggttaccctggggggggcccactcccggttttttacggcctatggggggtcccggcccaaagacggcccgggcccccatttggtcctccgggaagggggggtaaaaagtttcccacggccccttggtccttggggagggggaaaaaccccccctccaagtttaagtggggggccccccccttgggcgcaaacatttttcggcgccctgggcccaaatttcgggggccggggggacccctttttttaaagggggccccccccggggggggcctccacttttgtcccttttaggggggggtaatttcgggtttgggggaaaaagggaaaaggggttccgggggaaaaagttttccctccaaattccaccacaaataaggcg

SEQ ID NO: 497258 - DNA, 355 bp, Homo sapiens
  misc_feature (5)..(10): n is a, c, g, or t
  misc_feature (14)..(15): n is a, c, g, or t
  misc_feature (18)..(18): n is a, c, g, or t
  misc_feature (20)..(23): n is a, c, g, or t
  misc_feature (27)..(28): n is a, c, g, or t
  misc_feature (32)..(32): n is a, c, g, or t
  misc_feature (38)..(38): n is a, c, g, or t
  misc_feature (40)..(41): n is a, c, g, or t
  misc_feature (47)..(47): n is a, c, g, or t
  misc_feature (50)..(51): n is a, c, g, or t
  misc_feature (54)..(54): n is a, c, g, or t
  misc_feature (61)..(61): n is a, c, g, or t
  misc_feature (64)..(64): n is a, c, g, or t
  misc_feature (69)..(69): n is a, c, g, or t
  misc_feature (73)..(73): n is a, c, g, or t
  misc_feature (77)..(77): n is a, c, g, or t
  misc_feature (79)..(79): n is a, c, g, or t
  misc_feature (88)..(88): n is a, c, g, or t
  misc_feature (91)..(91): n is a, c, g, or t
  misc_feature (93)..(94): n is a, c, g, or t
  misc_feature (99)..(100): n is a, c, g, or t
  misc_feature (104)..(104): n is a, c, g, or t
  misc_feature (107)..(107): n is a, c, g, or t
  misc_feature (109)..(110): n is a, c, g, or t
  misc_feature (113)..(113): n is a, c, g, or t
  misc_feature (120)..(120): n is a, c, g, or t
  misc_feature (124)..(124): n is a, c, g, or t
  misc_feature (130)..(130): n is a, c, g, or t
  misc_feature (133)..(133): n is a, c, g, or t
  misc_feature (135)..(135): n is a, c, g, or t
  misc_feature (138)..(138): n is a, c, g, or t
  misc_feature (140)..(140): n is a, c, g, or t
  misc_feature (142)..(142): n is a, c, g, or t
  misc_feature (174)..(174): n is a, c, g, or t
  misc_feature (178)..(178): n is a, c, g, or t
  misc_feature (192)..(192): n is a, c, g, or t
  misc_feature (202)..(202): n is a, c, g, or t
  misc_feature (217)..(217): n is a, c, g, or t
  misc_feature (225)..(225): n is a, c, g, or t
  misc_feature (232)..(232): n is a, c, g, or t
  misc_feature (240)..(240): n is a, c, g, or t
  misc_feature (243)..(243): n is a, c, g, or t
  misc_feature (314)..(314): n is a, c, g, or t
accannnnnncccnnccntnnnnggcnnaggnagcacntnnagcccncanngtntgtgtgnagncaggnagcnccgntnaggtagccnccncnngggcnntggntgntnngtnttggtcntgtnaacccnccncntcntntnttggactccctcccccccccaaccactttttntttntcctttaacccaanggagactttntgatgcatcgttttntttgctgngccaaancaggtcanaanagggaaaggaggggctgggggtgaggggccaggccatggccaaggggccagctgcccctcatttatcactntgaccttcacagggacagatctgatttatttattttggtta

SEQ ID NO: 497259 - DNA, 435 bp, Homo sapiens
cacggatgacgaggtccttcaccagcaggttgcactgtgtgggatgggggaaatgatgcagtagttctctggacatcagctttaaaggaggagtctgtcttgacattgggtgcatattgtttccataggatggtgccaaagctgctctcaatgccatcatgcttgcctgaggcttttaccatcatcatcatcttctggtggttgaattcatctctggccagggtgtcaatgtcgttcctattcttaacctgacgccggggcttccgagcatcataaaacattttccagaggtgggaagtcgatgcttgcagcaggataagctgagacgagaggcgtttcaggaacatccccagcaagccatctgcctttttgccaaattctccttccagctcggcctgtgccccagtcagggggaggtccaccatctctaggcac

SEQ ID NO: 497260 - DNA, 350 bp, Homo sapiens
taagtaagcatgaacatctgtattgaggaagccactttgtattacttgctgctaaaaacaccgtaactgggcgtggtggctcacgcccgtaatcgcagcaccttgggaggccaaggcgggcggatcatgaggtcgggagatcgagaccatcctggccaacacggcgaaaccccgtctccatctattcattcttggaatcctcaactcctggcaacttcttccacgtgctacgacgccagatcctgctgccattccggaagccgttaattatcttcacccccaaatcccagttacgccaacgatgctcacgcctttgcagtcaccagtgcgccagcagcctcaggacgcag

SEQ ID NO: 497261 - DNA, 436 bp, Homo sapiens
  misc_feature (110)..(110): n is a, c, g, or t
  misc_feature (327)..(327): n is a, c, g, or t
ggggccccaaaaaaggggtgtttcaattggtgtgtccaccccccccccccccaagaggggggggggtgtggtggggggggaggttttataaacacgcgctgtttgtgacncccgcgcgccccgggggccaccccccccggtgttttttcccccttaaggaaagcgcggccggccccccccccgccgtttttagtttggggggggggggggggattttttttttccccgggagggagcgccccgtggcgccttttgtgggggccccttattatgtgttggggcaaaaacccggggggggggggggggcgaattccccggggttgtggnaccaggggggtgggggggcccccccccccccccccgttcccccccggggggggggggaaaacttttgttttttgggggtttttttttttgaataaaaaagattctccta

SEQ ID NO: 497262 - DNA, 335 bp, Homo sapiens
  misc_feature (294)..(294): n is a, c, g, or t
taagtaagcatgaacatctgtattgaggaagccactttgtattacttgctgctaaaaacaccgtaactgggcgtggtggctcacgcccgtaatcgcagcaccttgggaggccaaggcgggcggatcatgaggtcgggagatcgagaccatcctggccaacacggcgaaaccccgtctccatctattcattcttggaatcctcaactcctggcaacttcttccacgtgctacgacgccagatcctgctgccattccggaagccgttaattatcttctgcccctcatttatcactntgaccttcacagggacagatctgatttatttattttggtta

SEQ ID NO: 497263 - DNA, 297 bp, Homo sapiens
  misc_feature (42)..(42): n is a, c, g, or t
  misc_feature (138)..(138): n is a, c, g, or t
  misc_feature (156)..(159): n is a, c, g, or t
gaagtatctgttttcatttttttcgcgttataaataaaaatnctatgctggccgggcgcggtggctcacacctgtaatcccagcactttgggaggccaatgtgggtggatcatgaggtcaggagttcaatgaccagcntagacaagatggtgaaannnngtccctccccctccccatcccctacttcccttggttagggggggcccttgcaagggggccccccaatgttttgtcccccctgggacactttttagtattaaacgggatggttttaaaaactccatgggggaaccggga

SEQ ID NO: 497264 - DNA, 387 bp, Homo sapiens
taaactgaaagctatcaactctggagactgagtctgcgctgagtacgctacacctgatgtgactaacagtgttcatttgatacattgtacagtctacagataatgaaagatgtgtagggaatggagcgcgcagggcttgataattcagacactggacatagtaaaagtatccctgtacttaataggtttctcaatactgaaccgtgcactaaaagtttaatctgcactgggcgagtgttctgtaagagtcggtaccacgttaagggaagcaggactctgaggcacaccatgaagaatagtcattgtctcataacaaatgggtggcgttgggtggatcagaagccgactgtaaacctattactgaggctaaattaagtgtggatctta

SEQ ID NO: 497265 - DNA, 843 bp, Homo sapiens
  misc_feature (277)..(277): n is a, c, g, or t
caaaaaaaaaaaaaagcaggaaaaagggaatatttagcagtatggtccgttctggatatgtgaatttggtttggtgacaactaaacaagggcattcagcagtttctggacaattaacatacatcattcccacactcctggtcaacaaagtggctttttcactggcctaaaattttagatgtagatatttggaaatagattttttccatttatacccagttttcctttatgatggataccggtggttaaaaggaaaataatttaccaattggatcctntccatcccaaaaaaaaaaaaaaaaaaaaaaaaaaaaaaaaaaaaaaagagagggggcggcgcgcgcgcccaagaagatatctccccgcggcgaggggcgcgccgaccgtttcagcggcctcccccgcggttttggtgggacacaaggggcggcccctctaagagggaggcgggcgtatatatataaagccggagagggcgcggggcgccgggtgttaaaacaacgggcctgggagcggggggagaaaagcgggcgcaaacagggggacaatctgtggggagagaggggacccctataatctcggggggggggggaggcacaatctgtgggcggaaaaaaatcaccctctacaagagggagatttttaaaggggccttccagagggggaaaaaatatatacaaactttttaagaggggggtaataggggggtgtttcaaacacaataacggcggaaaaatgtctgacgagcgagtagtgtagaagaataatggcggcaacagggaggaataataaaatagtagaaaaaattattacccaggcgatattttgattaatatataggggg

SEQ ID NO: 497266 - DNA, 445 bp, Homo sapiens
  misc_feature (47)..(47): n is a, c, g, or t
  misc_feature (58)..(58): n is a, c, g, or t
  misc_feature (113)..(113): n is a, c, g, or t
  misc_feature (116)..(116): n is a, c, g, or t
  misc_feature (137)..(137): n is a, c, g, or t
  misc_feature (142)..(142): n is a, c, g, or t
  misc_feature (152)..(152): n is a, c, g, or t
  misc_feature (193)..(193): n is a, c, g, or t
  misc_feature (269)..(269): n is a, c, g, or t
gcgaaagccggcccttgggcctccacgtcatgatggctctctcctgntgccaccatgnggcccctggtgaatacttcccgatgggatccggctaaagaatatcgcggtatggnttntctcgatgcctggacagcacntcgcngccgacggtncagtgagctgacaaatcaaatggcccgggagtgtctggtgntgtgcaggacaaagggtcatccacaatttgtcccttactgattgctggcatccaacactcatgccggacattggtnccaagagcttgacccaagtccgagccatgatgtactctggggagcttaagtttgagaagagaacgtcctcagcccaggtggaaggtggcgtccatagcctccattcgtatgagaagcggcttttctgaaaagggatccagcacacctcctcggtttttttttcaataaaagtttac

SEQ ID NO: 497267 - DNA, 372 bp, Homo sapiens
ggaccatcttggggtacaggagaatatatgtataggtgatatcttcttagaaaaacaaagtaggtaggactcaatattcagtatgtctttatatatccaacctaagttggtagaatcctttctttgggctggtttgaatttcatatagggagggtgtaacccattgtgcatgagcacagtgacacacaccctgtctgggaaaggattctggctttttttattttattttattttatattattttttatattttgggtagcaagggggtttcaccaagctgcccagactggtcttgaactcctgagctctagtgatcctcccgtctgggcctcccaaagtgctgggattacaggcatgtgccaccatgcctgg

SEQ ID NO: 497268 - DNA, 851 bp, Homo sapiens
cctcataagtgagtactacgatttctatacctggaatcatgtatgtttcatttactggatgttacattttaggaaggaaaatagtttgtttatttaaacaactgaatacttataaactgtgttcctggaagttatttattccataaaaaattgttctttgtcatgaatttataattcctaaatgaagaccaggaaaggtacaattggtgggaaggagagaataggctatataaattcaatgtagagtgtctagatttctctaaatgggaagagtgctttattttaacactaattatgggagcagattcttagcaaattctttggaaaagttaatgttatgatgtgcattaggctgcccatcgtgtatataaatgaagcagattggattttgtattcttacgtttctctgcttggtagttgtggctgtacttaaagaaatacagaatttcatatatttaaaaatgtttaaaattgtgacccacagaacattgtaaatgattaaaactagcatgaaaatattacaactaaaagaattcttaattcacagtgttttacttcgacgatgtgcctttgatttaaattggcgaaacttttttagaaggatacatattcgtgtcgcaacggtctttgaagagctggaataaaattctgcttaggtaagaaaaaacatcaatatagaaaaatttgttgggggtttgccctgagaaaacgtttaaaacttgtttggggcgggcccatgtgtattaacttgtcatggtgtctaaggaaccgtgagaatggtggtttcacaaaaaggggggagagcgttgacactgagggttgggcaaaggatataggccaaggtatagcgg

SEQ ID NO: 497269 - DNA, 910 bp, Homo sapiens
acaggtgtgaacctgtaatcagcctcccaaaatgctggcattacaggtgtgaaccactgcacttgagctggttggagccctgtcatcttgtcattttgatgagaccctatagttttgtttttttttttaatctagccctgttttgtacatcttatgccacagacttggattaactaatttcttgaagaagcagctttggttacttttagtgggaaatgtttgcagatcacaatttaggcgctatatgggttagattgctacccgctgatatcatttccaaactgtgtctttgggtattgctaggaaatgcaatacttttttagagagaaaaaaaatcataaatgtatactagtatttacaattcaaataagagattatggattttattgttttttaatggactatattttttagaatagttgtagccttatagcaaaattgagtggaaggtacagagattttcctgtatctcctgattatggggttcttaatttgtttgattttatgttgtttctctctctctcgcttttttttttttttttggaaacagattcttgtcttgtactctgattggcctgcgtgggcccatcgtatttcctctgcgcctgaaccaattcttgggctcaaagcaactctttccacttaatgtctctccaagtagtttgggccccaacggcattttgcacactatacccagctactttggtcatctttacacagggagtggcgactcatcatcttggtgcaccagcgctggaactttggcgtacaacctctaccggtcaccctcccaagtgtgggattcccgcttagcctgcccacgcggttctttttaccgaagacttggtctcacacctcgtgtgcacatcttactctcgacctatttaccacgtatcgcgtgattagacac

SEQ ID NO: 497270 - DNA, 113 bp, Homo sapiens
ttgtgcagggagtgagccgcattccggggctttcgcgtgctccctgtgggtcctcttccagttcttgactgtgcaggcagctcaggaaaatgtagaccactcacaggatgcag

SEQ ID NO: 497271 - DNA, 177 bp, Homo sapiens
gcgggggtggctagtggctagggccgctgcaacacctcagatattgagtgttatcccattaagctgtacgctaccccacccccagaagcgggattgggaggctggggcatgcattctagtgagcaagactctcagaacgggtgggggcaccgtgggggacacctgaacgaggggcac

SEQ ID NO: 497272 - DNA, 537 bp, Homo sapiens
tcgaatagttctagaggatcccgaagggtgctgcggttgaacaggcttggctgacatgaagttgaggctgcagagtcgtgaactgggtgatgcggttggggtggggatacatatcagaggtggctaagtaaaaagtatgggggaaaaagccagctagaggtgatggaagagagcgtgggtcctctgggtgtgcggactgctcactctgcggatgctggccgcgtaggcgaactgggggaagtgggtccgttgatgcagctccagtaagcccaggtcgtcatcgcgtatcagggggtgcgattgtgatggcctgggcgggaagattcatcatcgaactaccttgtgtcgacctcggcacgtgacctgacggtatgacgggtgggctgcgcttcttctgtgaccaggtcctggccatgatgatgcagagcgaaagaacctgtgctccatgacctcctttggtattcgatgggtcccccaccaaagcttcgtgttggtatccgttcttaagccggccagcaatgcagggacttgacctcg

SEQ ID NO: 497273 - DNA, 359 bp, Homo sapiens
gaagatactatatcaaggtttaatgttgctgacatacatgatgatagtataatgacttgtttatgatataaaatactagttttttcatttataatttctatagggcattcactgtttgagtcaaggttaggcttgttaagtgattaaagtgcattttataacagcagcatgtactaattctattctaaaagaataatattcataaacagaaacaggtttcatatattgtatgcaacctgcaaaattgaattattttgctgatataaaatactaagaactcacttgaggaccatgccaccttctgaaaaggccacacacctacttcttaaatgtgttaaagttacagtgtgtcccagaca

SEQ ID NO: 497274 - DNA, 303 bp, Homo sapiens
gactacatacgttccgtaggatctgatagtgcccaccatacagaagttgttactgaggagtccagagaatgttatagaaactattgctagtctgttgggatcagtgacgctggacctcagccagtatggcatgggcatcgtgaaaggactggcgtggtcacctgaaatccgacagtccccggctgatggatgaagctgtgctggaacggcggaacctggtacgccagtgcagtgactcttcggccatggtatccctgaccaagcatctatttgctatcctcggaggcgtcggaagtatgtagt

SEQ ID NO: 497275 - DNA, 162 bp, Homo sapiens
  misc_feature (3)..(3): n is a, c, g, or t
  misc_feature (5)..(5): n is a, c, g, or t
cgnantgatggtcagtctggtcttaagcttgactcctggcttagcagtctcctgctcagctcctgagtcgtaggattgacttgctcaccacgatgctggctattttcaatgtttttgtagagatggggtctcactatgttgcccaggctggtctcaaactcc

SEQ ID NO: 497276 - DNA, 717 bp, Homo sapiens
agcgggggtgagaacccctatgcaagtgcggacctacaaatgtttgtccgctccgtgggcactgtagtggcttttaccctggccgggcgggcggggctcagccggggctgtgctgggctccgcggctggagccgggctctacccagagcaagaccctgatggctgcggtgtttcatggtaacgcgtttatgaagtactcgaccgcatttggctacatcgctggtggtctattagctgcattcagtcgtgaccaccgtgcctgggtattgggactggtttggtatgggagtgttccaagtgattctgagaaattgcagaagagacccagttcagcgcaagagtatttcaaaaagcaatatgagacgagtcaagaatccttttggacttagagatcactaatccatcttcagcttcaattacgaaagtttccatgggtgtcagtgattcgagtattcctgataggacttataaagctatcctgcagaaatattgtatcaatatttactcttggcatcaaggtcaatttacatgatcgttaagcaacgttttcagtgtctgcgaaataataatttcacttccctccaacgattcctcttcagaagaaagaaatacacagacagaagttagtgggaaaaggtgggactctctgaaagtgaagttgagccatcggaagagaacagcaagggctgtgttgtatgccagaatgggactgtgaac

SEQ ID NO: 497277 - DNA, 711 bp, Homo sapiens
  misc_feature (528)..(528): n is a, c, g, or t
tctgagcaagctgggaacgcagaacctgagaggcccatgtgagctgggggcaggaaggatggggcattagcctaggatgcagcttgactagggaggaggccctggctggcagccagacctgatcctttcccctgggtcctgggaagaggggagtgctcaggctgagcactccctctgtgggagtagggatggggtggtgcatggggctgtgggactctgcatccagttccttctctgcatctctcttggcgcagcagcacacactatggggtggatctagctcacactttcagcctctcttctcagcctcagtcccctggtgatcagtgccctaactctccgccctccattggcacagcccctccaatcagcacccttagcccatctttccactcttcagccccctactatccaccttctcacacttagaaccccagctctcagccctctgtgtgttcagccttagcactgctcaacagccactctttttttgggggagacggagtctcgctatgtcgcccaggctgnagtgcagtggcgccacctcccgggttcaagcgattctcctgtctcagcctcctgagtagctgggattacaggcgcgcgtcaccatgtccggctaatttttgtattttaagtagagacggggtttcaccttgtgggtcaggctgatctcgaattcctgacctcgtgatccgcccgcctcggcct

SEQ ID NO: 497278 - DNA, 528 bp, Homo sapiens
gtgatctagaggatcccttgcaggctctctaccttgacccacacacatctgcgttggcttcttccctgggagggaggtatcccaagcatgttcttactcgtggcccagacactctccccagatccgggcacagctgcctcctccttaggattcaggtctcacggtggatgtccctgtgagagccactcccaggtgtggtccatcgcataaccctatcctgtcatgccccccagcacttagaagcatctgagattatcttctatggtttctccaatgtagtgtcagctccatgagggcaaggattggtgtcggtccggtgtatggttaaatccccataaaaactatgcctcagggcggggcgcggtggctcacgcccgtaatcccggcacttggggaggtcaaggcagggggatcacgaggtcagcagatcgagaccatccgggttaacatggtgaaaccccgtctctactaaacatacaaaaaattaggcgggtgtagggcgtgggacctgtagtcctagctactcga

SEQ ID NO: 497279 - DNA, 1928 bp, Homo sapiens
ggcaacagtatgtcaggccggatgctctgatacacacccgaaggtattgcatcctgccatcacagcgatgtgcttaatgatatatgcggactctttatttgagcgcagagcacattccacaggaccatgacccaggaagacgtcaagctactaactaggaaggatgaggagcggtccaagcctatgatcttagtcaatctctgaaggtgccatgttcgtaagtgatcattccgtagatgctctagctagtctacagttccgcttcacacccatacggctatcaagcacttgcgatccataatgggtcttatctctgtatcagaccatgaggattcaacaagttagagagaggcgccatcaagaacaccgtcagcggcgcgatgccacatggcactagttctgtcgtcgtcacatatcttccgccctgagccgctgaaacgagtcgtctgaagcatcgtgttgtccaatccgtgcagtctccagtggcatgggaagttcaactagagtagctatgccttcatagacctatcttgatagctaggagctaggaccattggcattcgtagcgagaggtatagcatttctaccgcaacaagctagtggtctggcgggaaaccacaaattcatatgcgagaaggacgcctgttgggcaagttaggaaggccccaaggccacaggcctgcactgacttgagcgcacacacaagattcaaggggaaaggccaaccccaggcaagggagcaccacgaagagcgttctccatgtaccaataccctttcacctgagggcaaacgagcggacgcggcaagggaaaggacacggcagacgacagccaaacaatggaacaggaagccagaagaaaccagaagacagacagcataacacaaacgacacgggaccccgacaaacaagacagcagcacacacaacacgacaaacaaaaagacccgcagccagcaagagagcaaggacgagaacaaaagagccaaccaggatgcagagcccacagtcaggtctaacacagagcgggataacacaccagtacagaacaggcagcagaacaacgggtgatacccaaccgataattgttgtttcatgtattatatactcacgcagaacaaacaacaacaagaagaacaacacacacacacacacacaccacacaaacaagaaaagacgacagcagaagacagcagacagacaaacagcacaatgacagcgactgacaggagagtccgaaaacgtaacataaaaaatagcaagtatagagaaaagagaaaaaaacagacacagagcaggcagcagagataacacgaaggagcaacatacgaaggatgtgaccaagcgtctaaacgctagaggcatcaaacaaaagaacatagaaaagcaaaatagagaggtggtagaaaaacagaataaaataaaaggaaaaacagacacaaaaaacagaacataagcaagaataagaaaggagagcaaggagacgagaggaaagaggaagaggacaagaagaacaagacgaaagaacagcagagaaggcacaccagagaagaagaaagcagacgagaacgagagcaggagagcacaaaggagcaggacagaaacaaagcatgaagaaggccagaaaggagggaccaacagaagagaaaagaacagagacacacaagcagagaagccaagcaggacaagggacgaacgaaacagaaacggacaggcacgagagacagcgaaggaagagaaagagaagacagagacggaggaagacgcagcagagcacgacgcacaacacacggacacacagcagacaacaaagacaacggaggacgggagacgcagacacagaagcacggagaacgaagagggcagaaaaaagagacagtcaagacacaaagagaagcaagagagagagacacagagagacgagaagaag

SEQ ID NO: 497280 - DNA, 189 bp, Homo sapiens
gcatttgcaacacatttgcattatctagcattggaaagaaatttcatgattagaaaatccctctggatatttggttaaaagtgtgaactacagattttacaaaagtggtcagtggtttgcaacacatcaccatatatgtgatgctaactgtaaatgcataaatgacaacctgagatctgtttttcatca

SEQ ID NO: 497281 - DNA, 498 bp, Homo sapiens
tacttataaaaaataaggggtgatatttttttttggtcataagcaaacagtacacctattggcttagacattatacattaggagcacaggtttgtatggggaggacaacggataggatacttaatatgatctgcaagtgctacccactatttgggaaatagagggtaaaagcgaagttaagcacgtattaaaatgcatcagcggttgaattaaatgcttatggaaagtggaacaaggtgaatatatattatacaagaggcccataccactttttagggatttgctttttttaggcatcccattcttttttcccaatgaacaaagtcaaatgggtactccactacattgcttcttggttgtcgagccccgcgctagaaaagttatggcttccggagctgacgagaagggatctttcaacagggacaccatgacaggcatgaatggtcactttcagttttctgcctctgggaacactatttatccaggagaaaaaaataa

SEQ ID NO: 497282 - DNA, 286 bp, Homo sapiens
ccaagtacatggataactactccgaggaggagtatgagagctctcccccgagcaggaggcagtgacgacgccgtgcaggggcaggaattggaagaggacgactttgacgtggggaagccgaagaagcagcggagatcgataagaagaacgacgtccatgaccatggcaaaagaacttcaagcagaaagtggtagcgctgcagaagaggtacaaagtgtccgacgaggacctggactcggagcagaaccctgcggagcacattccccgagacaagagagaggacctg

SEQ ID NO: 497283 - DNA, 446 bp, Homo sapiens
cttgaagagaaaggaagcaagaatttcagttagaatttcaaagaaacaaataagaagaaaggttgtaggaaagagaatttcaagaaaagtagctaagaaagttgccagaaaagccaagagatttgcacaaatgaataaatcattcagaaagaaacaaatgaaaaagttaagaaaggcaggagcctcagatagaatattgataaaaataaataatatcaataaagttatgaagaagaatgataaagtattaatagtattatcaaagaaattaaagactgcaccaaaagtaaaaagagctccaattgtaaagcaaattaaagttatcaaacgtgtaatcagacatcaacaacataaagaaagaagaactgtaagaagagttgttagagcttcaattagaataacaacaagaagaagaagatagacagtaaattcaaattattttcctt

SEQ ID NO: 497284 - DNA, 374 bp, Homo sapiens
tcggcaagcgtactgtgtgcccgaatgtggactatcatcagcacgcatgagagcaggctaggcgagagcgcttgaacgcaggcacatggttctgattgtagagcacttacgtacgcgccctgtgctcttactccatcgtgccgatttacattcacaaccgcgctagctcgagtgatccattttactactcactgtcagtgtgcaagaagtgatcatgagtcgtgagccaacaacgttaatatgagtagcttacatgatggcttttatagtaaagatacctctttacggactccacttatgactccctaaagcccatgtcgaagcccccatcgctgggtcaatagtacttgggcagtgagagtctccgtcgaact

SEQ ID NO: 497285 - DNA, 268 bp, Homo sapiens
  misc_feature (111)..(111): n is a, c, g, or t
  misc_feature (154)..(154): n is a, c, g, or t
  misc_feature (264)..(264): n is a, c, g, or t
aggccaagcagcagagtgcctggtgtggacgggagaggagtggggaggttgggcgcagtggctcacgcctgtaatcccaacactttgggaggcccaggcaagcagatcatnaggtcaggagatggagaccatcctggccaacatggtgaaaccntctctaataaaacacaaaaaattagccagacatggtggcatgcatctttaatcccagctactcaaaaggctgaggcagaggaatcacttgaacctggaaggcagaggttncagt

SEQ ID NO: 497286 - DNA, 332 bp, Homo sapiens
tggctctcctacaccaaatagtatgattaacagattctagtgtatcacatttgaaatgctttatgttatggctttatgttgatgagttagaaaacccgatgtgtttgtttatgttagatatggtttatgtttttggctatcttatgtagaaaggcatgtacaggtatggcttttattattctatataatttttactgggaaagcttttccaagattttgaatagctaaaatgtcaacttttttcttaatagtattttcatctcagcctagtgatgatgaatcaagtagtgatgaatccagtaatcagcccagtcctgcctttagacgacgcc

SEQ ID NO: 497287 - DNA, 780 bp, Homo sapiens
gtggatagacgaaagctggcctgggctggggccctagtaggtcctctaatcgtgtacttaccgtgtgctgagtatcaacactcgttgataatgacctatgtggatcacggattctgacctaaacttataaatgccttgcgtgtcataacgtcttgctctctcgaaaaagttcatgaccttgtcgtatccttagcaggacgagcatacatagcactcgagagtgtagagccgaaaagtcccacacgatcaatgctttgatgactccatgttctacgataggctgcccgcctcatggcgtcccaatttgcatcgctccacttactacgtaccttccccatcattatctttccccttgaactaacttctggggccacaatggccacgccacagactatgccaacgatatagtccaggaccatgtcatatgcgacatctggacactgccttggtctggcgacacgagagaccaaacaccaaattatcttggtttataacacccgtgggaacattttcgtgtgggtgactgacatacggggttacgtcataccgcagtttcccccttaccccaagtgctggcgtactgacaaactttgctctggcacaacccactgttatctgacatctacttttagcgcaatcccacttacatgggtaatctcccaccccgcggttaatattggtgacaaattggttgtgtgaaggccgtaccacgagtggaacttcaggacaatctccagggggtcgccatatcatgacgtagggagcgccggcacttttgca

SEQ ID NO: 497288 - DNA, 432 bp, Homo sapiens
gcattacaaccagacctccacctcctatcagaacaatggtggcattagcttctcaaaggaacaagagccctattgttaactgtgcatgtgagggatctaggttgtgtgctccttatgagaatctaatgtctgatgctctgtcactgactcccatcactctcagatgggaccatctagttgcaggaaaacaagctcagggctcccatggattctacattatggtgaatggtataattatttcattatacattatgatgtaataataatagaaataaaatgcacaataaatgtaatgcacttgaatcatcctgaaaccatcccccaaaacgtctgtggaaaaattgtcatccatgaaaccagtccctggtgccacttggggactgctggcctacagggaccagtaaggaccagtgaggagttacagaggggtgg

SEQ ID NO: 497289 - DNA, 600 bp, Homo sapiens
aattcggaacgaggggtcatgaaaaaaaattgagaaacattacctcatacacaatgaatgaatcagaggacagacacgggaatggcacgactgtgcagtgtgttactaggaaaaaagttcagaatcactgttctagagagcttcatttccattggttttaaaacattattctcatgtagaacagtgttgggtctcatactgttaatgttaatacgtaacaatgttcatgttaacaggcacctgttaatattaacagataatgttactgttaacaggtaagagaaattgctctaagtgcccaaactttatatacttcagttttaatgacaagcatttcagaaatataagagcggcagccagaccaaccagtttttccagatatcttgatgtgaacctgaccctactcctttagaagacagcctgttcatttttaaatagctttaacccaaactgttctatgaccattgtttcaagagacattaacacagttctgtaaatagaagtgtctatggacaaataagtttgggaaatgtggcatactgtatccttttcttaacatttgcatattaaagactctgagatatcctgcagtaaagacac

SEQ ID NO: 497290 - DNA, 343 bp, Homo sapiens
  misc_feature (89)..(89): n is a, c, g, or t
cccctttttttagtgaggggggcgttagggttttaaaaaagggaatttggctccccttccgttgagaggggcccgtccccccagcttgncggtttttaaatgcccaaaaatgccctggggtaagccccctgggctttttaggaaccggcccctggagaaggcatgttccccaaaaggtttttgggggggccacccccccccgtaaaacataatgtttcatgaagaaaactgtttttttttgccatgaaatgaaaattttaaggccttgttataatttttaatggccgctgcggcgggcccttaaaaaagttgcttttttggggcccagggttttgagccccta

SEQ ID NO: 497291 - DNA, 418 bp, Homo sapiens
ctgatgtccattatggcagcttcctgttcttcctacatctgaaataattttagactcttctgtgttctcattgggcttaaaggtgctttcaataaatccggctctcgtttccatgtctggaatataccgaagttcaaagtggccaacactgaaattccacttctcattgccactgcgaggtccgacagctctaacagttttttgggtacgctgtagaagcaggattgtcttcctcttgttccatttcgtcactatcccattggcgacaacccagagctgaacagatatacctcacctttccactatatgcactgagtccatatgtagtcagagattttcctccaaccaaaacaacatcatctccaaatttataagaagattcaagaagtgattcaactgtgaaaggaactgtttccat

SEQ ID NO: 497292 - DNA, 141 bp, Homo sapiens
cactgggaaattgccttgatcttgaacaaaacaaaagtctagtaactttagcaatagaaatacacctaccaaatgctttctcctcaaatatctacgcgaaggaccatggtttaaacagcagcatcaaggtcacacagtagt

SEQ ID NO: 497293 - DNA, 287 bp, Homo sapiens
agaagaaacagactaccttaatagccttgtatctattttaaaagttaaaaatgtagttaaacaccatcccatagaaaattctacgtccaaatagcttaactgctaaattctaccagacttttaaggaagacataataccaatttgacacaaacttccaactcattctgtgcagcctgggtgacaaagcaagatcctgtctaataaaaagtagtaaaaatagaactatcatttgacctagcaatcccattacagggtatatacccaaaggaaaataaatcattctacc

SEQ ID NO: 497294 - DNA, 431 bp, Homo sapiens
  misc_feature (326)..(326): n is a, c, g, or t
  misc_feature (387)..(387): n is a, c, g, or t
  misc_feature (414)..(414): n is a, c, g, or t
ctcttaacaccaaggagctgaaattcttggctgggtgcagtggctcgcacctgtaatcccagcactttgggaggccaaggcaggtggatcacctgaggccaggagttcaagactagcctgaccaacatggtgaaaccccctctctactaaaaatacaaaattagccaggcacggtggcgggtgcatgtaatcccagctactagggaggctgagccagggagaatcgcttgaacccgggagtggagattgcagtgagttgggatcttgccattgcactccagcctgggcaccaagagcgaaactctgtcttcaaaaaaaaaagcttnaaattctcaaattgggtaaacatagtttcacccttgtctcttgcccatttgcagtttaaantgccacagcctgggagtttcatttccnttcctaaaatgggggtt

SEQ ID NO: 497295 - DNA, 211 bp, Homo sapiens
tgtctgccttggactacaggtgggcacatgctgggccatcaccgttagtattaatgaacctataataatggtggttattaactaaagtccaactttattcagatttctttagttttaatgaccattttctgtcccaaaatcccatccaggttatcatgttacacttagttgtcacgtctccaaggtagtactagtccaaaggcaggacaag

SEQ ID NO: 497296 - DNA, 199 bp, Homo sapiens
agtgagagagaacgtcagactggctagtttaattccctgtgcgcagatactgcatatggaccaacatgggtcatcaacgcagacagtggagcccgcgatgaatcattcaacatcatccccacgccacagcagatggatccagttttcctgcgtcatccctcttagcagttcacaagattcctgctgggtacacgagctc

SEQ ID NO: 497297 - DNA, 389 bp, Homo sapiens
ggaaggacagtacagtggcttctcagaattgaatatggggttagacttctaaaagagctgtggtagagggagctgtcaaaggagatcagtcactgttaaagggagcaacagatacgatatgagcaactgctgtgctttcagaatacccaggcagatgaaccggtagactatgtgcagtatcgaacatacgactgagatcctgttgtgcctatcacctggtgaagttgccagtcttaatgaaggagtcaaattctatcgcaataagagcactggcaaagactacgttttgcacgagactacgagccgactgatgtcatgcaagaatatgtgcatgcaccacggatggctgttcataaccgatatcgcagatttagccgggatgtgtggtg

SEQ ID NO: 497298 - DNA, 715 bp, Homo sapiens
  misc_feature (4)..(4): n is a, c, g, or t
  misc_feature (196)..(196): n is a, c, g, or t
  misc_feature (257)..(257): n is a, c, g, or t
  misc_feature (267)..(267): n is a, c, g, or t
  misc_feature (343)..(343): n is a, c, g, or t
  misc_feature (352)..(352): n is a, c, g, or t
  misc_feature (557)..(557): n is a, c, g, or t
  misc_feature (616)..(616): n is a, c, g, or t
  misc_feature (635)..(635): n is a, c, g, or t
  misc_feature (650)..(650): n is a, c, g, or t
  misc_feature (685)..(685): n is a, c, g, or t
actnatttggagtatggctcacacacgccccccgacaggcatctaagaggtggcccccaaatccgcaatcgggagaaaaaggcaagaatcgactagagaatgtaaggataaagggaggcactgcccacccctgctatgtctgttttcccccacaggggcttctttaatacctggggttccctgggtgaggaatgtnctcctaccctggcaaggggccaaacctgttgccgtggccccaaaggcaaccctgaagaaanagtatcaatnccaagggggctttggtttctgggtggccccacctcgtcgtggggtagatggcacttaaatgctaactgagcaagcnctggaagtnaccagggggctccggaaggtcacccctgaagtggaaggcctgaaatcctgaggcccatttgtgttgggggcactggtggctggatgaccagttctggggacattcaggtgggtaagggaatgggaaagtcccgcttcagggggcgttaagagtgttaccacccatagaaaacttctgggagtataccgctggccccggctctttnttggagggaccagcagggtgaatggctcgcagttgtgcctccctggggcggggcgagtngctacccctgggggtaggngggggcgtccacaanaaaacacggagctttgcggcaacccccttcgccanccgcggggccccgaagctggcgccttcaga

SEQ ID NO: 497299 - DNA, 111 bp, Homo sapiens
tacgagatgcaagattaaaaatccactgccttccatagaaacgattgaacaggagaagcaagctaggcgaatcgtatatgaggcgtgcgccgcctatatgcactgtacatt

SEQ ID NO: 497300 - DNA, 139 bp, Homo sapiens
ccgaagatccacaccgacaacaacaaaagtatgggatattttggcaggcgaagcaggaaagtgaaaaagcaggaccaggacgtgccgatgccggaggaaaagagcacccacaagggcgaggggtggctgagggattcca

SEQ ID NO: 497301 - DNA, 726 bp, Homo sapiens
taacaaacccggtgctggggggggtgtggggtataatcctaatgtggcaaatgatctcatttaggggggaaggcccttggagaagtaggccttattgctcctgtgtccttccgtacgcgggaggaattcgaagtacatagaaaccgaccgggattatcccggtctgagactcagaatcacgtaggactttaacttgcgtctgaccacacatactgaacctttaatagcggtatgcaccatcgggatgtcctgatccacaaatcgaggtcgtaaaccctatggtcgatatggactctagaataggattgcgctgatactccctaggggataactgggtcccgatgtgggtcaacgtgtaatctggggactccagtggaagtattacgatagtatcggcttttggacgtgggttgaaaggtcctccacgccaagtgctaaccgtgctccgggcagagttgagggggtttcagtgtcaatcccgaagggggtcgtccccacaaaaccgaacattcttcacattcgctccggtatacggggacaagatatcaagcgaccggtggagggttcgtggccaaggcacgaggccgggattccataaatattgaaagctccactagggtcatgcagaggacccagccgggtcaactgcccgactcttgcacgggggcagggcaccgtacaacgggtcaaagcgtcaagaagacgagttagcccctacggggagcc

SEQ ID NO: 497302 - DNA, 327 bp, Homo sapiens
cccccccccccccccccccccccccttgcctttttttttgaaggggtgaaacagccctcttataaaaaaggtttttttttggggggggggggccccccccctcgaggggtcccccccccctttttaaaaatatttttgttttttgtgtttcccctttttttgtttttttttcgcgccgggggccccctcccttttgggggggggcgcaaagctcctttttttttttggcccagagaaagacacaagcacacaacaccatgtatgcgtcatgacagccctcagtacagacaaaaagaaaccagagaagaaaaaaataaaaacatacca

SEQ ID NO: 497303 - DNA, 399 bp, Homo sapiens
  misc_feature (74)..(74): n is a, c, g, or t
  misc_feature (113)..(113): n is a, c, g, or t
caggcactggctggtgttggaatcggggtcaggattattgtcaggaccctcagagccccatggtacccactgcntggtgcaaacctctgaagctcccccaacccaggcatctntgagagccttaagttaaggagcctccaaacacagtcattcctacacatttatttctaaaagcagcttgcaatttacttacttattatatatatatatatatatatatatatatatatatatatatatatatttacttatttatttattatactttaagctctagggtacatgtgcacaacgtgcaggtttgttacatatgcatacatgtgccatgttggtgtgctgcacccattaactcgtcatttacattaggtatatctcctaatgctcgtgccgaatcctgca

SEQ ID NO: 497304 - DNA, 504 bp, Homo sapiens
agatgtgatattcagctaccagcactctgggcagtcctgggactcagatcatatccttctttaagtagaggttctgtgccagcaggtacagcaggtgcctactgttacagggagtcttctaacccaggcagtgtacctccagcatctgttcgaattttgattgaagcagcttcagcttcccgcacagtctccttcacagactgcatgaggttctgggcatagtgaaccagcatctttgtggactgctcagactcctcatcactgatgtaggtccggcccagcatgttggccttcactgtggacaggattttgagctgggtgctatatggttgggattcgctcacatacctgtaagaggtaggttctaatccgtatatctgtgcactgcttggaaacctccttgtgcaaccgagtcacctcatctgaggccttggcgctgtccttggcacaacggaatgagtgccgcttggtaccactgcccctcttaccagcgagaatcccagc

SEQ ID NO: 497305 - DNA, 153 bp, Homo sapiens
cagcaggcatcccctttcatcagcagcacaagcggcaggcagggcaggcaacaatcccaaccaccaatctcagctcaaattccggccaagctcccagccaggcagcggggcaggcaggccggcaggcatccatggcagcccagggctcacggc

SEQ ID NO: 497306 - DNA, 697 bp, Homo sapiens
caatcccttggcctgtgatccagtatgggcccgggtaaattagcttattagcaaaagtgtccccagaaataggaagagctagtagccttccatggtatattaaaaaagcctggtatggtaagcaccctatttcagtatgttccacacgtatgactgaacaattgtaattacagggggtctggacgattctggtgtagtatcctagccagccagtctcctatgaggctggcagctccagaactgatttgctcacatttagcccgtagacatctgttacaagcagtctgtgttagtatagctctcctcagagctctagccctcgagtagtgagtacagaggtcaggtagttggtttagtatacacagcagcgtctctggcggtggttatctatcgccctggtcaaggcagtagttgaccccccgggatgttgtgcggctgctcatgttagtgctgctctcgctaaggtgcttgtttcctgtagttcaagaatctggacatagtacttcttgtaacacgtcagcgttgggcttaccccctacataggttactttggttaaggacagaagtaaaggggcacaggggtagtgttttgtctttctttgggctgttagctcactcagtagttgaaggtgctaagtcatagccttatggaaagtgtatgggaggcagaggagattgtctagctacccgatcccgt

SEQ ID NO: 497307 - DNA, 238 bp, Homo sapiens
  misc_feature (194)..(194): n is a, c, g, or t
  misc_feature (231)..(231): n is a, c, g, or t
taggtcatgataagagccgggggtaagggtccctttccttcccatcacctctaaccacgaagacaccctccaaagtgacagggagaagccccagagtcctgctgcctcgagatggaccttgtgaggcatgacaagattgttgtacgtgagtcttcctgttgccctacgagccatggctggcggtagtgtggcanatctcctcgctccacgcctgcgaccttgattgtccantgatgcc

SEQ ID NO: 497308 - DNA, 185 bp, Homo sapiens
  misc_feature (82)..(82): n is a, c, g, or t
  misc_feature (84)..(85): n is a, c, g, or t
  misc_feature (89)..(92): n is a, c, g, or t
  misc_feature (95)..(95): n is a, c, g, or t
  misc_feature (109)..(109): n is a, c, g, or t
  misc_feature (116)..(116): n is a, c, g, or t
  misc_feature (123)..(123): n is a, c, g, or t
  misc_feature (154)..(154): n is a, c, g, or t
  misc_feature (164)..(164): n is a, c, g, or t
  misc_feature (179)..(179): n is a, c, g, or t
  misc_feature (185)..(185): n is a, c, g, or t
tttgagtgaatcggaaaggaggcgccggctgtggcggcggcgggagctgctcggaagctacacctcgcaagggctccccccncnncccnnnnccncccccaacccccancccctcntcgggcnacccaacccgcccaactcccagcggagagcnaggttttctnccgctttcatagcanccagan

SEQ ID NO: 497309 - DNA, 949 bp, Homo sapiens
atatgggatatgtatggatgagtatatgaaataagctgactcggaaaggagtgaatgaaggtagaatgaagtgtaggaggtgtttgtactactaattgttcattgtgatgtgtatccagtgagaatgtaaagtagcctatttaggcgcagtaagtatgtgctcatacgagacattcttgaaattaggtgctagcatgtcatgtgttgatcgctcgattggcttgtagaagcagatgtgatggaggatgaatgaggcaatttcttaccatttgatctgtgagagatctcgcaggcagggatgagagtagcgttcctgtctatggaccattattgagtgaataatacgcaattgtgagtaaatggggatcgtctggagagacttagtctataggtgaagcaagaccctatgtcatttctgtctgtgtaagatggcatagtggttcagacgagagagataagatagagaatgagaggaggctatagtgttaggggtcgggcatcgtgagattccccgaaaaatgttggatgaggtgaagacgggctgataggtttcagagtgtgcacgtgaactgctcgttgcatgtgtactctacaggaattaaggtgatggctgtaccagggtgaaggtattgggggccgacttcatgtaatagtctgcaatcgagttcctactactgaggtatgccaatgaggagtcggctgcttcaagtggcgtcggttaatcccatggatgcaacagaatgtggggctgcttcgtgatcctcgcccacggtgaaatctgtcttacctggatgcatggttgcagcttctgagtgcgcattgttcttcccgtgcgagaagggtactcattatcaggatttttcgaggggaccaagatcgtcaggcgctccaaagaggggtggacccgcttactgaccaagggaaacttttgaaagggcctcaaaaatgc

SEQ ID NO: 497310 - DNA, 288 bp, Homo sapiens
tatcagctcgcctgctactgggctcttctgcgctgctcagccatcactggactgtcgaggatgcaaggtccatctgactcctctctatgctttgcttagccttgagtgccagttgcctgctttgggattactcagttctttatccagccctgcgactgtgtcccagtctcctaatgtggatctgggtatgccgacatcctctttggcagtctgagtgaagtgctatcatctctggcaggtatctgcattgaacctatgatcagtctgttttcgcaagacagacagagg

SEQ ID NO: 497311 - DNA, 154 bp, Homo sapiens
acttgagtatgtgagagagtctttccgatttcaataattgagttctttttttttccttttttcagataggttcctgctcagcccaggcagcagtgcagtggtgcaatcatagctcactgcagcctcaacctctctagctcaagcgatcctccca

SEQ ID NO: 497312 - DNA, 284 bp, Homo sapiens
ggaaactacctacatgccccgcggtggtcagcccgccttatcccagcactttgggaggcctaggcgggcggatcacaaggtcaggagatcgggaccatcctggccaacatggtgaaacaccgtctgtaccgaaaattagctgtgcatggtggcgcgcgccataatcccagctactagggaggctgaggcaggagaattgcttgaacccgggaggcagaggttgcagtgagccgagatctcgccactgcactccagcctggtggcagagggagactccactcaaa

SEQ ID NO: 497313 - DNA, 181 bp, Homo sapiens
tgactcccgtgtgtatgatggtagcctttctgccctgtgcgtgccacatgagaatggctacacgagcagtgatgccatgccccaatacatggccaccttgctgcaggcctctggtgggtcttgcgcgggcagcttcttggtgtgccaacggacttggtgacccctattgtagcctattgcc

SEQ ID NO: 497314 - DNA, 440 bp, Homo sapiens
gtaaggacacaccctgggaatcttcgtgagactgggcggggggggtagaagatggtgaacggctgacacttcatacgggaaacaaatactggtctgggaataagagggccctcactcacatcaatgaagtcacctattctgtgtagctggactattctctcagggttctgagatgccttctcttctatgaaatctacttggtactggcggggtggaaatatttccaaggccactttggcttcaacttccagagtttcaaagggaagatctttataaattaaagcatgagcatccttggtgaaggaacgtaagttctcttgggtgggcatccactcatcaggttggctatccaaaactacgtcataacagaagggcaccagaaattacaggaacttctgggagctctgaccaaatggaccatatattcatcttggaaggcc

SEQ ID NO: 497315 - DNA, 423 bp, Homo sapiens
ccttcaatttcaaattgcagtacttttagttttaagtaacttggcccttttagacagaaactgttgtgttgagggagtcccagccctttaatccaagcaggggacagtcccccaagtgcccttgatttttgcaaagaacttagtttttcctgcggataatttaaagctgccagcatttgaaggaaaggaaacccttaggatggttttggcttgcggtaggtaatttttttttttttttgagacaggatattgctctgtcactcaagctggagttttgtggtgtgaccaaggctccctgcagcctccccctcttgggctcacccctataatcccagtgagtcataatgttgaggtgggaggattgcttaaggccaggagtttgagatcagcctgggcaacatagtgagatcctatttgtacata

SEQ ID NO: 497316 - DNA, 1009 bp, Homo sapiens
ccggtttgctgcgagctgcataccttctggtatgtatacatttatacaaagatccctgtggatcaggcccatctccgtgcgaggctctaacttcgatcgatagcggaagggagccatgccggggtgaatatacatgtctcacctcctgaagtccccccttcccacccatgtccgggacctgggggctcctgccggatccatgggggcgttgccagctgcttaggatgaggagctggaatttatagctggtgttcggggaggaaaaggaggcccccccgctgggcgcggggaggattgggggaagaactggatctcagaggatgccccgtcatgctgccgtctggccttgggtagagccccctccctattggacggctgcgaccatagtcgggtagttccccgatccatccagcacctctcggcctcgtggacattgtcatacggccaacgcgacccgtggacgcagcgcgccgctcacgcgtggtcaaccgtgaggagacgccatgtccccggcgaggtcgagtgaggcatgaggacgagtacgcaacgagaatggccagtgattgcttgagagagagttgccattgggagcgatagtggacggatgattaccctcgggaaagttggtgcccacaaggtcggatacacccgggatcaacacactcccgaattcatcattcaccaatcgagccggaggagggcaccgaccacgagggccatgggcggactttggcggacagtgcaaccaaagtacggcgatgaagatggaccccatggcgctagagtgtgggtaaacgcgggacatccataccccgttagggacggacacagtttaagcacgcgtgcacgcaaagaccagcggcatagatgcacatattactggggaagagggactttaccgatgtcatggaaaatggccacagggcggcggacgacgacacaggtgagcattgtgggatagatggggccccacttctcccttttatccaagggcgccgcaaaaaggcca

SEQ ID NO: 497317 - DNA, 468 bp, Homo sapiens
ttagaaatggtttctttttataagagacccaaaagaatgggcttataattacactcccacaaagtggtccatgcatttaggtgtggcatgcaaggattacagcattacttatacattatattgataacaggattaatgctactgttccagagctgggagaagtgcataatatattgtccagctgagcccttagagggtgtacgtcacggccgacatcttgtcttgtagacctctgaggtgggagacttgatgaatatacggttctatgccttacaccactgtgtgaaagactcacaaggcctcaaacaacaggtggtttcagacacacacctgtgcgctatcgctaatatgtccatagtctctcaggataccaacacagcttgtactggggacagggaggtgcaccatggtggactgctgcaggggtttcaagggtctccctctacagagacaagttgtgcaaagttc

SEQ ID NO: 497318 - DNA, 423 bp, Homo sapiens
  misc_feature (18)..(18): n is a, c, g, or t
  misc_feature (55)..(55): n is a, c, g, or t
  misc_feature (83)..(83): n is a, c, g, or t
  misc_feature (177)..(177): n is a, c, g, or t
cgttttgggataagaagnttaaaaattataaatatatcaattttcacctgttaancctataaattcaagtgtaatccccaatnaaaaaatgccaacaggttttccccccaatagcattgaaatgattttaaaatttaatgaaggccaagcatggtggctcactcctgtaatcccagnactttgagaggccgaggcaggtggattgcctgagtcccaggagttccagaccagcctggacaacatggtgaaatcccgtctctatttaaaatgcaagaaattagctgggtgtggtggtgtgcacctatagtcctagctactcgggaggctgaggtgggagaatcacccaagccttgggaggtcgaggctgtagtgagccaaaatcacatcactgcactccagtctgggcagccagagtgagaccct

SEQ ID NO: 497319 - DNA, 232 bp, Homo sapiens
catcgagctcggtcccgaatcctaattacgggtgcagccaaaaaagaaagataataaacaaaaaccagattttaaaacagctccaaaaaagcaaaaaaaaatcccagcaacaaccattaagcctttttaagatataactcacatacctcagtgtgcatatgccagtcccaaattaattcatgtatctcctactttacaagaccattctccactcccccgttaattggggttt

SEQ ID NO: 497320 - DNA, 148 bp, Homo sapiens
ggagtggagtggagccctgtggttgccgactctatcctcttccccacggtccagtcagcgggttaattaggccatcccctccggagccgggaccttgtctcttatttaaggtcctgggggggccccctcgtccgccatgaggttaatt

SEQ ID NO: 497321 - DNA, 564 bp, Homo sapiens
tggggttcctggtggaggcgatgcctcaccccacttcggctcttgcttggtgggctgcatccactgtctgacaagccccagtgagatgaacctggtacctcagttggaaatgccgaaatcacccatcttctgcgtcgctcatactgggagctgtagactggagctgttcctattcggccatcttggaacctcctgtatcacaatttctttatccactttttgattggtgggaatttgagctgcttccatgtttttgcaattgccaattgtgctactacaaacatgtgtgtggaagtatcttttttgtataatgacttctttcctctgggtagataactcatagtgggactgctggattaaatggttgttctacttttagttctttaagggatatcctcactgttgtccttagtggttgtactagtttacattcctaccagcagtggaaaagtgtttccttttcaccacatctatgccgacatctgtttttttttaatcttttgattatggtcattcttgcaggagtaaggtggtatacatcgtggttttgatttgaatttcctg

SEQ ID NO: 497322 - DNA, 233 bp, Homo sapiens
gtagcaccaggcaggcatagaacgaggcagcaccacaatctttttgtttccgtcttttttcatttcacatcaaagcgatgtccatttcggtcagtgcctgccattgtcagttttccatggcacaaataattctatcccacgtattccattcactcatacgtttaaaggtcgcgggctgtcatccaagtactactcactgtctgtcccatcatatggtcacacgatgcaagttt

SEQ ID NO: 497323 - DNA, 259 bp, Homo sapiens
agcatcagagttcccttggatcggatagatggagtggggatgacaatgcacattatcagactttcatcaccaatgaaaaaataaagcatcttcatagacttcatactgtcattagtgcattcggctataggagaagggatgaaacatgtaaaatacttctacaacaataaaatgttaatagaaatcgtcatgtgctgaggtcattttagtgagctaccattgttggtttaaatacaagaaaagtcatttcttgtattta

SEQ ID NO: 497324 - DNA, 343 bp, Homo sapiens
gacaaaaagccggataagcgggggcaggcctcctagggagaggagggtggctggaattaagggtgttcgtcatgttagctagtatcaggtgcgagatagtagtagggttgtggtagctaggagtttcaagttgcagtagtcaggcaatgcggtagtcagttcaggcatccatcatcaaatagttcacttaagaatggttcatgtcagggttgtccggctcacacctgctcatcatcatcctcatgtgggtaattgaggagtctgctacgattttgcgtaactaggtaaggttcaatccactcaactgcctgctatgatggctaagcattgagagagtgaggag

SEQ ID NO: 497325 - DNA, 758 bp, Homo sapiens
gatgtaataagctgaacaaatcttatgaaaatgtatatctcttgatctttcggtcagaatatgcattccgttagaaaatatttacctcaacttattccattcatacacagacagatggctgtgcctaggaaaagcacgaatatcacatattctggtgcaatatgtgaattcagaagattgcatcttgccagaaacaggtgagtgaatctgggggttcatcagtaagcagtcaccaagatttcgctgtcacagacacatagcatggtaaatgtgatctgtattctcgctgggatggaccaatgtgtcgatggatgccttccgggtttcctgggctttcaggcgtttgcaatactcattcttcctttagccctttccgtcctttgtccattgactgggaaagcaagggtggcttgctagaattatagggggttccccaatcgcattatacccgtggctatttcccaaggaacgaacctcggtcccttcgtgggaatttgccctgaaaaaaacaactttttcccaaatgtaaagggttctaggggtgctatggaaacttttttcccgttggaattttttcccgatttaccccctttataaggggggccccgtccactagacaaagggggcgctttatatagggtgggccttaacggtgtggacctgtcggcagcaggtggaacttgggcagacacgtgtgttactccaattaggagaagaaatttctatgtcggtttgaacaatccaactggggaagagat

SEQ ID NO: 497326 - DNA, 816 bp, Homo sapiens
ggggtgggggcggcgggggggggggcagggggcgggggggagggcgggggggggggcgggcggggagggtgtgcggggtggcgagcgagcatgggagggggcggggggggagggggggggaccggaagcgctggcggggggggcaccctgggccgggcggccgcaggatggagcaggagtgaatggggaccggtctctggagggtcccgccctcggaagatgatcccgggagccaggggcgcgagcgagctggagagccgcggtggagttcgtcgggtgcccatgaggggcggcgggccagcgtgcagtcggtggacggccggtggctctgtggctcccaggtggcggcgtcagcgcgccgagctgtgtggtggagatcgcccgcctgcgattctgtcgtgtccgtagtcggagcccggacctcgtgggcctcatccgggctgaggcggcccagagtcacacccgccgtgaggaggtggtggcaacggactcgtgggccctctgccggcctgtttcccctgccactcccgcccccgtgagctgggaactcacggctcctggaaaaacctgggccgtgggaggctcacgctgcgggcccttgatttgagcccttgagggaggatagggctggcctttgtgaagcccgcagaggctgagaacctcaggcttccctagatcccgagcccctccccatcttcctctctctaaaaaccaccctacccccccttccaccttcactcctgtgtctcccgctgattagcctcagactcttcttttattgtttttcttttgtaaataaaaagcacccggttccca

SEQ ID NO: 497327 - DNA, 139 bp, Homo sapiens
ccttaacctgctcacacagctgatgataacagagtgaattggactgggcagtctgtctctagagtctgtgcctctaactcctcaagggggctacccttcccttccaggatgccagtgagagatggcaggagaagggcag

SEQ ID NO: 497328 - DNA, 1026 bp, Homo sapiens
gggatatctgtggaccttatggaacgcaaagactcttgagaactgtaacgcccagaaaaaccgtgatctatatcttgtcacgctcgccacatgaatataagtataatggacacatgcgagtttgatatgtgcacgatcataatcctgacagtgggagaccctctagtgagtgccggttattaccatcatgtaggattaagtgattgccatactttgcatatacatcacgtctagattgaatacaaagacaacgactacatctatagcagcagctggcgcgcagccgtctgacatgagagaaacctgcatcgacaataagtgtgctagtctgtgcaatataaccggaccagaattcgctagaagcttgagatgagggatagcagactagcgccatactttgcgcattgtggcttgatccatacacatgatcatggttgataaatgcgaatcatcgtcatgatctatcatacgtaccaaagcgtaacttaggtgacttactagtaaaatctatctcattcatgggagtgagggacgacgtaaaatcgatgcaccctctgtatccagcatctggtggacctgataaacccattgtctatgagggctttcgcgataatggccttcttggatgcactgttcccctggaaggaagtctgttcctggacaggcgcacggtggctcaatggagggtgtgtgccctcatcctggggatccgcgatctcacccgtgagtctacctgtacgattgttggcttgcccagtcctatgtggggaggcgacgtatgctgctgctggtgaggcctgcttgctggggacaggccccgaggctccctgaccgtcttgacggtgcggggactggctcctttcccgtctccacaagggacgggctggctaagaccatgggcgtggttgatttaccccgggtcacttctgggtcttcggccagtgttccccggggtctccccgggttctcccaccgtgggcccctggcgccctctcccccccggtgttcggggcccattcttttccc

SEQ ID NO: 497329 - DNA, 841 bp, Homo sapiens
tgtagtggctcacgcctgtaatcccagcacttgggaggctgaggcgggtggacgacaacaaggtcaggagttcgagaccagcctggccaacatggtgaaactccatctctactaaaaatacaaaaattaggtgggcgtagtggcacatgcctgtagtcccagttactcaggaggctgaggcaggagaattgcccgaactcgggaggcagaggttgcagtgagctgagatgacgccactacactccagcctggggatacagcgagtctctgtctcagaaaaaaaagaaagaaaaaaaaaggcaaagggagaagaaaatttacttttatagagtgactactaggtggctcatgcctgtaaccacagcacttgtgggagactaaggcggatggatcgcttgagcctaggagcttgagatagcctggttaacatggcaaaaccctgtctctacaaaaaataaaaaaattagctgggtgtggtagtatatgcctgtagtcccagctacttcggaggctgaggtgggaggatttgcttgagcccaagagacggaggttgcaatgacctgagatcacaccaatgtactctagccgtgggacgacagagcgtgatgctgtctcaaaaaaaaaaaacgcctcaccagggtcaccaggtcccagaggccatcaatttattttctaatcgtatggggcaactcacctttctttcccttttccggataagaaaaacgttaatcccaataggtttaagtacacagaggggggtccaaattcgttactctaaggcctgcggtatatagccggttaagaacccttctgatggggtttgggcctaagctaaggcggc

SEQ ID NO: 497330 - DNA, 226 bp, Homo sapiens
tgaagcctgggtgataaagcgagactctgtctcagtaaaaaaaaaaaaaaaaaatctttgatatttgctggaaaaacttaaattgtttcctttccgtcccagtaattttctcatgtcatttttatccctgaattgccttgttccctcttgcttggttttatccaatctttctactttatatgtcttccaaatgcccatctctctcctttctccagttaggtttttc

SEQ ID NO: 497331 - DNA, 456 bp, Homo sapiens
cggtcaatatggccgggggggtgagggcgatttttttttttccgcgagaaacctaatcaggccgaagtgagctaatagataggctgcaacctgtgtaaaaaggggaactagattaggacacagtcccctgacgattagagggggcgatcaaatatattggtaccggcgtcttcgtgtaaagtatcaacgactaggacgtggctacctcgtatttcacgatacgcgagtggaggagtttgtacatgtggaggctgtcggagggagtgaattcttgcaacacagggtgtccaataaggctcctttcaagggttagaaacgagcttgttgtttcgtgttttcggtaaaaaggccgcctacttgggcccatgcgtaatgtctatactatagcgccgtgcagggataaatcgaccttttttcgcagacaaaggtgctacattggactactgaggtatgggc

SEQ ID NO: 497332 - DNA, 379 bp, Homo sapiens
cggtatatgattcatgttatgcggcatccagaggtataaaatagaggcaaggtttatgtgtgatctatggaccaggtcccttttcctatatctgagcttcaagaccctcaggtatagaatgggtactatggcgccgtagaagatgagacagaatactatagtaaagcccttacacagtgctcaatacatgaaaatcatcgctgtatacattgtatccggcccacaagaggcgctacttgtcagcggggaggaggaaatgcctctttaaaatgacgtcattatcggatatctctacaaaccactgcagctgtcagtacaagtggacagaagcacacacctacctattacacaatcgctgtatctagtaaccatatagttg

SEQ ID NO: 497333 - DNA, 176 bp, Homo sapiens
tctcttcgcgactgggactgtcctcggtggtggtgtggagggcgcagaccaggtgccctccccagagctgagcctgcctgggtcggaagggaacggcctgtgccttgtgggtggaggcggggcagggctgtgtggcaccgccagggagcgggcccacctgagtcactttattgggt

SEQ ID NO: 497334 - DNA, 323 bp, Homo sapiens
actaggaatacggctcgtagcccggtcacggggacgactgcagtggcagggcctctccaaggtcagcgatctccctatgcacatactatgtatggagcagtctagagcctatcactataggcttccatgacatgagagacatttctatcaagctctctgctttcctgagggcctactgggcctcggccactagtgacagccacaatcctccggatacccttggcaatggctactatccgtacacgatcacaaaagctcctgcataactcgagtatccgcaggtagcgtatccccacagaactcaacagaagtcagggagccag

SEQ ID NO: 497335 - DNA, 387 bp, Homo sapiens
  misc_feature (299)..(299): n is a, c, g, or t
  misc_feature (324)..(324): n is a, c, g, or t
  misc_feature (380)..(380): n is a, c, g, or t
atctcaccaatttcaaatctgatctattcggcttagcgactgaagattgacgctgcccgatcgcctcggaagtcccctggaccatcacagaagccgagcttcgggtaactctcacagtggagggtaagtccatcccctgtttaatcgatacgggggctacccactccacgttgccttcttttcaagggcctgtttcccttgcccccataactgttgtggggtattgacggccaagcttcaaaacccctggaaaactcccccactctgggtgccaattgggacaacattttttatggcantttttttagttattccccacctggncccattttccttattaggggccgaaatatttttaaaaccaaattatcttggttttnccggact

SEQ ID NO: 497336 - DNA, 540 bp, Homo sapiens
tcggcgttaaatagtgaactccgccagattcggctgacatcaacatcagcataattccatggaatacatccactggcgaggcccatacttgtgagagaggccactaaacatcaccgcgaccatgaggaacttccagagcagtaatcgcgacagggcgcgaaaaattggcaaaagcgtgaattcgcgtcgccgttagaaagtaaaactatagatgtcggatacccacgtgccaatccgagaaggcatcacgcctcactgtgacgcaggcacgccccatccgcaacgaatcatgagatctttcaatggctggcgtagcggcgacatcgaggcggccacgtctggatgcccggcaagataggcctcgacctcttcactgggtctgacattgtccgatttcatacgggtatacgcatcacggacatcagggttctcgtccatgtaatcggccgttgccagcgcaacacccgctgccacccgctgataaccggccgcatcacagttgatcacgggttccgcgtcaggatcagccgccgagacggg

SEQ ID NO: 497337 - DNA, 335 bp, Homo sapiens
tttcattttggcctggccagtgggtgaaaaccaggcctccaatgcactgtgacctttggcttccccaacagctttcccaaaaaggcagaggggccttccccagcccgggttttcctgctgcctcctgcctgctgcaactgcaggcatttttaggggcaacgtggaggaagggccagggatgcatgggattttaattgtttcatccccccttccccgtggcaaaaaaacagtcagtcctcttcaggggttttttggatttttggtgatggacaaaaaaatctttttccagtttcaaattatgttccacaaataaaaattgccttttttattttgga

SEQ ID NO: 497338 - DNA, 693 bp, Homo sapiens
agcccgggaaaaatcggacacagttctcccaaggtataagtgttaccagagggtcccctcgggcagataattcggagaagaaggaacctccatggataggcccaggaaaatgaaaaaaatgaacaagcttatgcagaaaggagagaaaccccgccctttggaaggaggtaaagccccccagcctgcaggtaatttacggggacaggctaaccaactggcccttaattttagatgggccatacccaataggcagatcaatgatgggatgggtgcatatgcagatgatatggaaattttcatggaggggattagagaactcagaagataccttagggagccgccgttgaggaattgtatgcgtatccttatgggggagctctctaatcaccatgaccatcatgatgaattttgccttatgccgtgactccggccattagtcatgagattaaaaatgtgattgccggggtgtatttttccttgcattttcttaataggcctttactgatccgtttgctgtacaccctatgttatttccatgagacaagtgggtcttgtgctgccagtttatatttgaatattgcctgtccgcacagtgtgaagtttcttgggagcagtagtttcatccataagaattgcacttctttaagataataactcgctttgaaaaaaaaaagtaaagaggattaacaattc

SEQ ID NO: 497339 - DNA, 355 bp, Homo sapiens
aatagtgtgtaagtgttcccctttctccatagcatcttttattatttgactttttgttaacagtcattctgactggtgtgagatgatatctcattgtggttttgcttggcatttctctgatgataagtgatgttgagtgtttgttcacgtgttttttggccacttgtatgtcctcttttgagaagtgtctgttcatgtcttttgcccacttttcaatggggttatttgttttgtttttgcttattgatttaagttccttatggattctagatagtagacctttgttagatgcctagtttgcaaatattttctcccatctgcaggtgaatcttcaataaaatgcttttgtcattca

SEQ ID NO: 497340 - DNA, 148 bp, Homo sapiens
cactagtttcctgcctgctccgtgttcaatcccggtctcagtccctccttcccctaatatatatcgcagccggatcgacctcgacgccacaccgtcccgaccctgtgttgctgaggcccacatgtggtcctactgtgccctcgcggac

SEQ ID NO: 497341 - DNA, 724 bp, Homo sapiens
agcgggggcgcgcgccagcaaatccactcctggagccctgcggacccctggagcacgcgcctgacagcccctgctggcccggcgcgctggtgtcgccagtgccatgctatgcgcccccgatcacttggtggcctgccgatgacctgcggcatcagggacctaccccgcgctacttcacctgggacgaggtggcccatgacgctcagtgttgcgatggacgcgggtggcctactgatctgacccgtaaggtgtacaacaatcagcgacgttcacctgcctggcatccacgtgtggactccctgggtcatcatgcacactaccgccagggcacggctgccacggatcccttatagtggccttccacatcaacaaggcgccttgttgaagatcgcatatgacactctctcccttgattggagaactgtctccagagcatacccagcatctagagcccaccaagaataacgagctgacagatgagttccggaggagctaaccggacacaactgcagcgcataggggctcatgaaggcccaaccaaagtcttcttccagctgtaccctgctgcacatcttgctgctggatgttgcaaccttggctacaccctatgggtcaaatggcacgcctttcatgcatatcatcctctgtgcgagagttgcacagtgcattcacggccaggctgcacggcgcagcaagacttgcccactgatgcctcagcacctaa

SEQ ID NO: 497342 - DNA, 406 bp, Homo sapiens
agcaggttaggccggaggaacagcgccatgtgctccgggctcctggagctcctgctgcccatctggctctcctggaccctggggacccgaggctctgagccccgcagtgtgaacgatcccgggaacatgtcctttgtgaaggagacggtggacaagctgttgaaaggctacgacattcgcctaagacccgacttcgggggtcccccggtctgcgtggggatgaacatcgacatcgccagcatcgacatggtttccgaagtcaacatgagattctggctgcaggaaaggggaacgaagacagtggtctgtgcgttccaggggtgtctctgcggtttttccaaggctgcctcctggactgggagacccgggcccggcaccgccagtctctgtccgaggtgctgacagg

SEQ ID NO: 497343 - DNA, 2117 bp, Homo sapiens
cattgtgttgggcacagctctcactcaccctccggcttcctgtcggggctttctcagccccaccccacgtttggacatttggagcatttccttccctgacagccggacctgggactgggctggggccctggcggatggagacatgctgcccctgctgctgctgcccctgctgtggggggggtccctgcaggagaagccagtgtacgagctgcaagtgcagaagtcggtgacggtgcaggagggcctgtgcgtccttgtgccctgctccttctcttacccctggagatcctggtattcctctcccccactctacgtctactggttccgggacggggagatcccatactacgctgaggttgtggccacaaacaacccagacagaagagtgaagccagagacccagggccgattccgcctccttggggatgtccagaagaagaactgctccctgagcatcggagatgccagaatggaggacacgggaagctatttcttccgcgtggagagaggaagggatgtaaaatatagctaccaacagaataagctgaacttggaggtgacagccctgatagagaaacccgacatccactttctggagcctctggagtccggccgccccacaaggctgagctgcagccttccaggatcctgtgaagcgggaccacctctcacattctcctggacggggaatgccctcagccccctggaccccgagaccacccgctcctcggagctcaccctcacccccaggcccgaggaccatggcaccaacctcacctgtcagatgaaacgccaaggagctcaggtgaccacggagagaactgtccagctcaatgtctcctatgctccacagaccatcaccatcttcaggaacggcatagccctagagatcctgcaaaacacctcataccttccggtcctggagggccaggctctgcggctgctctgtgatgctcccagcaacccccctgcacacctgagctggttccagggctcccctgccctgaacgccacccccatctccaataccgggatcttggagcttcgtcgagtaaggtctgcagaagaaggaggcttcacctgccgcgctcagcacccgctgggcttcctgcaaatttttctgaatctctcagtttactccctcccacagttgctgggcccctcctgctcctgggaggctgagggtctgcactgcagatgctcctttcgagcccggccggccccctccctgtgctggcggcttgaggagaagccgctggaggggaacagcagccagggctcattcaaggtcaactccagctcagctgggccctgggccaacagctccctgatcctccacggggggctcagctccgacctcaaagtcagctgcaaggcctggaacatctatgggtcccagagcggctctgtcctgctgctgcaagggagatcgaacctcgggacaggagtggttcctgcagcccttggtggtgctggtgtcatggccctgctctgtatctgtctgtgcctcatcttctttttaatagtgaaagcccgcaggaagcaagcagctgggagaccagagaaaatggatgatgaagaccccattatgggtaccatcacctcgggttccaggaagaagccctggccagacagccccggagatcaagcatctcctcctggggatgcccctcccttggaagaacaaaaggagctccattatgcctcccttagtttttctgagatgaagtcgagggagcctaaggaccaggaggccccaagcaccacggagtactcggagatcaagacaagcaagtgaggatttgcccagagttcagtcctggctggaggagccacagcctgtctgggggaaaggacaagtcagggaccacttgctgaagcacgaagagcccttgtggcaatgttaacattaactgatgtttaagtgctccaagcagagcagaaagaaaacagatgatggaattagagaggtgggctcaaatctaggccctggcactgtcatcaagcaattcactgcatccctctgtgcctcagtttcccattctgtaaatcagagatcatgcatgctacctcaaaggttgttgtgaacattaaagaaatcaacacatggaaatcaa

SEQ ID NO: 497344 - DNA, 478 bp, Homo sapiens
agcgtgaaaatatcttataaaatcttttaaatatatatataacttagcatacacaaaaatagaataatggtgaaatatgtaaaagtgtgaagcaattgcgagtcgaatattgatctcatgatagtgtagaaactttaggtgatgacttcagtattatggttaatcaagcacattttacagttgacatttatttacaggaattttaaggtcaaagcatgagcataactatattggaatgaacgcagcgcagttgctctgaaatgggtgcttccttatatgtgcctagaaataattctcatattagctctgacttctgtagagtaggcatggaactttacaacattcagctaggaagaaatagaatctaattatgtctggacacgcatgaaaaaaaaaagacaaaaagaaagaagggaaactagtagactatcaattcctaaaatgacaaaagcgggaatacacgtgggattaaaggatc

SEQ ID NO: 497345 - DNA, 236 bp, Homo sapiens
ggatgtagagtttgttctaaactttcttcctcctgtatgccagtggaagtgtgaatgcatagagaaaacagtgaagaggacagactctttattgcacttgattctaccttaaatgttaacagtcttaagggagtatttacgttgtgttttgatattgctgaaagaaaaaatagctttaaaatttctaaaaattgagatggagcccagtctggtcttgaagacctgagcaagccagg

SEQ ID NO: 497346 - DNA, 262 bp, Homo sapiens
tcaatctgcaagtacgcgtagtgatacgctattactttgagatccttagaagcattacctgtccatctccagcaccgtggtgcagtgcaggtacatccagaatcgcagccactgtacacagcagcagtggcacccacccttccatggctctgctcggtgcgagctcttgaagtgtctgtgcgatgcggcccacaggaaactgtagggcagctctctgtgaggctgagatactgccttagccgtggcgttcccattcccggat

SEQ ID NO: 497347 - DNA, 165 bp, Homo sapiens
aaagtgaattttgctccttttgaaatttaagcctttttcttttaaaagaccagtgtaatagacatctaaaattcccctcctcatagagcttttaaaatggtttccttggatataggccttaagaaatccctataaaatgccaataaagttactccaatctgtgga

SEQ ID NO: 497348 - DNA, 1084 bp, Homo sapiens
ggaacagaaacatagatgtggctcctctttctgcggcaggagttcatcccggatccagggctaatcgtgaaggagaccgggaagccatcgtggcaggttcgattgatgaggagcttcaatgaccatgtgatgctgttcacgcaaaccatgaagctcgtccaccgcgatgcacatcctcctggggctctctggggactgacacggtgtaatgtagcctcgcaatggaacttgtctacaacgaccgactacggcgtgctgcgtagcgtcctctccgggccgctcttccaaggtatgacacagcattgtaggatcctcgtggacccatctggatgttgggtcatgcccgtgtgaacttgactattagagcggggggtcgaaaacgtgctaatcatactttctcaatgtcctaattaccatctaaacattatgtccaccgggtggggcgaacagcacgtgctggcagggctgggtgctcagtctctctggtgggagaagtatgagcggacgatgctgataggagggttgtctttagactgtctacgcgcccttgtcacggccaggatacttctctgagtaagtcctgctcctcatgaccgcgtaggcgcattgatgatgacttggatgctccgacggtgatatggagattctgccgatagaccgtgggggcatgaccgagattgggaggtgcgaactggtctcagtgcttacagcatacagagtactccggggagaccccgggaggggctgatgctgggatagagacttgagcagggacgctggtttactagtaccacacgcctcagcggtgcaaggcgttactagacaaagcatatgaaggaatctgctcgactctaaagacaatatgtgggacagacctattgttactccgtgggggaatcgaacaggaacgccaatcgtagaccaagtgaaactcttaaaatcgacgtactaatatgtgtgatgtcgacagaattcgttccctacttaggaaaggtaagaacacaagcggttggggaggatggaaagggtcccaagggagccatggaggaaagacacgggtagcacgctattggagaggggcaca

SEQ ID NO: 497349 - DNA, 432 bp, Homo sapiens
tggtatagatggcctttttatctctctactggtctttccttgcctctgccagccgcttatgatgctgttctcttaactacgttggcggggcaagggggtataaaagcagctgtaactttctatgtatggaaactggtctgggtgccttggcttacgggttaccttgtgtcatacctttgaaacaagggacctgtccaggcttccttctgatgggcaacccacctctaatgctggccagtctatttcacacaaagttctaagttttcctggtgtcacagtaacactgtaatctcccttaaattctttcttgaatttttttttaacatagttcctagtggggtgggcttatttgtacctgacccatgcttcttcgagacaaaacaccacacccgcgccacacacatgccaaaaaaaaccccccaggtaaaaagg

SEQ ID NO: 497350 - DNA, 688 bp, Homo sapiens
  misc_feature (550)..(550): n is a, c, g, or t
gcataaattgttcacccctaaaataacacccctgctcgtcaggaatgggggctgatgtccagcctgtgccttgcatattaaaacatagcatgcctataatcctcccagaagtgtccctttaactgatacccacaaatgtcccatagtagccctgaatgaagaacctctgagacctctcttctgtgtcagtttagtgtatggtgtaatataagagtttgattttattcttttgcatatatatatgtatatcgtttcccaacaccattcattgaggaaactatcttttttcattgtttattattggcacctttgatgtgatttcaatcttcttaaatttgttaagacttgttttgtggcctaatatgtaacctatcctggagaatgttcaatgtgcccttgcaaagaatgttctgtatatgtctattagattcagttggtctatagtgttggtcatgtctgctatttctttattgatttttttttttggtatggataatatatccaatgttgaaagtgaggtattgaaattcctctgtttacactgttattntattgctgcctatttctcccttcagttctgataatgtttgttttatatatttgagtgttgtggtgttgggtgcatatttatttacagttatattcacttgatgaaatgatgcctttattgttacataatactcttctg

SEQ ID NO: 497351 - DNA, 996 bp, Homo sapiens
  misc_feature (996)..(996): n is a, c, g, or t
tgggaataacaaaattaaaccctctttttggtttaaaaaaaaaaaaaaaaaaaaaaaggaaaaaccccacaggaaaaaattttcccaccgggacccggggtccccccagaacccccccgcgtccggcaaagacaggccaccacgccactagtggggtggaattggggggtgccccatagaggaatgaacccttctatggagggcgctgcgccttgggggggaggagggcaccaggacaccaccattaatgggtggccggcggggcccaaaagtcactagtggcagcgcagccgcagagtcggcccgtttaaagagagggggaaaattcagaaagacaacttacgaaaagcacaagtaattcagagagcccgggggtgtgtagtgtggccccggcgtgccaacagcgagataactaataagaggcgagagcccccaccacagcgaggggcgccagcaccgcgactatagtggagacgcccctagggagggaggccgcgcccacttggggggttagaaaagcgcaccaatgagctacaacgccccttcgtaaacagtgaggcatcttctgcgaggcgcagtaagagtacgatctgtcccccacagacaaaatctccgtggaaaaacgacaccccctgtgagcccttagagcacgagagcgtcctgggacgaagaaccaaggctcccccccttatgtgtggcacacacgcacagaagtttaaagaggcgcccgagtctagaagactccactgaggagcactcaacctctgggctaccccaggggctgcccgcgcaccagaaagtacacttcagccaaagggggctacgcgaccactagagcagagaggatacaatcgccgtcgggggccaagaacccagcagggactacccccccgtgcggccggagtaaaaagtcgtgatgtccggaacaaagacgggaggtagcaagaactacccacaaggctgctccccccaagtgggggcgaaaccgtagagcgn

SEQ ID NO: 497352 - DNA, 442 bp, Homo sapiens
gcataaattgttcacccctaaaataacacccctgctcgtcaggaatgggggctgatgtccagcctgtgccttgcatattaaaacatagcatgcctataatcctcccagaagtgtccctttaactgatacccacaaatgtcccatagtagccctgaatgaagaacctctgagacctctcttctgtgtcagtttagtgtatggtgtaatataagagtttgattttattcttttgcatatatatatgtatatcgtttcccaacaccattcattgaggaaactatcttttttcattgtttattattggcacctttgatgtgatttcaatcttcttaaatttgttaagacttgttttgtggcctaatatgtaacctatcctggagaatgttcaatgtgcccttgcaaagaatgtgtattaaatggaatgttctgtatatgtctatta

SEQ ID NO: 497353 - DNA, 426 bp, Homo sapiens
ccagtgtgttccttccgaatctgcctccccgagcgagcttgcttcacgcgccatacgatctcggctgtaggtcctcggtagtgccttgcggtctcaggattcttcctaggccgtggtgtcctctctgttgcgtgcgaccctgactggattctggactgttcctgtcacgctggttgccacttccagagacctcgtaaaactcttgtccgaaggctctctgactgatcccttcccagatctcctcggcttagcaggtgaggactgacactgcccgatcacctcagaagcctacaagaccatcacagacgctctaagtaactctcacacagtagaaattaagtccatccccttcttaatacggaagctactcactccacattaccttattttcaaaggtaatgtgtagtgaggttccatcgcggggat

SEQ ID NO: 497354 - DNA, 198 bp, Homo sapiens
gaaatgtgtctcaataataataatagtaatggagaaaaagacacgtctcagggcacgagacagtattacctttaaaaatgctacctactggtcgaggctctggaactacttgtgtctttagatagggattttaaaactatcacttaaaatttttctaataagttgagaacttaataagtatgatgagacagcataata

SEQ ID NO: 497355 - DNA, 509 bp, Homo sapiens
  misc_feature (186)..(186): n is a, c, g, or t
  misc_feature (238)..(238): n is a, c, g, or t
  misc_feature (466)..(466): n is a, c, g, or t
actcttagaggatcccccacaccacctgagtcgatgggtttgccggcggcctgggcctcttcgatcattttgatcaagggccaggcgcgtttgcgcaggctgactggctcctcgacaaaaggcacggactcgcgttcatccaccattgcagacgacacctcatccgataaggcgttcaacatggcnagagcccgaggcatatcctccggctcaatgatgcccggctgctgggcgaccntacccaacaagccaagcagcttgttacccaaatcattcaaaagcagcaaatccgcagtaacgccacaccgcagcctaatcgtcatttaacgtccccgcgagcctcacttgtagataagtctacgctttcggatccagtggtcaatggcttaaagcgtgcggcctcaagcctgtcacgcatggcttcagccaggttctcgagcttcacggtgttataacccagtatttngtcacgcgcctagccaagttgatggcgactgttgcgtgactat

SEQ ID NO: 497356 - DNA, 375 bp, Homo sapiens
atccccattttccagagcgggaagccgacgctcaaccccgcgccgcgacttgcccgaggtcacccagtgggccagcggctccgggaccgaggcgcggggcgggttgaggccggcgctgcaggcagcggcggctgcgcggtgaacgaggcggcctgcgcggcggagtgctgagtcccgatccccggctctgtccggcccacggatcctcaagcccgggccccgggcccggccccagcctcagccctgagcgtctcggggcggatggcgcggggcggcgggggcgggcggtgctgagccctgcgcgggccatggcctcggcctgcggggcgccgggcccggggggcgccctgggcagccaggccccctcctggtacc

SEQ ID NO: 497357 - DNA, 970 bp, Homo sapiens
gggctcggagcgcgaaacatggcggggcaggacgctggtgcggccgtgggggacgatactcaagaggacgagggcgacagcagcgtgtccagggcgggtgtggaggtgtccgggaagctgaaggaccttaaatgccccttcctcgagggtctgtatatccacagaggccaaagacaattcaggaacttggctggttgcagccccctcagagtaccgttgtgagaatcctagaagtgatgttgtacccgggggtcttggccctcactgcagggcaccaggtttcagctcacttgagagggggtcccccaaccaaggagggtgaagatcccaagaaaatgaggaaagtttgggccacgagctgaatgccttggttttgcgcccagtattgacccagggagcctccttcaaggggttgtgcctgcgcccaagaaaggcagataacacttttcatggcccagtggcctcgataccaattcgggaggcctgacccattgtgtgtgggctccgagttggctcgaccctgatggagcaactttcggaggcaacccccaggggcagacggcaacgagcccttgcctgggggagctcttcatatagacccccaacttgaagatgctcctgaatccaaagttgggacccggtgccctgtggatttgcgagcccctcctcaaacaagcagagtggtgactggcagtgggccagtgcttctccaggtccgacgagaggaactgcggacttgccaggcagctgcaggacaatgctgccaattggcccgtataagggagactgcacgcgttccagggctgcgtggccacgacttagccctaacaaaacgctggtctcggccccgcatcttggtctccataccggggaggtgccgcacgcaccccgggccatagcgccaatgttcaacacgcgtgtgcggcactgcggccgaacagagtgtggccccacacgtatatcgcgagcc

SEQ ID NO: 497358 - DNA, 191 bp, Homo sapiens
ctgcctgagcctcctgaatagctaggacgataggcatgtgcccaccatgctcagctaattttaaaatttttctgtagagaccaggtttttctttgttgcccaggctggtctcaaactcccggcttcaagtgatcttctcgctttggccccacaaagtgttgggattacaggcatgagccattgcactccgg

SEQ ID NO: 497359 - DNA, 627 bp, Homo sapiens
gtacttgccacaggacagctcacccacggggcagtgggcaccatagagcgatcacctctgtccttatatgccagagtagagtacggcccagcaaaagggagaagatcagagaacgcagcagcagttttttttctggtttccttaccattttatcctttcagagttaaaagaaaatgggatcaggcacagaacactatgcatttggaaactggtccatgccgggattttttccaaatcatttttatctacagaatttaaacaaaaattagatgtcgggcacgggcggtgtgaaagaagatggttggcatatgggcggcacggcatcagtatcttactaaaattgtgaaaggaaaggactatggtacacggaaaggcttaattgtatctgaaagcacaaggtgatactcatttgaagggtcttcccatgggggcgggttttggcctcttggacatctggtcatcagtattgagagggtgagaagggaaggtaccaggtatacataccttttttaaaaacaataactttgctataatcacagttgttccagaggcctgtcagatacattctaatgaccagaagtggtttaccaaaagaaatacggcgtgggaaagaactttaaatgacct

SEQ ID NO: 497360 - DNA, 204 bp, Homo sapiens
  misc_feature (174)..(174): n is a, c, g, or t
cgggctcacatcattcaatactaacataaaagaacgacgggtcatgcgtaatcccagcacttgggaagccaggtgggtggatcacctgaggtcaggagtcgagacagctgacaacatggagaaaccccatctctactaaaaatacaaaagtagacaggcatggtggcgcatgcntgtaaatcccagctactcggggaggcacag

SEQ ID NO: 497361 - DNA, 458 bp, Homo sapiens
tgatgagaagggaatgcgttagaggatgcagctagaagaggagatatggcgctgtagaaaattataatgagcggtggggaatccggcgggggctaacaggcttagctgcagtacgccaaacgagggaactgcagcgggggctacccaacccggtgatgcgttaagataagggaaatgggcgaaggcactctgactgagaccaaactaaacgtgaatggtgccactaaacaaactggttgatggggccgctgaaacaatgaatatgcaagtgaacaatgcgaaaccgaaaggaggcctctgtagcggggcagctgtggcccgtacggaaataaaaacacattgatggtaaggggtaacgctaaataggagtacaagagaaaggatacaagctcacaaaggggacgcggtgttaagataaagggggggatggaaagcaatgcttataacgagaccagcgg

SEQ ID NO: 497362 - DNA, 428 bp, Homo sapiens
  misc_feature (19)..(19): n is a, c, g, or t
  misc_feature (21)..(21): n is a, c, g, or t
  misc_feature (23)..(25): n is a, c, g, or t
agagaactagtctcgaggncngnnnaaaaaaaaaaaataaggccagttaaagaaaatgtaacgtgtgctttcagtggcactgggatgagtacaattgttgtttctttgcttggagaagcgttaaaacatttttattcgagtctataattggaagagagtttcttgtgattgggcttgtgacagtcacatttagagtttacttttaaccacagcaattgcgatttgtgtacaaatgaaaaatcctttggtgctttaatggcgcaaagacttgtacggtgaattcagctgtcccgaatacatgtggagagcattttttctaagggctctttcagggtctgggttaatatttacgtgaggtattgagctgttctaaggttgcaaaagaggattatcgtttgtggactatataaatgaagagtgctgtcatt

SEQ ID NO: 497363 - DNA, 410 bp, Homo sapiens
  misc_feature (16)..(16): n is a, c, g, or t
  misc_feature (73)..(73): n is a, c, g, or t
  misc_feature (146)..(146): n is a, c, g, or t
  misc_feature (149)..(152): n is a, c, g, or t
  misc_feature (156)..(158): n is a, c, g, or t
  misc_feature (168)..(168): n is a, c, g, or t
  misc_feature (173)..(174): n is a, c, g, or t
  misc_feature (180)..(180): n is a, c, g, or t
  misc_feature (187)..(187): n is a, c, g, or t
  misc_feature (193)..(193): n is a, c, g, or t
  misc_feature (196)..(196): n is a, c, g, or t
  misc_feature (201)..(201): n is a, c, g, or t
  misc_feature (259)..(259): n is a, c, g, or t
  misc_feature (270)..(270): n is a, c, g, or t
  misc_feature (284)..(284): n is a, c, g, or t
  misc_feature (295)..(295): n is a, c, g, or t
  misc_feature (299)..(299): n is a, c, g, or t
  misc_feature (325)..(325): n is a, c, g, or t
  misc_feature (332)..(332): n is a, c, g, or t
  misc_feature (343)..(343): n is a, c, g, or t
  misc_feature (346)..(346): n is a, c, g, or t
  misc_feature (362)..(362): n is a, c, g, or t
  misc_feature (367)..(368): n is a, c, g, or t
  misc_feature (370)..(370): n is a, c, g, or t
  misc_feature (374)..(374): n is a, c, g, or t
  misc_feature (396)..(396): n is a, c, g, or t
accattcttctagggnagggacccacatatacgatccttccccaagaactttgtatgcgaccccgctgaagantttaagcacaaaacacagtgcttgtatcatataagtgagggctttcataggggaaaactgtaatataaatgcnttnnnngggnnnggcgttgganggggnnggcaanagaaatntattangcntgagnctcaaatatccaacattttcctatcttacattttaaaccaaagttaaaagaacctacnggctttatgangggctctcttcgcngcgcacgcggngcgngcactttcaaccaacacacgctcccnttgtgcnatatccttagncgnccacataatatacagntacanncnccgngtcggttcggcatcaggcattnttcaatctcacctt

SEQ ID NO: 497364 - DNA, 395 bp, Homo sapiens
cagctcccaaaatttttaggctgaattataaaacttggggagggttttaataggtttggccaaaaggaaactcttatttctatttttccaaaaatttaggattttgtttcggggccctaatatgtaaaacaaaaagctcctttttggggcctccgggaaaattcccggccactcatattttcatgcggttcatgaaaaattcaaggcccccgaatttaaaaagcttttttttttgaaccaaaaaagttgatttttccagggcgggggcaaaaattttaaatgtgacccgttgggttttaagcccagggaccaagttatttttaatttggttttccccttggaaccaagcccgtccttcaaaaataattcaaatgtttataaccccacctggtgta

SEQ ID NO: 497365 - DNA, 492 bp, Homo sapiens
aaattctctcccactgtgttctaaatgtgccaggatgttcaatagaaaatgtcacaaccctgtgctctgtcaactctaaaaccctctcctctccccaagtcaaggcttcagaggaaataaaaaagtatcactgcttatacaggctgtactgagtttatcacatccattatctttctgacttctgtccttgggattccagttggtcttgaccttgtatagctgccctcacagtatctttgtcagtttatgcatactacttctattatttctctttctcaaatcaatttcattgggtatgttagaaatatgcagaaattctagaaatgaatgtatatgtaaaaagatattaacaaatatggaaaaaagaaatatataacatatatactactctcaagatggtatcaatcctcaagatctcattttcttattaggtccttattgaacttcacttcttagttataaaagtcccttaaaaaaaaaaatcagaccaaa

SEQ ID NO: 497366 - DNA, 596 bp, Homo sapiens
  misc_feature (2)..(3): n is a, c, g, or t
  misc_feature (6)..(7): n is a, c, g, or t
  misc_feature (12)..(12): n is a, c, g, or t
  misc_feature (71)..(71): n is a, c, g, or t
  misc_feature (166)..(166): n is a, c, g, or t
  misc_feature (418)..(418): n is a, c, g, or t
gnnggnnggggntcgccttatggaatggtctcgtcaaaactggcaggttttcctggctgaatcagaacagnctgggtcttgtttcattcaatactcccttggaagccaagcatctctctagggaatgccatctgcagtggacatcaggtatctcaatgccctcttngcaaccatgcaaatatcctggttccatttctatatctcaagagactctgctctttcttcagatgagaaaaatcatgataaatgctagtctttgagaagtctgccttgctgttcctcttccagggaacagttcagttctagccagaacaaatgattcctggagcttcatccagttcagactgcttctatacctagttccagagccaatttataaattcaagacttcccttcctcaactgtacctgaatgtctnaattcacttctagatgtttccttgatcaacaacagcaccaagagcccctcacacagtactcccaggtacactacctcaatcaccaccactgttatcccatcacacagtactcccagcttcacttcttcaatcaccaccaccgagagcccctcaagcagtactcccagcttcacttctt

SEQ ID NO: 497367 - DNA, 86 bp, Homo sapiens
gggcagagccccttaaagctgctgtcactagatgcccatggtccaggcctggtgggcgtgagaggataggtggcagggcagaaact

SEQ ID NO: 497368 - DNA, 314 bp, Homo sapiens
gccatagatggtgtgctgcgtactagctctctctccatcggatcatatatctaccttacacagactcagaaaggtctcacagtatcactcctatgcaatcagtgataattcagcttatcttactgacttactatagcatctaaatatctatacatactttctcttgaagattttattcccttgattgtcctgttctgatgtccccggcccgggttacaggccggtctcagtctcctctggcttctctagtagatattgttaggccggattccattattctcaatggtccctttctttctggcacagtccttggg

SEQ ID NO: 497369 - DNA, 120 bp, Homo sapiens
aagatagagacaggtttctccatgtttgctcaggctggtctcaaacctcctagacctatgttgatcctgccttgcctcgtgcctcccaaacagtagctgggcattcaccagtgcgttgag

SEQ ID NO: 497370 - DNA, 363 bp, Homo sapiens
agcagcggagaggggacggagaaggggcagggagagaccacgccataggacaccaccagccaatggaaacttagtacaagtttggaccgcaatagcatcctgacaggcttctatcttctttggataatttctggtccatagtacaggattcttaacatggaacacgctaaaacagacagacctaaagccaggtctaacagaaagggcaagcctcctgagacatcctccgaagactcctgagcgcgaactgtgcaagcaaagccccacatggatattatcaggagtgtcgtgttcacggccacttctcattacaaaggagaaggtgactgtatctccttccaacttcaccaagtctccggccta

SEQ ID NO: 497371 - DNA, 937 bp, Homo sapiens
  misc_feature (16)..(16): n is a, c, g, or t
  misc_feature (61)..(61): n is a, c, g, or t
  misc_feature (91)..(91): n is a, c, g, or t
  misc_feature (93)..(93): n is a, c, g, or t
  misc_feature (102)..(102): n is a, c, g, or t
  misc_feature (164)..(164): n is a, c, g, or t
  misc_feature (202)..(202): n is a, c, g, or t
  misc_feature (209)..(209): n is a, c, g, or t
  misc_feature (219)..(219): n is a, c, g, or t
  misc_feature (231)..(231): n is a, c, g, or t
  misc_feature (265)..(265): n is a, c, g, or t
  misc_feature (271)..(271): n is a, c, g, or t
  misc_feature (283)..(283): n is a, c, g, or t
  misc_feature (300)..(300): n is a, c, g, or t
  misc_feature (322)..(322): n is a, c, g, or t
  misc_feature (326)..(326): n is a, c, g, or t
  misc_feature (354)..(355): n is a, c, g, or t
  misc_feature (360)..(360): n is a, c, g, or t
  misc_feature (366)..(366): n is a, c, g, or t
  misc_feature (369)..(369): n is a, c, g, or t
  misc_feature (391)..(391): n is a, c, g, or t
  misc_feature (393)..(393): n is a, c, g, or t
  misc_feature (698)..(698): n is a, c, g, or t
  misc_feature (869)..(869): n is a, c, g, or t
  misc_feature (876)..(876): n is a, c, g, or t
  misc_feature (926)..(926): n is a, c, g, or t
ataatattggtaaggngccaattacagaataccctagaatgtggaatacaaaatctcaganacaaaataaaaactcatgaaaatataagancnctttaaaanggtaataatctttaggataaagacagccttttctcaacacaggtactgggcatgtttaatanaaattaaatgagattaaagagagggggcacagccacangctcccngccccggggngattaggggggngatgtttgtgtaggtgagagcgtggggccagggngcaggngggctccgggcnccaacagtgctgcggtnggctgtctccacgtgggtgggntttntcacaatccactcacggggtagggattnnttttntctccngtngcggaggggccttgtgcatggncngcgttggcatgcggggggggggcaacacatccatgttgggggcccctcccatccacagccccagctgccaccacggcagggcatgggctttgggggcaacaaggggggacaggctgtctcctctaggaacaactcattattcagctaaacgaaatggaagagctccatgtgaccaacaaacccaaattgagccaaaacaacaggcgtccccaccccccagagggataatgtgccaccaccctgtgtgcagtgggagagcaggaatggaggaaatattcctggttcagttacactcctcgtctgtnaggacagatgtgccaccctatctcggattccgggagggtggctgggggtttccctcaactctgcagcaaatacttcaatgctactgtcatttgaggcctaattttcttccaagggcactatatgccatgcttcacttgggccagatgttcagatcagtgtgtctgctcgtncccattnagaacacaaacacaattatttatttgtccttccagcacatgtagcagtgnagagaggctgc

SEQ ID NO: 497372 - DNA, 105 bp, Homo sapiens
gtaagtggatcggtgggtttatctcaaggcctgagtagccggtaccaaacgagggttcccgggattggcccccggaagccatggtaggtccagatcccgtggagg

SEQ ID NO: 497373 - DNA, 322 bp, Homo sapiens
tcaagcaattctcctgcctcagctactcgggaggctgaggaggagaatcctgtgaatccgggaggtggaggctgcagtgagccgagattctgccactgcactccagcctgggagacaagagcaagactccgtctcaaacaaacaaaaaaacacccatatctcaaacgagaaaatgcttgcaaataacctgaaaccgcggaacactattctttttaaaacgagatattttaagtaggtcgtgaaagtggccttaatgttatactgccttattccagtgacgaatattcatcatgtgtaaaatgggagaaatgaaatgttatta

SEQ ID NO: 497374 - DNA, 425 bp, Homo sapiens
tgtcccccagctgtcaaagcgttaccccccaggggcggccccctaatgcccggaagttcctgggtgcttccccgggaaccccaaaccccgggattcctaggggggggccctttcctcccctttttccccccccaaagccccagccctttgctcctgcccccccccgcatgttttttttgttgttggggccgggccccctcctttttgggcccaagggggccccctccccccccccctgggccctatggaaggggttttttggccaggccccccttttccagaggggggccagggtttggggttccctttttttttttttttttgggggccccctagggccccggttgggggggggaaggtgggggcttcggggggggctttaatgggccccgggtttttgggtaataattttcctggggtttgta

SEQ ID NO: 497375 - DNA, 109 bp, Homo sapiens
gtggggttacttagaggaccccggtagagcggtctgtcagtgagtgggttaacgatccagcgttgtcgtgagctgtggtgtaggttgcagacgtggctcggatcctgtg

SEQ ID NO: 497376 - DNA, 374 bp, Homo sapiens
agctcgaaaaggggaaacaaagtacgaatgctaactcacttgatgtgtcagttattttgctctgggacttccgaacaagaactctgctctcaagtctggtgtacctctgataacacagtgaaggccaggggtctacagaaccacagacccatcatcaaaggccccgggtagactaagatctgaatagctttacttccaaagtcaatctcattcttcagggcgtatagttaacagcttgtagcagtctataggtaatcttcttattctttcataatcttatacaccatcacagagaaacatggaagcagactagtcagagaaagctaattctgaccaacttgatactatatgaaaataagcaaaaagctatagca

SEQ ID NO: 497377 - DNA, 838 bp, Homo sapiens
gcgacacgcgggctatcctcggggccgtgctccacgagggctggccgtgggaaacaaccggacgcttggtggccccagagtccgcgggccgcccccagttggaggttccaaactgggaaagggccacgcaaaggtgacaagcggcagcgaaaggaccccctccgaaaacaaatatagcgggtgtcgcagcccactagtggtggtcgcaagaagcacgcccccaaggggccgagtgcccccacagcgggcccggaaaacctggggggcaccgcgcgacaccaacgttttccagtttgtggagagccatgggaacacacgggttccccaagaggtttatcctgaacccgcccccttcccgccgatatatgcgcccccttctgaggaggagagccccatccagagaccccaccgcaccctggttggggttcgtggaacaaccagccccaggccacccaagagcccacctgtgaaactctgttattggaagatgtttcccacacgcttcttgttagagaaattctgcacaaggcctgcgccgcataaagaggacctcgctcttcccgaaggaagggttaaaaaaaacttttgctccaattcccaactgccctatgggactatacactcacccactttaaagccactcctcacgcctctaccactgaagggatatataagaaaacaaaatgaaagaatctacaacacttatattcaatctgtttttctttttcgcttggtgtaaacccaccacccccgtctttaaaaaaccataattttcttaaatcacttttgcctcttttttttttgttccaataaaaaaaaaagggaaaaaacccaaaaa

SEQ ID NO: 497378 - DNA, 742 bp, Homo sapiens
  misc_feature (51)..(51): n is a, c, g, or t
  misc_feature (99)..(99): n is a, c, g, or t
ctggtggacttgaatctggtacggatcaataccatatgaccagacccagcncaagcatctgcttggttgctacattctgtttgatgggtcctggtggcntcctctgaccatattagggggtcctcttctcatcagactgcatggtacacagctggcatttgggaggcctctccccttgtggcccatgtgtgcgccccagtgagaaagtttctgaacctggggcacccctgggagatgggcctgggtctcgtctttgtgtcctccatgggatctatgtttcttcccacctgacccccgtggctggtgcccactctttactccagtggccatgtacggtggattagttcttttcagcatgttccttctgtatgataccccgaagtatccagcgtgcagaagtatcacccatgtatggagttccaaaatatgatccccttactcgatgctgagtatctacatggatacccattaaatatatttatgcgagttgcccactatgctggccactggaggccaccagaaagaaatgaagtgactccagcttctggcttctctgctaccatccaaatatcttgtttaatggggcagatatgcattaaatagtttgtaccagcagctttcgttgaagtttagaagataagaaacatgtcatcatatttaaatgttccggtaatgtgatgcctcaggtctgccttttttttctggagaattaatgccgtaatcctctccccaataagcccca

SEQ ID NO: 497379 - DNA, 200 bp, Homo sapiens
tagctaggctcaggattttgataattctaggggagtgcgagtgagtagtacactgtccggcgtgccaaaaggggtcgggattggaaaaccctggggggagtaggggaagggagcctactagggtgtagaataggaagtatgtgcctagcgttcaggcgttctaggctggttgcctcatcgggtgacaaatagactagaaa

SEQ ID NO: 497380 - DNA, 232 bp, Homo sapiens
gttgtatctgtggtgattcttagaggatcccggcgtatcacattatcccaatctcacagcagcgaaagctgcagttcagatttgagatcaagtctccattcacttgcacgtaggcaccacaggcaagagtgtaccggaggcagagagctcttgtatgggtcagcgtttctaagtaagcatgtcaaggtgaaaaagaaccctctagcagtgcactgatttgataatgtgataa

SEQ ID NO: 497381 - DNA, 91 bp, Homo sapiens
  misc_feature (30)..(30): n is a, c, g, or t
  misc_feature (53)..(53): n is a, c, g, or t
tttgagtagaaataagtcatttctttaatncatcaaactgtgggatttcttgnccttgcttctctcctggtcctggcttccccagaggatc

SEQ ID NO: 497382 - DNA, 1171 bp, Homo sapiens
ggtctcgagtttttctttcttctttcttttagcttctagaacctttatttctctgtgaaaagggggaaaataaagggaataaaactaaaaaggggacagttgacacacaaaaaaaaaccaatgatggggaggacggagaggtgtgaagaagtcaactggggagaggggattcccatttacagcagcaggatccatttgacccgggatgcatcacatagtctccctgaccgtgggcggagaagccccatacctcccaggggtcacgggaccgggtccaaccccgggactccccatagacccgatgaggagaggtgtggaacaggtgagaacattattcacaaggacgtgggagacgaaggaggaaccgagagaccttgagaggagaaacagggggcccgagcgggcatcaccagacaaccacacatggacaccagaggggagcaagtgtcgtaagacggacccacaaagcgacaccacacaaaaagagtgtttaattcacacacaaaagagagaagaggagcaatcactagacagagcagagacgacaacaagcacagagacgatgtgcaaccaacacacagaagacaaggcgcacccacaaggaggaaaagcggcagcacacacaataaagaaacaacaaggccaaaagaaagagacagaaaagaaagaacaaaggaaagaacgaaacagaccgagacgaacacaacacacgtgagtagacaagtagagacaaatataggagaacgcaacctcaccaacagaaatccacacgagagagaacaaaaaatggggagacccaccacagagcaatccaacagacacaaacgacgcaggaaaagaagacagcgagaaaaaaacaagcaaacaacaaaccacacaaacaccccacactcggacacacaaagctaagtagcaggctagaagagataaacgatccaccccaaaagccgacaatattagagacggaacacataacaagaagacagatcaaccaagcagcacaaagcaaacaaaagccacaccgatagaggcgacacacgcacacgatagaagcacgagagagcgaggagacaccacattcttgagaacaacaacaacacacaggaggaagactccacacacaaacgaacagaaacgaacaacaagtaggaaccgagcaaaagcagaaaaa

SEQ ID NO: 497383 - DNA, 189 bp, Homo sapiens
gagtattaagatcggtggtcttgagaggggatggaggtgtctggatacctcggctggatgtgcatgtcactcagctaatgggataatggggatgagttcaattcagtctggagtgcgtctgatagtctggttggtgaataaggcagtaaccggcggaagtctggggcgtggttcaggactacgtcacat

SEQ ID NO: 497384 - DNA, 652 bp, Homo sapiens
ctggcctctgtcttagctgtcattttggcggtttttttgtttttttattcttcaggggatttcagtctccacatagttatgggggcgggacttttgaggaatgatccgggaatccggaagtgggctgcccagcgtcatgcacggcgatactaagtggagcagagccagtggagttcttacgggtgccccaggagctcaacttcctagggcatcctcaagaccgtgaagattacttatataggtgccactcctcgtgcgagaaacgatatagaatgcggtcaggaagcagagtctcatttatactcgcgtgatttccaccttcgagaggaaaaatttccccaggtggttcgcagttttgccgggaagagtgtttgaccctcaaagagggtgggcattccgttcgtggcaataaacaggtgggaccttgtattatagcttaaaacttccgcttatattaagattcttcgctatatagataactcgtccaaaggaggttatatcttaaaagacgtttcttaaaatggcgtttaaaattgtgtgtgcgcttagaagaacggcacaaaaagtggactttggctggtggagaactgtgtgggacgaaaggatgtgtcaacacatccaaagggggatttttccaaaagtctccctgagg

SEQ ID NO: 497385 - DNA, 367 bp, Homo sapiens
ccgatcgtcgacacgtacacattctcgctcgctcacacactattaaccgatggcagatcacttcccagtcctacacactgacacggacccatagagcatctagcccctccttggctctgcctgtgatgtggtaggactaccgtggggtacgtgtccaggccacgtggtctggacacttaggtgaacatccaggtagatggctgcagctgatcgtatgtattcctgtaactggagccgcgctagaaccgaccccgtcatccgccattgctataaggactcccctaggatcctcgagtctctcgccagggtgcgatcctcgtctgcagctcacatactttgtaggggcctggctgcacccacacagctt

SEQ ID NO: 497386 - DNA, 275 bp, Homo sapiens
atctcatacacggatcccgttatgctacgcagaatattattgaggatgtaagcccgtgggcaattatcagaattactgcacctggtcaagcttcagcgtggtttggataataatggctgttacataccagggctatgtggctaattgcacagagtatgcaatgagcgattttaggtctgtttgtcgtagagcagatggacgccttgtttctcattttgcctcatcgtgtgattctacaaggttagggcgtcggtctattgtgttttgttctgcgg

SEQ ID NO: 497387 - DNA, 776 bp, Homo sapiens
ggagactcaggaagagagttctgcaggtcactccctggcttctggaggaaagagaaggagggcagtgctccagtggtacagaagtgagacgtaatggaatcaggcttcagctccaaggagacctatctaagcgattatatccctcgggatttagctagaagaaatattgcaagtaggttctaggccagtctgcagaagagcccagattcttgaagcggcttctgaaacaaatcttttcaagatattctgcctagacggtgtgaaggggagatctgctgattgacatcggctctggccccactatcgtatcatgcgtcctctctgcttgtgaatccatttagatggagatcgtcgtcactgactactcagaccagaacctgcaggagctggagaagtggctgaagaaagagccagaggcctttgactggtccccagtggtgacctatgtgtgtgatcttgaagggaacagagtcgagggtccagagaaggaggagaagtggagacaggggagtcgagctggtgctgaagtgtgatcgtgacttcagaagccagacagttgggggccgtgcacccttaccctctggctgatttgcgtgctcatgaggactgtgtttcggatgccacgactgaccagaactccccacctactggagggcagctcaaggaaactcggaagcgtagtgaaggccaagagggtgccgggtgatcattggatgtgtcaagagcatgtactaaatgataggtgagccgaagttttcaggctcccttgggcagga

SEQ ID NO: 497388 - DNA, 1443 bp, Homo sapiens
  misc_feature (960)..(960): n is a, c, g, or t
  misc_feature (1173)..(1173): n is a, c, g, or t
ttaccaacagcggggtgaatcaatgctctttatgttgaccccactttatggggccgcttaattcattattagggggggctagcacacaaccgtattgatattggaagaagaacaaacagggtgtgtgtgtgttgacaccgaacaaaaaaacgacacaagagcgtgctgggtgggtacacagccggggttctcccgcgagaaatggttttctcccgcggggaagaagaccccttcttcttggggggggagttgtctttctaacacacacaaaacgaggggggaccacaccacaccccacacgaaggagggccgcaaatttttttgttgggggggggcgccaactataatcaccaaaagggaagtttgtcttgttccttggaagagtgtttgtgggcgccccctttgttctttcccctctgtgtgtgagacaaaaacccgggggacgacagaaagtatttggttcttctgtcgggagttctctcctcgcacgaagttttgtaacccccgctttccacaacgcgcctcatgctggaggagaaaaccaccccctgcggggttggtttgtgccgcaaaaaaaaaacacgagttgtgtctccacgaaggatttgatgagagccgccaaaccttctctagagaagatggtgggttgtttctcttttgtgtggctcccccgcgattttgtttctggccccccatacacaggccgagagcgcttacacccccggattcgcatcgtggatgtctctccctcgttgggacttggggggacaaaaaaacacttggggctctaaacagaggtttatggaggacacctgtgcgttaaacatgccacagacttggtgatagagacccccacccaccatatggcgccgcacaaacacagagcgttattctcttgaaaacacacaggggtggacactggtctttcttctcccagagatgtggattcacccctcttgntgcgctttctctgtggagaccacacagagaattgtgcccccaggccccacagtttatgggagttctctcaacgaaggcgcaaacaaacacctgttacacacagcgtagaatgtgtgtgggacaatctatctaacacgccacctgtgtgcgctgttagcaccctatacccgcgctatctctggcgctgttggtggctgcccacacaggcgcccncagcgcatctaagaaatctcgggatattgagaaggggaagaatacattgtagatagaactgtagacaagaagatttatccagtgacccagccagcaaggccaggacccacccccgtgcgacactctccctggcctggtttcgctgataggcaccagacatgctgtttgctgggtaacacgggcaaaactggtggcgcagtgtggcaggggaccaatggcacacgctagaagtttttggcagagctttacaaaaaaaaaaaaaactggcca

SEQ ID NO: 497389 - DNA, 224 bp, Homo sapiens
accgtacgttgtactcccaggtcaggttgtactggattataccaatacccagctacgcaaaatcttagcataatcctcaattacccacataggatgaataatagcaattctacagtacaagctgccggtgtagtaccacctgccggtgggagttacaagctgccggtagagtacaaactgaccggtgaagtacatgctgtccgtgtcggtacatccgccattgg

SEQ ID NO: 497390 - DNA, 898 bp, Homo sapiens
  misc_feature (72)..(72): n is a, c, g, or t
  misc_feature (108)..(108): n is a, c, g, or t
  misc_feature (110)..(110): n is a, c, g, or t
  misc_feature (120)..(120): n is a, c, g, or t
  misc_feature (139)..(139): n is a, c, g, or t
  misc_feature (141)..(141): n is a, c, g, or t
  misc_feature (178)..(179): n is a, c, g, or t
  misc_feature (193)..(194): n is a, c, g, or t
  misc_feature (202)..(203): n is a, c, g, or t
  misc_feature (213)..(213): n is a, c, g, or t
  misc_feature (222)..(222): n is a, c, g, or t
  misc_feature (228)..(228): n is a, c, g, or t
  misc_feature (231)..(232): n is a, c, g, or t
  misc_feature (238)..(239): n is a, c, g, or t
  misc_feature (248)..(248): n is a, c, g, or t
  misc_feature (263)..(263): n is a, c, g, or t
  misc_feature (310)..(310): n is a, c, g, or t
  misc_feature (320)..(321): n is a, c, g, or t
  misc_feature (343)..(343): n is a, c, g, or t
  misc_feature (352)..(352): n is a, c, g, or t
  misc_feature (354)..(355): n is a, c, g, or t
  misc_feature (359)..(360): n is a, c, g, or t
  misc_feature (367)..(367): n is a, c, g, or t
  misc_feature (370)..(370): n is a, c, g, or t
  misc_feature (373)..(373): n is a, c, g, or t
  misc_feature (383)..(383): n is a, c, g, or t
  misc_feature (392)..(392): n is a, c, g, or t
  misc_feature (419)..(419): n is a, c, g, or t
  misc_feature (421)..(421): n is a, c, g, or t
  misc_feature (453)..(453): n is a, c, g, or t
  misc_feature (526)..(526): n is a, c, g, or t
  misc_feature (540)..(540): n is a, c, g, or t
  misc_feature (596)..(596): n is a, c, g, or t
  misc_feature (657)..(657): n is a, c, g, or t
  misc_feature (687)..(687): n is a, c, g, or t
  misc_feature (772)..(772): n is a, c, g, or t
  misc_feature (791)..(791): n is a, c, g, or t
  misc_feature (822)..(822): n is a, c, g, or t
  misc_feature (888)..(888): n is a, c, g, or t
ttccttactttatcaaatttataataattaaatattaatcttatattacaaaatttttcattcattataacnaatttccaataatcctttcaattatatttctaaatntncccccaaatnctaagcagattatttaaangnggcaatttaacttatgcacgcttaactatcttaacannctttgattgcaagnnattgaagnnttcaaatctnaccaagatnttgatnttnnataatnnaattctctnctccccacctctaanttgccatccctgctagtcctacctgtggagcaacctgctcattaacntcaaacttgnntacatcattcaaattagatttntaaataatncnntccnntttaacnttnttntaaccccacnttttttgcntaaattttaattttttaagcttttcantnttaaaaagcaatcaatcagatttttgatttcntccattccaatttctgtgctccttcaaacctcccattgattgcttgctttaccttgtcttcgatacccacttnaactattctttgtngctgttgacaaaagtcacattgtgttcacactggcaatgcataactccatcttttntcagtggggggttgaattcagttgtagtacaaagtagatagaaaagaccagttctttgctngaaagacaagtctggaatgctccacttttntcaattctctctccatttcttcagtaagtcaacttcaatgtcggatggatgaaacccagacacatagcaattcaggaaatttgantttccattctcaaaaaaangacgtgagttaacctgaatctttggagtacnctgggatatcctccaggccagaaatagagagtagcgcgacacagctaaggccacggagcgagaaanctcggcccga

SEQ ID NO: 497391 - DNA, 139 bp, Homo sapiens
tctcctacaccgccaccatgccattcggtaacacccacaccacgttcaggctgattacagcctaggaggagtaccccgccctcagcaaccataaccacccacatggccagggtccttacccttggacctctacaggagg

SEQ ID NO: 497392 - DNA, 1005 bp, Homo sapiens
caggagagcaaactataagatcaagtaaggcaataccagatgtctagtgatcagaacgcctgaaactatcaagccttgcttcaagccttcccatgtcagaggaatcttatgacatgcgaccgattacatcccatcgctcatccacatgattagtaccatcgaggaaatgtagttcgtgcaagtaacccttatgctactagtattctgctcagtgtcctgtaatactgagaaaactgctatactcctgggacagatctcaactactcagatgactatgagcgagatcgtcgaaccactatgccggtctaatctcgtgcaggtcaactccgaaactgtattggacctaccttcgctttcggttgcatagtaggccaggtatgaaacctgaaagtgcgtttaattgcacgacatccgatgctccaagtcagagagcacggagttcttgattcgtgcagcttacaggggtgtgaagtcaatcatagccatgcgcaaggccctagggtacacttcacttcttatcccaatttctaatgcttgcaagctaccaaatggccaggccttgagtactctacgttcttctacaatagccaatattccaagcaacagcaggtgagccaagcatctcgaaacgaggagttattgcagcatatactattctgtggtcacgaatccagtagcaggcctggtagcccagatccagcttttggtgtccacaggtcagactaaccagatgattgccgatgagttagccagatgagccaggaaccatcagttacagtcggaggaagcgtagtgttcgatgggagcgctcgaaaactttgcttgcccaggaagagcattaccttctggaagaagcccttgctaacaagggtccagtactcggtccccagaataaaagcgggtaaagggaaacgcggatgatacgatcccgcgaaaagagctgtataggcagtaacccggggcaagagggaaggtgtggcatctcttcccagagcgtacattgga

SEQ ID NO: 497393 - DNA, 161 bp, Homo sapiens
gccctgtggttactgccaaacacgtcagctgccgcgccatactggggctgcgggatccacgcccctgttcaaggctgcccatgctcgcagtactctgctcgaaccctggagccggacggaagaattaccaccagaggcaaggggactcctctagaagtcga

SEQ ID NO: 497394 - DNA, 157 bp, Homo sapiens
cttatgatgcacttggccccacactgactcagcggaagcaggccctgagggcgagaccggtgtcagaggctgggtccagcaggagctgctgctgggaaggccctggggcgccctgaaaggggtgggtgtgacagaccagaagagagggagagagagc

SEQ ID NO: 497395 - DNA, 974 bp, Homo sapiens
  misc_feature (500)..(500): n is a, c, g, or t
gcttgtgcgcaagcgggttggtcgccagcaacacaggtgtcgtgagacagtacacccttgaaaagccgagatatgggtaaaggaaaatgactcgagtagtcagacattgtcagtcagttgcgacgactgtaggattcagggcgataggtccgacacactacatgggctcgatcatgagtcttatagaatgcaggtgtgctagtcgagtgaataggaatccagttgacaagaagtctttgacgaaaggcaggcattgctcgacgcattgggcaaaccgggctcacttcaagagtaatgccgtgggggtcattggactaacacttgagaatggcttgagccgatgaacacgtggttatcaaccacttgtgagtatcttcctatggtggaaaggtttgggagacgcgagcaaagtcactcatgtggagctatccagttgatgccccaaggactacatgagcacgtttatcataacagaacattgcattaacgagtggtaccantctcaagtgcatgcaacttgtgcctcgtccatgtattagtctgctggctcggttgttcggatgaaatttcgataggctggtagtctcgcaaggaaatgggcagagacctgaagtagcattgccactgtacttggctttacaagcacgtgtggtgtgataaacaaaggtaacttgggtgcgagatgttgacataaatggatttccaactgaagccaccgcatatcagaccatgaacgagcatagtgagggaagactctgtgaacggaaggtcagcaccttacagttgacgaacaattgggtacatagcccgtagcacagtagccattgggtgccaagttcctgggtcggacactggtgaccaacatgtcgtggaagccaaagtggctaggcattgccgtagagttccaagggggatgggacatagtcacgcggtaacaggaatgtggcaatgccacagtgtgaacgaagcctgct

SEQ ID NO: 497396 - DNA, 1069 bp, Homo sapiens
  misc_feature (840)..(840): n is a, c, g, or t
tgtaaggactaagtggtcctcatgaattgcattaagagtgtgtactgctcatattacactccatcctctctgttagttgctgaggtgggaggatggttgggccccggaggtagaggttgcagtgagctgagattgtgccactgtattccatcctgggcaacagagccagaccctgcctcaaaaaaaaaaaaaagaacaaagaaaaagggggcgctgggcgcggggggggctttaacaccttgtaattcccagaattgggggagggccagagggaagggcgaggactaacttggggggcctggagtgttggggaacacaggctgtgagcacaacaagagaaagacccttaattcgtcttaattataattttccaaaaaaaaacttttagggaggttttttaacgaaggtttcgggacttgtcacacactatacttggggaaggtttctcaaaaaaattattggatttgtgtggaagtttgcaggtctatgtggagtgaaaattttctaggggtgtggaacacgtggttatagaaaggagttcttatatttcctataaaaaaagggggtttttctcggggaaaggacggatttttttaaaaattgtaggggatagtgttattattagacgcatttgggcattaacttcgggggtgttaacaggggtggggtaacacaaatttaattaaccactttggtttgaaatcccaaggagttcggagcatattggggtgggccggacatgggaagggtacatacggtcgcccagtttaactgattcaaagaaaattcttgtgcttgtgttctaaagggggccggtgattggccgagaaagtaacgggnctcggctctggatgtggtttaaccggggggtataagaatacctgtgttaactagaaaacaaagtgggcgcgtaaatctcagggccattgcacacacgttgtaaggccaatggggtatagagaggggggaacagggaggaaagactgggtatggacaatgggatgaaaccagaaaacgaataagttgtacgttatcgtattattaaacgaggtagtatgagtttgagata

SEQ ID NO: 497397 - DNA, 406 bp, Homo sapiens
cccacgtcgacacgttagacaagagatctatcatggactctgcacttcggtaacataggtagatcgttccatctcggccttttctagtaccatatccaaatgttctcgttctctatctcagaatattcaatatccttattgtcgcttcttaatcgctctagctcgtgtgctgaagatgtaaatgatgactgcatctgtttaatagtcttgtgtgattcatcgaccttaactttccatttatttccttctcgctcaacacttctctgtagcttctgtaaaattccttctgtttctgcaaggacggatttgtatcagacacactctagctgtagcaatgtgtgcatttcatcagcttctttcaacttgtgctctagaaccttaacctcctctgaccctgaagtgtcaa

SEQ ID NO: 497398 - DNA, 929 bp, Homo sapiens
  misc_feature (4)..(4): n is a, c, g, or t
  misc_feature (59)..(59): n is a, c, g, or t
  misc_feature (141)..(141): n is a, c, g, or t
  misc_feature (145)..(145): n is a, c, g, or t
  misc_feature (163)..(164): n is a, c, g, or t
  misc_feature (266)..(266): n is a, c, g, or t
  misc_feature (287)..(287): n is a, c, g, or t
  misc_feature (300)..(300): n is a, c, g, or t
  misc_feature (311)..(311): n is a, c, g, or t
  misc_feature (324)..(325): n is a, c, g, or t
  misc_feature (338)..(338): n is a, c, g, or t
  misc_feature (347)..(349): n is a, c, g, or t
  misc_feature (355)..(356): n is a, c, g, or t
  misc_feature (358)..(360): n is a, c, g, or t
  misc_feature (387)..(387): n is a, c, g, or t
  misc_feature (402)..(402): n is a, c, g, or t
  misc_feature (406)..(406): n is a, c, g, or t
  misc_feature (411)..(411): n is a, c, g, or t
  misc_feature (415)..(415): n is a, c, g, or t
  misc_feature (434)..(434): n is a, c, g, or t
  misc_feature (449)..(449): n is a, c, g, or t
  misc_feature (487)..(487): n is a, c, g, or t
  misc_feature (492)..(493): n is a, c, g, or t
  misc_feature (652)..(652): n is a, c, g, or t
  misc_feature (866)..(866): n is a, c, g, or t
  misc_feature (910)..(910): n is a, c, g, or t
atgngctataaagggagtgaccaggagcaactgggacactcctttacctcccatatccnatgtatgtgtttcacagaaaaacaacaaaattaacaaattcacaaaatacaacagctagaattacaaaatccattcatccangggnggtagaaggcaggatggnnaggtggaagggtaaatggcacagggagaaaaacaaagtgttccatcatccaggcacagggatggcaaatgctagaaaatagctgcagaaaaacctgtggtcntttcagactcacggtgatgtnaaaaatccacacntggtgtagggnacattctgccttnngtgcaccagaganaaaattttnnnttcctnngnnngaagggaatacgcagagggcccttggnagagcgggttctgcnttcnctggnaggngggaggtgacagggaaaanatctgccacagcttnttccaatcccgcccatcccctttgggtggcaggcaacntagtnncctgcagtagccttcagtttggcaggcgacggatgcggtgaagggaacttctctgcagaagtagagctgctcagggccgactgcaggtagactgtcttgtggaagagtctgttgcttaagaagaccaccaaggagaagaggcgcaactggaagagatangctttgccaggggtctttgcttcattggcgctgataatgaataaaggaaagaggatagagaaaaggcagccactgataatatatgaggactgcattgctgtgagaaaagccaagggcaaccaaacccaaagtagtaaggccaattcctttctatgttagacaaccgctggtgcatttcaattcctttattgaaccaacgatattcaaagcagtncagtgagtagagaagggacatatgcaggagactaaccagctgancgacaagatggatgggaaa

SEQ ID NO: 497399 - DNA, 807 bp, Homo sapiens
tataaaacccctcatcaaatagatggaaacttctacaaaaatagctcaaaccaatttctacaaaatgccagtattcaggcgggggtttcaaagccaaagtgatgttttggattgttaaaggtgaaattatttacgttggcggattgaagcagaattatggtgaggaaacgtttgacccaattaattgccgttgaacgctccgatggaaccctgtggtggctacaaaacattgttgaccgccgatagattcgccgtcggaaagtgcgttgaaggagaacactctccgaaagttactttctgtgagaggctttgtgtagggagcgtggataacaatatagaaagcaccccgagtataaacatgtgtataatataaagcaaggtgcttctgaaaaattatctttgtgagtatatctccggatatgtgttatattctctataattgtagaaccttattgtggtgtacgcctctccacggtgtgtactgtgaatatcactctcccttgataagtccgcagtttaatataaccggcatgtgtgtgttttatagacgaaacttgtgggggcaactttcttccacttacgggaggcaattattataacgcggggggggttataggatttgacccagttgtgtagtgggggtgtgccccatgttgttgccccctttctctatatatatgtggggggggagtataggaggggcggctttaatgcggctgtgagcaggtgtgtgttatacaaacagggggcctcgaagacaaaaaaacattcctctttgcggaaaaagacaacaaaaacaacactttt

SEQ ID NO: 497400 - DNA, 875 bp, Homo sapiens
tggaggtagagtctcactatgttgcccagactagccttgacctctggggctcaagtgattctccctcctcagcctcccgagtagctggaacgaactatagttgcaccacggcagctggaagaatcaccttctttataaagcgtcagtcatgcttccagcaagaggcagcatcagtcagtggctttataacagcttcagggtgcctcaaagactgtgtgaggttaatgagagccgtagattagacagttgggctgtccttccctaaaattggttttctccttattcattattccccacggcatttaaaatctagtgagtttatactttttacggggaatggaaagtgtggtgaagatcattcaacacttatgtggtcatttctcccattttctgaatttcttttctaaatttcccccctttcaaaatggttcgaaagcccacagcttatggaaagaattcaggtctagatggtctgcacaacgtgttgggggtgagtgggagtgacggggcaatgtactttttctccctgtagtcgggagtccattatgagctgctgcttcttcttctcacatctttgtccatcctcctggggcaatggttcgacagcgctgaagcttcccaccagcatttcacacacgggaactccacccaggcattggagaatcttggaggttgtcgcccaacggtggtcagaataacgggcactatgacgctaccaacatcaaaggtgtgggcacacactacagcccttgtctggaagaccacctttggtcatctgtaaccgccccccttacttgcacgtctgttgttatcaccggacacggtggccccatgcttaagggacgtcgccgtgtctcgtgacaacacacagccct

SEQ ID NO: 497401 - DNA, 703 bp, Homo sapiens
agtgagtatgacctccaaaggttaaacacctgtcccaacagcgaagtggactcccatccggagtgctggctcacattaatggaatcgtaacagggactccgagtgctgaaggacttggggattcaggatggaccgctaaattgcttcgaagttgtgtgaaggagtccatcacggttgggcatagtgcggcaccaaggggaagatcatgtacgtcgggaacgtccgcggcgccacacagaagcatatccaggaagtggggcccaatcgaatctgatgattgggggcagtccctgtaatgaccgtctatattgtcaaccctactcggcagggatctctaacaaggaacctggccgacgttttcaaaaaggactagcggctcctggagataatgcgcttgccaatggcgggagaataaagcgcgttcttctggatcataggggaatgtggtggccatgtggcgaaagtgaccaagggggacatcttcatgaatatcgcgcgtcctacccattgatgcttagatgcaaaagaaggtgtcatctagaaaacaggcccgcaacttatgggtaaacttccaggattaacgggcggctagatcaactgttactaataatctgagttgaggaatgttggagctggaaaaagcaagtcaggaagtgagacatattcgagtcaattcacccgaggacgggcgattgacaggtag

SEQ ID NO: 497402 - DNA, 1056 bp, Homo sapiens
gacattggccgcaactttacctgcgaagcgacaccttgtcccgccgtgatccccctaatctcagggggacttccacacaacttgctcgcggtctccacgcgttcttacctcaggaagtcctccgcggatcaattcaagggtgaccccaaggggctcataatgtcttgccccccgtcgaaatgatggcccccagtgttcggtaccgggcgttctataccaacagtaccctatgtacatcagcccttcaagcattcatcagccaagtgcctccctgccaccaaccgactccttaagccaactcctggcccaatggttcatgccatgcacaacattgggtatcatggaaaagacacatgacccacacatccaggccatcactgccacacccagaagactgtggaccggcccctggccggcaaactgtagcgtggatgcccacgcggggctctccagaacatcatccctgcctataccggcgactgccaaggctgcgaggcaaggtcataacccgtgagctgaacgggaagctcaccggcataggccttgccgtgtccccactgccaacgtgtcagtggtggactctgacctgccgtctagaaataacctgccaaatatgatgacatcaagaaaggtggtgaagcaggcgtcggagggccccatcaagggcatcctgggctacactgagcaccaggtggtctcactctgacattcaacagcgacacccactcctccacctttgacgctggcgcggctggctattgaccctcctaacgacgcactttggtcatagctcatttcctggtatgacaacgaatgttggtctacagcaacagggtggtgaacatgcatggcccacatcggcactccaaggagtaaagatccctggaccaccagccccagcaagagcaacaagaggaagacgatgagaccctcaactgctggggagtccctgccacactcagtcccccaccacactggatctcccctcgtcacagttgccatgtagacccttgaagaggggagggcctagggaagccgattacccgcttgaccatt

SEQ ID NO: 497403 - DNA, 240 bp, Homo sapiens
  misc_feature (46)..(47): n is a, c, g, or t
cggaccatggttagtccctgcctcctaccaggacggtcctgccatnnctcaagtgtccacaggtctgatgtggaattcggtgtcacctgcactctcctgttgaagcagagtccttttctgataacgtttctcttgaaatgctcctcagctcttttcacccacacctcaccctctcctgcctaaaggttctaacacctccaaaccagcctgcaacccatactgctgccattaaaggagctg

SEQ ID NO: 497404 - DNA, 212 bp, Homo sapiens
ggggtaaccctccctttgtaggggaggagaaataggggggacgggcaaggagcacatatgtgtcccccacctaggggtctctagccggtgtctctgcccggcctccaaccctctatgtcgagagcagacttcatccatagtagcaccgctacatgaccatcacctcggagcggagcttacccgctgacgtataccagatccaggcgaactcc

SEQ ID NO: 497405 - DNA, 406 bp, Homo sapiens
ctagggcctaattcatgacgccaagttttgcagcatgcagagatgattgcacaggactgacagacattatacgctattgtgattggtacattatgcatggagagattgacagtatttagaaactgcaggatccaaacatatgtgacgacactctgactctgaagtcagtgactggacgggacatgtacttgacctagctaggggaccagtgatggtgcatgaagacatcattgactgattgagagatccaagtctttctcatatgccgttgccacattctgttgaggatctcttgccacagcggataagagtcagactgtattatgacagcattgttgcgagggccagctgctggatactactggagcatgctggattacagtcagcatgagtattgactgtgggt

SEQ ID NO: 497406 - DNA, 395 bp, Homo sapiens
  misc_feature (143)..(143): n is a, c, g, or t
tgggcagatcacctgaggccaggaattcgagaccagcctgaccaacatggtgaaccccatctctactaaaaacataaaattagccaggcatggtggcacatgcctgcaatcccagctacttgggaggatgaggcagaagaatngtttgaacctgggaggtggaggttgcagggagccgagatcacaccactgcactccagccggggcaacagagcgagactttgtctcaaaaaaaaaaaaagaaaaaaaagaaacagcatgaaattcttggtggatgggaaatacccgaagggctggccggggtttttcagagagctttcaaaaagctgaatccagggaggttccgggagatgggcacagccaggagggaagggtagcgcggggtctcttccttc

SEQ ID NO: 497407 - DNA, 459 bp, Homo sapiens
  misc_feature (347)..(347): n is a, c, g, or t
cacgaggcgcatgcctcgatgcgagaaacggcgaagcattcccggcaccggccctgtgcagccgcgcccgacggccgcctacctccagcctcgcccgcgccacgcgacccgaccgcgggttgctggtcgcggaccgggcgccggcttgattcaagtcaatgttgtttgccgcctttggccatagcgtgtgcgccgtcaaggaacgtccgcgacgtccgccggcgcgttgtccatcgcgtttccgtccacccggggtttgtcatgaacactccagtcaagtccacccccgcgccggttgccggcggcggtttcttcgaggtcgccgactggcgtccggaagaggcggngttctggcaggcgaaccgcgcctttgccatccgcacgctgatcatctcgatgctggccctgcacctggccttcgccgtctggttcacctggagcgcgctggtggtgcgcctg

SEQ ID NO: 497408 - DNA, 492 bp, Homo sapiens
  misc_feature (17)..(17): n is a, c, g, or t
  misc_feature (50)..(50): n is a, c, g, or t
  misc_feature (54)..(54): n is a, c, g, or t
cgcgtctgctcctcgcnaagcgccggcaaccggaggcctgtgaggatganacanccaaccacacacaagcacagtaagcctgcacgaaagctgcttgttggagttggatggaatctaagtagctatcagtttcgagtatctgcctcctctccgattttagttacctcaggttcaaggaagtttgagtaacaagaaagaattagtagcaacggtatggtctgcggagagccgagttcaggttcagatctgggctttgcacttactagttgtgtcaccgcgggcagttactaacctctcagtgcctgttccctcgtttgcaaatgaggatgatactagtacctatcttgtagaattgtgagcatgtgaatgagttaacatacataaagcacttagaataatgtctattatatataaaatgctctgttactgattagtcttatcatccatatcattatattaacctgtgttgtgatactggaattttccaatgag

SEQ ID NO: 497409 - DNA, 402 bp, Homo sapiens
  misc_feature (274)..(274): n is a, c, g, or t
cacaatgagactccttttcaaacaaaaaaaaggggaagaatatgtaagggacagggtttagccatgtcccccaagcgggtcttgaatgccggggctcaagcgacccctccacctcagcctctcaaaatggctaggattacgggcttaagcaaagtgactggcacaattgattggctgctggcaccttagcacaacccagggtttagtgggttaccaaaccgagcctaattaattaacgatggagtttttcccccaacatgtgcacattggaaanacaaaccaaaagtgtcagattttacctttccactttaattattctttgagtgaaaccaggcaaacaaaaattttttttaattaaagttgtgggccctccgaattattacattcttcttaaatatccgg

SEQ ID NO: 497410 - DNA, 348 bp, Homo sapiens
tgaggagtcgttttgcggcgcctttctaccctgtcgattaggtgcacagcctctcgcgtgacgtgcgacactcctggacacacttccattctaagcttatgttgacatgtatacaaaccaagtgtctagagattccagttgctgcaacgccctactgtgttcttatgttcctgtctaaaagagaagtttacttagaaataattataaataactgaatatactttagtgaggtgactgcaagatgcttctttccccagctcttggggacctggccctcactcgtcctccgcgcgtcgccagctcttcaggttctgctctgtccgccgccactggcccaagctgacctcg

SEQ ID NO: 497411 - DNA, 454 bp, Homo sapiens
acccctcgctggcctatggaagctccctgtcctcccattgttgatcctgatcctctcatcccctgcgactctgtatggactggtcgggactgcgtttctacacgcgtggtcaaggggacaatgcacctggagttctcttcactccgaagagcccagtggtccgaccatgtgcatgctggtggagctgcacacgctgagcaaggaccgttttgtctacacctgcaatgaatgcaagcaccatgtgcacgacacgctggcactgtactgtctgtgaggattatgactggtgtaatcaccgtgctataacactaaaaaccatgagcacaaaatggagaaactagggcttgggttacatgatgagacgcacaccaaccagcaggctggaagccacccaagagcccaggcgcatactcggcgcctgagttatcccgcgctgaatccagtcttctggtcc

SEQ ID NO: 497412 - DNA, 504 bp, Homo sapiens
gtgtgttctgaggatccagagatagcaggaggttatgatttacagacatgtttggtaaaagcaaaaaacaaaaactaaacaactaacaacaaaaggacagatggtacgtgctgaggtgaaatgaaacaagaggcagtctggttgatgaattcttgctctacttaggaacttgtccaggatacaaaatagacggacacactacacaatcaaacacacagacacacacaacacaaacacacacacacacaaaccaggacaaagaaacacaggataccccacagcacaatagtgggtgtgtgccagggcagatgaagatatccaggccagatgatgtgattgaagccctgtcagatgagcgctatatctgtatgacgtgagttcaaaaggcaaagaggagtgtccgcccataagagacagtatggggataattacaccatcctgcaatatagatggtcaattcacccagccttcctgggcacagatacctacaggtgctgcttatct

SEQ ID NO: 497413 - DNA, 579 bp, Homo sapiens
ggaaacggaatcccggcgattaaactgggcaacttttggcaaaggaatttgcctgttacaaacccgattttttaaaatttaaatggggaaaaatggggggggggggggggggggaaaaaaaaaaaaagggcccggtttttaaggttatttaaaaggggttgggccctttaaatttgggttttaaagccttgaaatttccagggtagcccccattttttgacccccaaggggaaaagttaaacctgtttgattggttcaaaccttgaaaggggaccctaatggggaattttgcccaaaaaaaaatcccggccggtaaaaaaaattgttttcaaaagggggggctcaggggccctgggagggtggtttttaggggggaaaagggggagcccccccttttaaggaccaaaggcccttttttaaaactggggggccctaaaaaaggggcccggttttttccccggaaacctttggttttccttttaaaaggcggttttttggcccggttttttttttaaaggggggcccaaaatttcaagtttggccccttttagtttaaaaaaaagggggaattttttttta

SEQ ID NO: 497414 - DNA, 257 bp, Homo sapiens
gaggaggccgcagtgagctatgattacgccactgcactccagcctggacaacggagtcccctgtctggaaaaaaaacaattgcctgggtgcagtgactcacacctgtaatcccaacattttgggaggccaaggcagcaggctcccttgagcccaggagtttaagaccagcctgggaaacacagggagactccatctttatttattttttaaaaatttaagaggccgggcatggtgtatcacgcctgtaatcccagca

SEQ ID NO: 497415 - DNA, 99 bp, Homo sapiens
gtgcagaacggcaggtggcctctgtaagggcacatggaggtgatggtgtttcttagagagaagatcactggaagaaacttctggctttaatgggcttta

SEQ ID NO: 497416 - DNA, 277 bp, Homo sapiens
cattctctgttttttacctgcttttaacgtagtagtagggatatgatattaacatatatatactatttatagactacatcccaacatgggaaaccccatctctactaaaaatacaaagattggccgggtgtgatagcaggtgcctgtaatcccagctactcaggaggctgcggcaggagaatcgcttgaacctgggaggtggagcttgcagtgagctgagatcataccactttactccagcctgggcaacagagcgagactccatctcaaaaaaaaa

SEQ ID NO: 497417 - DNA, 798 bp, Homo sapiens
  misc_feature (96)..(96): n is a, c, g, or t
  misc_feature (98)..(98): n is a, c, g, or t
  misc_feature (429)..(429): n is a, c, g, or t
ggtaagctcgcgccgccggtcagctcagcgctgggtctctcggtcccgcagcgtgaggaggacggtctgcatactcgctgccgcggtccctccccngngtccctggaccgcggggaagatggcctcaggagtgcaagtagctgatgaagtatgtcgcattttttatgacatgaaagttcgtaaatgctccaaccagaagaaatcaagaaaagaaagaaggctgtcatttttggtctcagtgcagacaaaaagtgcatcatgtgtagaacgaaggcaaagagatctgtggtgggagatgtgtggtgtaaccatagatgatcctttcaagcatttgtgtgggaatgcttcctgaaaaagattggtcgctatgtttgggtaatgatgcaaagcttgtgaaacaaaagaatccagaaaagaagagtggatgtntttgggtgggcacaagaaatagcacctctgaaaagtacaatgatctatgcaagctccaaggatgcaattcacacaagacattttccaggcataaaaccatgaattgtcaaggcaaatgggaccagaagaatctcaatcggggtggtattgtctgaaaaagttaagcgtggatccttaattgtgtagccctttgagaggatgccctggggttagaattaattccagtgcccacaaattggaaagcttccaatggtttaaggtgaatcctcttggtatattaaataaaggcaaatatatttagggcagggctcacagagggggacacgctgggcacctttaaaagaacatatttttaaaatatgtaaaagg

SEQ ID NO: 497418 - DNA, 358 bp, Homo sapiens
ctctctctctctctctctctctctctctctctctctctctctctctctctctctctctctctctctctctctccatcattggagcagaggcttgaatcctattacaactactgcaatctcttcaactacatacttaatggcgaaggacctgctccccttgagcgacccaaccagtggctctgagataatatcgatgagtgcatctaccagagagagacatacagacagtaccgctgtaagactgccaagaagtcagaggaggagagagactatcttagaggcaatcacactggaatgtacatagcgtcctcaatgagcatcataccctgggagacagagagactgaggagtgagcgcg

SEQ ID NO: 497419 - DNA, 503 bp, Homo sapiens
gtcgactctgagtgctgttgtttgttttgttttgttttgttttgatgactttgggtgcccttgtgtttgggacatagatgttaagaattaagacatcaatctggtatatttttcctttgaagagtatgtagaatccttccttttctttttattagttttggtttgaagcctatttttgttggatatgcaaatggcttggaccactttgcttcttatgtccatttgcttgaaatactttttccaaatctttaccatgaggtaaagtctattcttgatgttgatgtgtatttcttatatgcagcagaagaatggattggggatctgagaagagtgatatcaagaaatattagtgactagggattgttaattcttgttattttgttgttgatggttgtggcggtggtagtggtgttgccgctgctgctactgatgctgctggtggtgatgtttgtgtgcgtgtgtgttccccttctttgactttgctggtgtgagattatttaatt

SEQ ID NO: 497420 - DNA, 639 bp, Homo sapiens
tgtggtggctcatgcctgtaatcctagcactttgggaggctgaggtggggggatcacctgaggtcaggggcttgagaccagcctggccaacatgataaaaccctgtctctattaaaaacacaaaaactggccaggcatggtggtgcatacatgtaatctcagctaattgggaagctgaggcagaagaatcgcttgaacccaggaggcagaggttgtagtgagccaagattgtgccactgcactccagccttggagacagagtgagactgtctccaaaacaatcacttaaaaatggttacaggggccgagcatggtggctcacgcctgtaatcccaacactttgggaggccaaggcagttggatcacttgaggtcaggagtttgagaccagcctgaccaacatggagaaaccccgtctctactatcactacaaaattagccgcctgtggtgtcacatgcctgttatcccagctactcaggaggctgaagcaggagaattgcttgaccccggaagacagaagcttgcgcgaccccggatcgggccattaccattcagtctggccacaagagcgctccattcatcaatcatccaccacgtacttcctccattatacccttgcaggtgggcagttaccctgcc

SEQ ID NO: 497421 - DNA, 449 bp, Homo sapiens
aatcataccagaaatgggaatcatttgcgatggcacaaacttaatcgcaccagatagcacgaggacgccgagtgttacccccgtactaacaaaaatggctaataacgaaatggctaatgcatggtcaatccccggcccccgttttttcgcattccaagccgcattgaagataatgaagcctatcatcgccagcgttagcacaaattgttgactcggaaaatatactttagcaagtaacccacgataaatagttgtacaacagcccgcacgacaccaatgacgatgtccctatctaagccaagtttctgccacaaactaattcctaacgcgacggcactaacattgccgccaaaattgtgacgtattattaactgctaattcatgcggtacctccatctgccagcaccatttcgctaactgatctgccgagcaatctctgtcggtcatgg

SEQ ID NO: 497422 - DNA, 857 bp, Homo sapiens
taaaccgggggggcggtctcctctaaaggggaccccccccctcgtggtggggcccagagggggggggggaagaaggggggggggggaagaaaggaggagcaccgggggcggggggaggcagcaaaataagtatgtgtgctcgcttgggagagaaaaaacaaccagcaggagtggtacacgactcctgaagaggttcttcttttttcctcgagaagaagggggatgacaaaaaaaaaagcaatactggtgcaccttcacaacctcctaggtgagagttgccacacgaagggggaggggcccacagaggggtgagtaactcctaactatataaggagtgaacataaatgaaaaataaaagaaagaaacaccagtgagaggtaccagaagagaacagccaaagagaggggggaagagagagggaacgacaaatatatgacagaagaaagataagagggaacaccacaagaaagttggggggtccacacaccagagaaaagaaggaatgaaaaagaaaaaaaaaagcccccgcgagagaccaaccacaagggggggggaacaaaaaagagaacttcatggttgtggaagaaaaaaaatatccgcaaaaaaataaagaggaacacagagagaaacaaaaaaacacatggcaagcaaaaaaaaaaactaacacaaagagaggggggaagaaaaaaacaaaacacggggaacaataaaagacattagagttacaaaaaccaagaagaaagaaaaacccccccaaaaatgaagaaaaacaagaaaccccaagagaggccaaggatataaaaaggcgccgccaaaagagtgtggcaaaaaaagataaaaagaggacaacagaaaat

SEQ ID NO: 497423 - DNA, 491 bp, Homo sapiens
agagttgtgcatctcagagaagtattgtcctctgagctctggggactaagattggtctttctgtagttgaaggtcagtgcagagaacttgccccaggctagtctcttggtctgcctaaatctgaccttctgacccacctaagcacgagcacttgggagacaagcctcgagactggttccctcttccgctgcagggaagaacctctctatccagggcctccgctggtggctacagtggctgggcattcaacttcaacctcttcctggggctatttttcctgaccacaccctccatcatcctgtccaccatggacaagtttaatgtcaccaaacccatccatgcgctgaataacccgatcatcagccagttcttccccaccctcctgctctggtccttctcggccctgctcccctccattgtctactactctacactgctggagtctcactggaccaagtcgggggaaaaccagatcatgatgaccaaagtct

SEQ ID NO: 497424 - DNA, 139 bp, Homo sapiens
cgcagcccgacggtaagccgggagggcctgcctacgctcaacaccaccatcctgtacccaaatgtacgggctggaatgtctggttccttacccggtggctcagtcatcagccgcctgttaattaatgctgaaccctgca

SEQ ID NO: 497425 - DNA, 191 bp, Homo sapiens
ttcccttttagactatggcgacatacctggagttcatccagcagaatgaagaacgggatggtgtgcgttttagttggaacgtttggccttccagccaactggaggctaaaagaatgggttttacccctggccttgtcttcctaatcctttaaaaagacggttccaaacctccctccttacaataatgaacc

SEQ ID NO: 497426 - DNA, 874 bp, Homo sapiens
  misc_feature (874)..(874): n is a, c, g, or t
aaaaataaatattacaaatacgggaccaaaaaaaaaaaacttaagcggaaagacactctcttaaccaccgcatcagaaatggagagtttgtacagagctctggataaaatggtgttgtggtgttttctctggggtcaatggtcactaacatgacagaagaaaggggcaacgtaattgcaacagcccttgccaagatcccacaaaaggttctttggagattagatgggaataaaccatatgccttaggtgtcaatactcttctgtacaagaggataccccagaatgaccttataggacatccaaaaaccagagcttccataactaatcgcggacccaaaggcttgttttgaagcagctcacccattgctatccccatggttacgattcaatcgatgatcacataacccgctctatatcactacctagcagggcaatgcaaattctgttaaataggactttaacacacatccaaatacagacctagtggactgccctaacgacgcttctttaacgttgctcaatcacagcagatgcttctcaagtgacgtagcaccccgctctctttctcaccgaccatccacctaagcccccacaaattattttacttagtctatcgccatacccaccacaatatattacacctgattcctcacccacagtagagtctctcaacacaaggggccccgtccccgctgcctagtgccgctaactgtcatgctcgtgcagtcacatttaccaactccgttcctaacaatagccacaaactacttgagcccaccatgtgactagtagacctatccatcgacacaacaaaacagcacacgccgcaagcactcctctcacatcaatatacccacctgcatccatcacgaan

SEQ ID NO: 497427 - DNA, 1069 bp, Homo sapiens
gccaattttctatcgaacgccagtacacctgttatccatgatgatctccggcaacgggctttagaggacctcattagctagcctctactacagatggagactccaggtacgccatgcgtcctcagctgcgcacaccgccatgttaccggacttctgggcgacaagactgagaagccgtgagccccatagatgttacctgcgcggcggtagtaatcactagccgcgtcgacggatccacaggcagtatgacgcggttaataagtgcgtacttctagagctataatgagactgcgcgccaattggctacgtatcatgcatgcaagtgagctagctggcaagcagaagctacgtacgcgaccagagcaccaagtcccagtgtgtgcagtgattgcgctaagattgttccaattatagtgcgccccaggcacaggtaacgctgggatgttggcccaccctatggcccatcatgcacgcacaacataacaccgccaacataaagattgcgatggagatagctcaggcgaattctgctgtgtgctgcatgctatacttgaaaggagcagagccaacttgtctggatggagcgaacgagtgacattggctgagcatcacagttgtctgcaccctattgtggtctctataaggcaggttctagagccttctttccgacagcgcctttcccaataccaagcgtgattcctcacctgccattaaacagccccagttccgtgctgtactagcgcgaagtgaccctgttttaaatcattggaccccagtttgatgcttaaacgttttgcagagacccaactaaaaaggacacaccaacggaaaaacaaaacgggttcaagggaagagaagccgaaccccagctgagccggaaggggagcacaaggcggtgcccctgtccttaggagcaatgttatttagacggcgctgcttctgaccaggcagaccttgctcaactgccaaaatctgtgttggtattaggcagattccattgcacccttttgatccattttggccttaagaacggcctgtcatcatattccgaaacacaacactaggctct

SEQ ID NO: 497428 - DNA, 162 bp, Homo sapiens
ggatttgctggtgcagtacaactaggcttaatagggacatgtatcccagaacttaaagtatattaaaaaaagagacagacagaagaaatagataatgaggtactgcttttttgtgtaaagggttaattaccctgaaaaatcccacccattatttactctgaa

SEQ ID NO: 497429 - DNA, 166 bp, Homo sapiens
atttctcgatttgtttttcaaccaaatgcgagtatgggtttaaacattcgatcatacttgtacggtgtggaatatatcgaaaatggatatcgctttacaatttacattgttaggatagcgcaactctaatactgtattaaatggcaagtcaacatatccagttcag

SEQ ID NO: 497430 - DNA, 711 bp, Homo sapiens
  misc_feature (10)..(10): n is a, c, g, or t
  misc_feature (63)..(63): n is a, c, g, or t
  misc_feature (66)..(66): n is a, c, g, or t
  misc_feature (97)..(97): n is a, c, g, or t
  misc_feature (101)..(101): n is a, c, g, or t
  misc_feature (125)..(125): n is a, c, g, or t
  misc_feature (150)..(150): n is a, c, g, or t
  misc_feature (156)..(156): n is a, c, g, or t
  misc_feature (181)..(182): n is a, c, g, or t
  misc_feature (188)..(188): n is a, c, g, or t
  misc_feature (197)..(197): n is a, c, g, or t
  misc_feature (201)..(201): n is a, c, g, or t
  misc_feature (250)..(250): n is a, c, g, or t
  misc_feature (268)..(268): n is a, c, g, or t
  misc_feature (275)..(275): n is a, c, g, or t
  misc_feature (290)..(290): n is a, c, g, or t
  misc_feature (293)..(293): n is a, c, g, or t
  misc_feature (310)..(310): n is a, c, g, or t
  misc_feature (313)..(313): n is a, c, g, or t
  misc_feature (323)..(323): n is a, c, g, or t
  misc_feature (340)..(340): n is a, c, g, or t
  misc_feature (359)..(359): n is a, c, g, or t
  misc_feature (369)..(369): n is a, c, g, or t
  misc_feature (373)..(373): n is a, c, g, or t
  misc_feature (384)..(384): n is a, c, g, or t
  misc_feature (394)..(394): n is a, c, g, or t
  misc_feature (405)..(405): n is a, c, g, or t
  misc_feature (449)..(449): n is a, c, g, or t
  misc_feature (468)..(468): n is a, c, g, or t
  misc_feature (509)..(509): n is a, c, g, or t
  misc_feature (572)..(572): n is a, c, g, or t
  misc_feature (634)..(634): n is a, c, g, or t
  misc_feature (639)..(639): n is a, c, g, or t
  misc_feature (698)..(698): n is a, c, g, or t
ttttcccaanaaaacaaagcaataagttaacattctcaatataaaactaaactttgacatagngancacaaaacacagttgatttcaattgatcccntttnccaaatttcacaagaaaaatgtcnagattctcatttcacaaagcatggngttttncagccacacacaacagaacgcaaannggctangcttgtgcnacangtttacagaacaacaataataacaataataataataacaataatatgtncagtcattagatcctgcnctggggnttgtgcgttcggggnggnggctggcattattctgnggncgggcctctngggattgttgtaaagcngattttgtcttattttaangcccactggnattngggtgcttgtnctcgcctgtnttctctctccnccccatttgccctcgctccctctttctacccagggggggaatcngcattttccttcttgtccnggcgaagaaccagggttcctccggaatgggaaaatcatgtnggcttcatttatcgttcttttcttttaaaaattatttattaaataatgtcgggcatgtaaaanatgcaaatcattcggctccaaactctccataccagggaggtacaaaagtcactgtataaatnacaantcaccacgtcctccttattcgtttctccccgtgcgcttaaagtaaacagtgcgtttgancagtgcgttcctt

SEQ ID NO: 497431 - DNA, 1072 bp, Homo sapiens
agacgatccgctagccacattaggcgctcgtgtctctgcgtccgccccgtcccgtgctctcagagacttgcagctccccaggcccgaggcccctgtcggcccatcctcgagcccagtgtaggctcagcagaacgctctaactccagcctgctagtcagacccactcccaggtccctgctcgtccccgaagcaaccctgctgtggctggccgcagcttggcccattccttttggctaacgctgcgaggcctgcagggttgtccggcgtggaagtcctcctcgggttgccctccgcggcgcctgtccatgacggcgagagggcgggagctgcctcgcgatgggtgactgtgccgagcgcctatggcaagcccccaacgtgcagtcgcgtccctacgttcgacggtgccctgcacggtgatggggcggcctgggttgaatccattcgtggggggcataacccgcggcggatcccggcatgcgtcctttaaggcaattggggttccaaggggccgacaacgcaaattccaaatccggtccttaagaaggcgcaaaaagctcggcagggggcgaggcggcggtttccattggccccggaaatactcagttcccctcatcccaaatttggcgccatgggaaaccccgggctttatctcccatagcgccggctcctatggcctctgggggcacagaaagggctctggggtggtacgccccaagggtccgttatggcacgcaggagcccttcccacgaggggcgcttatctggggcaacgtccccttgtgttcggcacacgccaagggccacagatgaccgaggccccgataaacttttggcccgatgggcatggggaaaacgccctgaaccgcaatgggcggaactgccaaatgaggttcccctgtgtaccctgagaggaaacaacttgatagatacccaaacccaagtggggtactttcccttggcaggatggttcacgctcccctaggaggtagccccattgtaccgtgggtccgcaccgaaattgcacgagactttgcaactccgtgtgaaacacccgccgactggcacataggaa

SEQ ID NO: 497432 - DNA, 942 bp, Homo sapiens
  misc_feature (153)..(153): n is a, c, g, or t
  misc_feature (314)..(314): n is a, c, g, or t
  misc_feature (326)..(326): n is a, c, g, or t
  misc_feature (328)..(328): n is a, c, g, or t
  misc_feature (333)..(333): n is a, c, g, or t
  misc_feature (337)..(337): n is a, c, g, or t
  misc_feature (364)..(364): n is a, c, g, or t
  misc_feature (373)..(373): n is a, c, g, or t
  misc_feature (384)..(384): n is a, c, g, or t
  misc_feature (480)..(480): n is a, c, g, or t
ccgaggactcgcgcggaggcgagatgctaccagtcgcgtgactgagatcggctgcctctcctgcagccccgtgctgctctgaaagtggtgactgaaaggaagaacctcgaaggagaagacatgtgacataaatgttaacagttcttattggangtaaacaagtcagtgaaggtacagataatggtgatctcccttcttatgtgtctgcattcatagaaaaggaagttggaatgaccttaatctttaagagacttgataactcatagaacagaggacagtaagtaaaatgcagttagaagaacaggtacttacantttcatcagagntnctaanaganttcgaagtgccttaaaaatgcagagantcaagcatntcttatcagtntctggagcaggaactcatctcttcagcgccattacagccattgctgactgcgcaaccttggatggacgacttggaccatgattagccagattgagngatcgacgtcacttgcttacctaaatggattcacaaattgatgaactaagttgataacattcagcaatatctgatgaccaataatgtaccggaggcaggctccactctagtgtctatggcagaaacttgacattaaatttcaggaatcatcttgtactcatcttcttggttccatgacgagcacagttaaattcctgggcttagaattcttccagggccaagcttaccaagtgagttccgagggaaatttgagacacagtacttgagccactcgataagagccccgactaaatcaccagactgttgggctaagctcgaactgcacatagtcccgagagaattacagtaacctgggcgacacggtagccgtccactcacacaacagaagctacaagaagatagcagaggagaaagacacgctcagaaaagatatactagggccccaataagtaagtcaccggg

SEQ ID NO: 497433 - DNA, 256 bp, Homo sapiens
  misc_feature (32)..(32): n is a, c, g, or t
  misc_feature (194)..(194): n is a, c, g, or t
  misc_feature (209)..(209): n is a, c, g, or t
  misc_feature (212)..(212): n is a, c, g, or t
  misc_feature (225)..(225): n is a, c, g, or t
  misc_feature (236)..(236): n is a, c, g, or t
  misc_feature (252)..(252): n is a, c, g, or t
ttggctcctgctggcagcccgggacccccagncccacgtggtatcaaatattgaaatgcatccgtgtaacatataaatctgttgttaaaggattgttgtgattttgcgcatgaaatatgtgggcaactcggccggacgccgaatgtcacgcctgtaatcccaggactttgggagggagagatggaagggtcagntgaggccaggagttnaanaccagcctgggcnacataggaagnccatttctttagaaanactt

SEQ ID NO: 497434 - DNA, 256 bp, Homo sapiens
caaagggatccgttttcacaaggatccagaagtccaggagctacctttaagaattatccctgaacgaaatgcattcaacaaactcttctcaggtgcatcccctgggtcctcttgagggctagcaagcactgcgtgagttgcttatcttctaactaggtaactccgatagcgccatgcttgcgcaaacatcaggcaccaaggttgtgaactcagctagacagtatggtctacgaactatatgctgtatggatatatc

SEQ ID NO: 497435 - DNA, 210 bp, Homo sapiens
tcagacacaccaggagttctgcccccacagaatctttattgagtaagttatgctgatggaggagagtaaacagcgacagaacccaaacaaatacatcccttatggacgcaccatggcatagcgaaggagaggtgagacttgctggaatgacactatacttacgacccaactacagctagctatacagaacggatttcatccttacacata

SEQ ID NO: 497436 - DNA, 1095 bp, Homo sapiens
  misc_feature (82)..(82): n is a, c, g, or t
  misc_feature (836)..(836): n is a, c, g, or t
gctggagctcttggccataaagcctgaggcggacggcagcgagcgcgagattggacgtgtttggcagaagctacgagtgagnagattccgctggcaaccagatacttgtgaccttctcggcttctgtcctccgtttagtctcctccttcggtcaggcgagccactcgacgcacgtcagtcccgtgtcctcggatgccccacatgtcgcatgacgagcctgcgtttgaaggatgacctctaggaagaaagtgttgctgaccaggttatcatcctgggagattctggagtcgggaagacatctctcttgaaccagtatgtgaatattgatattctgcaatcagtacaaagccacaataggagctgactttctgaccacaggaggtgatggtggatgacaggctagtcacaatgcagatctgggacactgcaggacaggaacggttccagtctctcggtgtggccttctacagaggtgcagactgctgcgttctggtatttgatgtgacttgccccaacacattcaagaaccctagatagctggagagatgagttgtctcatccaggccagtccccgagatcctgaatacttcccatttgtcgtgtcgggaaacaacgattgagctcgaatcaccaggaccaagtgtgcacaaagcgggccacaggcctggtgctacagcaaaatactacattccccttactttgaggacccagtgccaaggaggccatcaacgtggagcaggcgttccagacgattgcacggaatgcacttaagcaggaaacggaggtggagctgtacaacgaatttcctggaactgttaactggaccacgagtgacncgggccaggtcctcgccgacaagcttgcaaatgctgaggggcaggacacagtttggcacacaagtcccttccgaaacccaggaacaccggttagcgctccaagatattcccctcttcatttgccaacaaccatccttgctcttcagttcggtgtccaggatacccccgttaaaagagttacccccatatctctgacagtcacaccgtcaacacacccacgattgaattacaaccgctgccatagccttaggtttcaccc

SEQ ID NO: 497437 - DNA, 320 bp, Homo sapiens
  misc_feature (1)..(1): n is a, c, g, or t
  misc_feature (103)..(103): n is a, c, g, or t
  misc_feature (109)..(109): n is a, c, g, or t
  misc_feature (220)..(220): n is a, c, g, or t
  misc_feature (223)..(223): n is a, c, g, or t
  misc_feature (244)..(244): n is a, c, g, or t
  misc_feature (256)..(256): n is a, c, g, or t
  misc_feature (259)..(259): n is a, c, g, or t
  misc_feature (262)..(262): n is a, c, g, or t
  misc_feature (277)..(277): n is a, c, g, or t
  misc_feature (279)..(279): n is a, c, g, or t
  misc_feature (281)..(281): n is a, c, g, or t
  misc_feature (283)..(283): n is a, c, g, or t
  misc_feature (285)..(285): n is a, c, g, or t
  misc_feature (288)..(288): n is a, c, g, or t
  misc_feature (305)..(305): n is a, c, g, or t
  misc_feature (307)..(307): n is a, c, g, or t
  misc_feature (312)..(312): n is a, c, g, or t
  misc_feature (320)..(320): n is a, c, g, or t
ngaaacagggagtttaaaagtggaagtatacattgaaaaagtacatttatatcacaaagcatcaaccacataattggaaatatcgatttgctggaatgtgtanatctanacgtagaatactaaaaacaaaccaattttcatttctacacagaaatattaacctccgtatcagtagtgatagatattttgtacattttcaaaaaaaaaaaaaaaaaaaggnaanaataatttataaaccaaaaanaaaattaagatnttnatnaagtcgtctgcatcnananantnaanaaaggatatttatttcncnaaaanaatgaagn

SEQ ID NO: 497438 - DNA, 453 bp, Homo sapiens
  misc_feature (72)..(72): n is a, c, g, or t
  misc_feature (96)..(96): n is a, c, g, or t
  misc_feature (116)..(116): n is a, c, g, or t
  misc_feature (258)..(258): n is a, c, g, or t
  misc_feature (306)..(306): n is a, c, g, or t
caagaaaaaagcaagcaaaagccagcacaaagatccgggggaaggcagaaaaagaaaacaaaaaatcagcangggcaatgacaaaactggaagagnaagagaaagtaaaattgtcnttacccaggaccagcaaatttgggagtaaagccagaattgaataggaaaaacaggactatttctgaagttgaaagccgatctttaagaagaccctgtctttaaaatgaaactagcaggcaaacacctaaataatcgaaaatnaccaaagaacaacaacgaaacaagaaaacctaaagatttttacttccnattcttattccttaacaatattactgtgacaccccttgcaatgctcagttgcctgtgtgtcaaaaaaacttgtggacgttggaaattatttgaaaatgtattgtgtggaatgtaataaaatgatgatatttttacacaaaaaagaga

SEQ ID NO: 497439 - DNA, 286 bp, Homo sapiens
  misc_feature (100)..(100): n is a, c, g, or t
gtgattccaggatttatagcgcgatagcccccgagtcccctgtttgggaaccagcagccaaaactgggtcctgagccggacgcggtggctcacgcctgtnatcccaacccagcactctgggaggccggggcggacagatcacttgagaccaagaatttgagaccagcctggccaacatggtgaaaccccgtctctactaaaaatacaaaaattaacggggtgtggtggcacatgcctgtaatcccagctacctgggagactgagctgagagaatcactttaaccca

SEQ ID NO: 497440 - DNA, 581 bp, Homo sapiens
  misc_feature (63)..(63): n is a, c, g, or t
  misc_feature (168)..(168): n is a, c, g, or t
  misc_feature (189)..(189): n is a, c, g, or t
  misc_feature (283)..(283): n is a, c, g, or t
  misc_feature (317)..(317): n is a, c, g, or t
cagaccacttcattctacagtcgatcggataaagacgcagtggagctgcaggtcttcaaagangcgaactgcgacaggaaaggaagacacagaagaggccacgggcagtgatgatgaagaaccaccatcaaaaaaggcacgcgcacaaccagatgtgaagccgaaacngaagaagggcatagctgtcangaagatggctgctaagactgccgtcaaaatggaacctgtcgaaattgacgaggaggaggaggatgacccacggccagcgaaaaagtcaaaggtngcgcccaaaaaggcgagcccgaagccaacaccanctgctcaagagactgagcccagtgatgtagaagatgaagagcccagcaaacgcaagactggccccaagagagcgaagacggcggcacagtcgaccaagactgctgaaataacgccagacgcggaagtcgaaggagagaaagcaagcgataatgattctgtctcagaaagccgagtcagaagaggaggaagagaagcccgaagtggcagccaaggcccgggcgaaggtgcaagcacactgaaagcgactggaaaggaagcatatc

SEQ ID NO: 497441 - DNA, 404 bp, Homo sapiens
  misc_feature (32)..(32): n is a, c, g, or t
  misc_feature (145)..(145): n is a, c, g, or t
  misc_feature (333)..(333): n is a, c, g, or t
  misc_feature (358)..(358): n is a, c, g, or t
  misc_feature (391)..(391): n is a, c, g, or t
  misc_feature (399)..(399): n is a, c, g, or t
  misc_feature (404)..(404): n is a, c, g, or t
cttctgggaaggtggctactcccctctttccnaccccccttttctgggatcttgacaagggattcctacccctgcccccagctgtcaaaagcctgcagcagctgcccaaaaaacctcaacacaggcatactttggaccctacatnatgtgttgatgtcacagatgctgtacccaggcatttgactccttgatctaaagcccaggattcctagccaacatggcgaaaccctgtctctactaaaaataacaaaaattagctgggcatggtgataggcacctgtaatcccagctacttgggaggctgaggcaggagaattacttgaacccaggaancgaaggctgcagtgagcagagattngcctctgcactacatcctgggctatggagtaanctctgcancacan

SEQ ID NO: 497442 - DNA, 886 bp, Homo sapiens
  misc_feature (886)..(886): n is a, c, g, or t
tggtggtggtggaaacggggccccacggggtcccccacacgggagtgcaggggtgcaattacggctcactgtaacctcaaactccgggactcaagccatcctcccacctcagcctttggagcagtctgaggctggcgttgaaccaccacaccagtctaatttgggtatttttggtagagatagagttccactatgtggcccaggtgggcctcgaactctggggctcaagcaattcttgggcctcctgaagttcgggcataacggggcattgacccaatgtgttgccccagcccaaaagagggctttaaaattaagggtaaaccccccccattgggttcaccaacacttagttaaaagaaaacacaaaaaagacaaagcaaaaaaaaattgtgtgtgggggggcacatgaggcgccctagggaaaaagagtttagcaacaccaatcggtgggggggcgcggggcccataaggtataagaacacagcgccaacaaggggttccaacaggggaaacaccgctgggaaaaaaagggggggggggttctcaccaccaaaaaaacaagcgggcgggggacggcggcttttgaacacacccagaggggtctgtgaggcaggcatggagccattctacaggccgaacagcggaaagaaaaccctgcccgcggggggtgggaacacacgcagacggaagcagagccgaacgaagcaggaaaaagacagaacgagtaaggacacaaacacgcaccagaacgagagagaacaagcaaaacaacacacacgacaacaagcaaaacaacaagaccgaaaggtgaacgcaacacagaaacaccgacagcggaacacaagcgaagacacagaacgaagacacgacagagacacatgtatgn

SEQ ID NO: 497443 - DNA, 200 bp, Homo sapiens
cggaccgcgctagcggcattagtgaacgaggcagggaaagactggaagattttataacgtcttaattaatcattaaaataagatttcacttgttgcccctttggggaaaggtaatgcgttctccctctctcccttcctttcttccctctctttttcttttctctttccctctccctccgttcacttaatgccgctagcgc

SEQ ID NO: 497444 - DNA, 587 bp, Homo sapiens
  misc_feature (179)..(179): n is a, c, g, or t
  misc_feature (250)..(250): n is a, c, g, or t
  misc_feature (252)..(252): n is a, c, g, or t
  misc_feature (257)..(257): n is a, c, g, or t
  misc_feature (302)..(302): n is a, c, g, or t
  misc_feature (358)..(358): n is a, c, g, or t
  misc_feature (366)..(366): n is a, c, g, or t
  misc_feature (377)..(377): n is a, c, g, or t
  misc_feature (388)..(388): n is a, c, g, or t
  misc_feature (400)..(400): n is a, c, g, or t
  misc_feature (451)..(451): n is a, c, g, or t
  misc_feature (475)..(475): n is a, c, g, or t
  misc_feature (571)..(571): n is a, c, g, or t
tgcttcctccatcctggtattttttggagcttccagtcctggttcttccaaagtgcccggacccaaaacaggaaagtgttgcggagataggaacatgggagagaaacaatctgggtaacatgaaagtgatgctggttgctaagggaaggcaacttgattctgtgggaagggctgtagcngatccatccgttgtctagatttgagtatgagcacaggggaagaggattctgacacagtaacaggagaaacngngaacnctgtgactttgactcaggacacagaagggaatctcattcttcacngcccgcagaatgaagcggaggaaatagacgcagaagagagtattgaaccgccacanaaaaggcnttggttgtccnctgaggaggancagagtattgangagtcgactccttgcatatcagttgttgcacttccacgttcagaaaatgancagagcgttgaagtgaccatgacngcaaccacagaaggagcagaggaggagggtacggaggggacggtgacacagatacagagtttgcagaatgagcaacgagatgaaatagcgcccttnggtaacgaggaagttt

SEQ ID NO: 497445 - DNA, 755 bp, Homo sapiens
agcggggcgtccagcggctctgcttgttcgtgtgtgtgtcgttgcaggccttattcatgggctcaccgtctgaggttcgacgggcgggctggtacgtggatcaccggcgcgggggcaggattggggcgcgagcgtatgccctggtgttgagcagaaagaggagactgttagtgtagatcttgtggaagccctgaagccagagtatgtggtatctcttgtccttgggctgttgtcacgagagtagtgaggagaatggtggctgtgtgtgaggttggacgcaggatggattggacacagattagcgctgaggagcggactcttgcgagctattgtaacgacacaagaatcagcccaatgactcctgaggcagtcaaggctaacctggaagacgatctgtgactgtgagaatgccagcaagcctcagagtatccaagaatcgacgtggccgtataatgagaagttctgagtcgaatagattcatgaaggaggagtgacagcaaagtcatagctagtacgtgcaagcgtctagaggaacatcaggatttgctggagctattggccatgaaactccctccattttgcttgagtgcttataacggaacctggaagctatcatgtatgccgttggagtgggagcgtcaatcaaggatccaccagatcttgaaatctactaagtgaaggaagttctgattctcctgtcctgccaccttcggagtcatcataggtcagagcctctatgacgggtgggaggatca

SEQ ID NO: 497446 - DNA, 236 bp, Homo sapiens
atggtagtggtggtggtggcagtagtaacagtggtaggcgggtggtggtggtattattattaataatattatggtggcagtggtggcagcagccgcagtggtggtgtgccacacaggtgtgcagagggccctgggtagccactctcaatggtggagatcgtgcacactcccttgtactggcccacactcaccatgtgcgcctctcctgtgtgctcccgtcgtgtgctgtcacacca

SEQ ID NO: 497447 - DNA, 345 bp, Homo sapiens
agaaacaaaaaggacaccataaaaaagaacaagaaataaaaaaaaaaaaaaaacaaaaaagtgttggaagcagtgtatgggatagatagttagatgaagtaattgaatgagagaagaggattagaaaagaaagaagaggaattaggtatatgggggatgatctaagtcaggccgaacagtattggcccatgtcaagtcatgggattgctcgcgatccgcacggtcggctccgtatcacctccgatgactcacgcggtcccatatcaacaatatccaatgcatctatacgaattataagtaccggcgccacaaaaaaacaaaccgaaaccactcataatcaaaacg

SEQ ID NO: 497448 - DNA, 205 bp, Homo sapiens
gcttctctttcttcccgggataccggctattcttctgcctcagggtaaccccgtctctgtgtatttaccggcgcccgcctctatgcccggtctgttatcttgtctttttagtatagacggggtatcaccacgttagccaggatggtactcgatactcctgacctacgttagagccaccgtagcccgagctggatataggaataaa

SEQ ID NO: 497449 - DNA, 185 bp, Homo sapiens
tcttctctctgagcatgcagaggagagtactcagcattgggatagatttatgtggtccagattttaaagcaattctgacttcaaatatatcccaaagagtacattttaaatgtaaatttaccacatttgatcaacaagtgttaaatgtgtaaatggcatacccgtgttgtattcagaataacgtc

SEQ ID NO: 497450 - DNA, 219 bp, Homo sapiens
  misc_feature (26)..(26): n is a, c, g, or t
ggaagattctaggtcagaacaaaaangcggtggatggtggaaaccgaccgcagccaccgcagccacgtatacccgcagactaggcgagaaccacgagtgtatgagcagtaacagaacgcggatccttcgcagaaagcgtattgaccagcgctcgcaaatttgcctcttgaccttgaaacgtccgcgccatccgctgcacgtgtacgaccagccagtcca

SEQ ID NO: 497451 - DNA, 372 bp, Homo sapiens
acagcatataattaataaacggctggatgaagactacaaaaggaagcaagaagcctaaagacaatgtacctggagcgaaacacaatacaaaaaggcccccagtaacggcagaaggtcatgctagccctcccctccgtgcggcaaatcaaagccacgatcgacaggttataagaccttcatggctcatcatgtggtccctatactcggaaaaaatgcccagccacgggtttttaacccacctgttgctcctgaggtagtcaatatatcaacagtcacaaacccaatggcaataaaagcactgaagatagctggcgcgagagacaccacacaccattttcagaaaacgttacaattaaatcttaccccgctgcc

SEQ ID NO: 497452 - DNA, 996 bp, Homo sapiens
acgcgtggattgagtattgttgcttaataggagatacaaagtctaccgagagagaattagcgtccaggaggcagcactataaactgccagtgcacctgatcagcgagctgggtgcctacacggcgagctctgtggtccctggcagtggtagaccctgtcacagtagcaaagccaggagccagccgtgtgccatcagttacaacccttgtaaatgcgcatgactgaagggacatggtatatccctttggtcaaggaagcaaccacattgataaaccattgtcaacgttgaccaaatgccaacaaaatatgtcgcataaggtcaaggtcccttgtcatcggggtgggaccgtactgatgacaaaagctccaattacgtgccaagcacatacactgatgtcctcaggagggactctgaggtgactcaggagcctccgtgcaactcgtttccaccatccggaatgggagctcccacgctgaggaggttgagtcccttaggggaccccatgccctgtgttataacccgacacaaatggatatgctagcccacgacgtactcagtggattgctgccataaatttaacacgcttcgcagtcgatagaactataaatttaaaatggggagttaacacaaccagaagctcccataaacctaaatatataaaaaactcctaggagttagttagctcttgggccgagatatgatcaattatcttatatagcgctggatccccctcattcagagcgcaggatggttattagggcaaacacttcattgcccgatagtggaagtagcctctttactatcatggtcctgtagtcgagaccattgcttgacctgttgggatggtcacgccccccatgagtggatcgtgcctggcttggaccaccagctgaccccgggtttgtcccgtgtaaatggtgaccgcatccaatggtgggggtcagtggatccttgcttactggcccctcctgtgaaggaactcacaagacccttgg

SEQ ID NO: 497453 - DNA, 413 bp, Homo sapiens
gataaaggagatgatgaatgagcacatgcaggacaaatcagaaaagcaatgtcatagaatgtattaattacgtccataagttatacttactatataccatgatacggctatacactctagaaaaactttgtccccaaaggaacttaaaatctgtaaagtgcctttaaggcttgaacagtattctttttccattacttttccaagtacccagggtcttctagatgcacccgaagctggtaagagatccaggacaggtagagactctgaatgtagaaaataataaagtaggactaacagtaaataacacataattgtcatggcgtacgtctaggatgatgagtaccaaatatcccaactgaaaatctctaatagctatcttatcagaaagccttaaagatactgaagacatgctc

SEQ ID NO: 497454 - DNA, 534 bp, Homo sapiens
  misc_feature (34)..(34): n is a, c, g, or t
  misc_feature (483)..(483): n is a, c, g, or t
  misc_feature (534)..(534): n is a, c, g, or t
aattcgcggccgcgtcgaccgacagaaggggctnggagaagagccatgaagacagtttttggtgttgagccagacttgaccagggaaggcggcagtattcccgtgaccttgacctttcaggaggccacgggcaagaacgtcatgctgctgcctgtggggtctgcggatgacggagcccactcccagaatgagctcaacaggtataactacatagagggaaccaagatgctggccgcgtacctgtatgaggtctcccagctgaaggactaggccaagccctctgtgtgccatctccaatgagaaggaatcctgccctcaacttcaacctttccaattgcccaggaatggagttccctctttccttccctctgtcagtcatccagacttagagaacagacacagtgtatccagtgttccacggtggagtaaccgttgggcttaagatgacctggatgacagtgagtcaacctgggtaagtctcanatggtcaggatggcttacctgcagaagataccaaggtcccacagttgcggn

SEQ ID NO: 497455 - DNA, 104 bp, Homo sapiens
  misc_feature (54)..(54): n is a, c, g, or t
  misc_feature (58)..(58): n is a, c, g, or t
ggttactcagggccttggtacctggatactgccacagaattgagttttgtggtngagnggcctatgggaaaataaaataactgttcaaagttgggggtttttta

SEQ ID NO: 497456 - DNA, 324 bp, Homo sapiens
  misc_feature (196)..(196): n is a, c, g, or t
  misc_feature (207)..(207): n is a, c, g, or t
  misc_feature (215)..(215): n is a, c, g, or t
  misc_feature (242)..(242): n is a, c, g, or t
  misc_feature (269)..(269): n is a, c, g, or t
ttcttcagcctcattggcattacctgagagctccacagtctcagagtacatggtgtatggggacttggcttccagagggtcgcgtccagggcttggccacattcagtgaaggagagggcggcatcagcataattcacagcttggccaaatttctcgaacagggcatcagcttggcgcttcagcttcttagcttctngcatgtaatantcagcatngtgaaccgagtcatcaaaagtgagctngggtctccggacattagtgctgctgcnggatagaaggggcagagccgcccaggaggccatctccaggtgacggctaggggta

SEQ ID NO: 497457 - DNA, 298 bp, Homo sapiens
  misc_feature (273)..(273): n is a, c, g, or t
  misc_feature (296)..(296): n is a, c, g, or t
ttgtggggtattactcaagacatctttgttcagtttaatttcctggagagtttcaccaatgttttttttagtagtttcatagtttgatgtcttagatttgtctctaatccgttttgatttaattttttttagatggcaagagatagaggtctagttttattcctctgaatatggatattcagtttttgtaacacaatttgttgaagagactcccccattatattgaggcaggaaaatagagtctgggaggcaggaaaacataagaccacttcnacacttcacctttccatagggcntg

SEQ ID NO: 497458 - DNA, 261 bp, Homo sapiens
tgtgttgagggatacatctgcgcttgcgtggggccgaatcttctctttagtgtcatcctctggcaccaggcctttggcctatagatagaataggtctcaatctagctcctggagtggtgatgttggactagggcagcctagctgtgtcctgggccatactgactgagtaggccatacccaggacaacttttcctctggcatctggatctcctcctacaccgatcttcttaccaatgggtgtttcctctacaccgaagatgt

SEQ ID NO: 497459 - DNA, 244 bp, Homo sapiens
ttgacatgggcacagaaattattctgtatacaccataatagtgaatacatgtcattatacatttgtccaaacccacagcatgtacacacgcagagagaaccctagtgtaaactatggactttaggtcatgatgtgtcaatatcggctcatcaactgtaacaaacataccactcttgtggggaatgctgatgataagggaggctgtccctatatggagaacatacatgggaaataactgtgccca

SEQ ID NO: 497460 - DNA, 395 bp, Homo sapiens
aagaggaagcaggtgttgtggctcatgcctataatccgcactttgggaggcaagacaggtggatcacctgaggtcaggagttcaagaccagcctgaccaacatgtgtgagaccccgtctctactaaaaatagaaaattagctgggtgtggtggcacatgcctgtaatcccagctacttgggaggctgaggtaggagaatcgtttgaacccaggatgcagaggttgcagtgagctgagatcgtgccactgcactccagcctgggtgacagagtgagatcccatctcaaaaaaaaaagggaactgtcattgatactgcttttggtccctagtgtaaggtcagtgtctctcaaccttggcgctactgacatctttgactagcatttgtcgggggggtc

SEQ ID NO: 497461 - DNA, 462 bp, Homo sapiens
  misc_feature (333)..(333): n is a, c, g, or t
  misc_feature (379)..(379): n is a, c, g, or t
  misc_feature (460)..(460): n is a, c, g, or t
atctttacttcactcagtgaccactcagaacaataacagctgccactcgcttcctgagcttaataacaatggctcaaccgttcacctcccggatgcttgtgacggaacagcttttagaaagttgttttgttttccctctccaaaagccatgttgcccggagatacgtgacagccaccgtcagggaccagggacttgagtcacaagtgtctcttctttagaactcaccggaatggctcagaccactggattttttcttccaaatcgggaaagaataatgaaagggtctatgagatagatattttctaactcttcacctaaacttgcatgcctgngagtgtggctgggcatggtggctcacgcctgtaatcccaacacttntgggaggctgaggcggtggatcacttgagcccaggcgtttgagaccagcctgggcaacatagtgccctatctctacagaantc

SEQ ID NO: 497462 - DNA, 132 bp, Homo sapiens
tatagggataaggaacgtaactagggatagaggaacgtaactagggatagcggaacgtaactagggatagaggaacgtacactagggatagaggaacgtacactaggagatagcaggacacgtacaactagg

SEQ ID NO: 497463 - DNA, 208 bp, Homo sapiens
  misc_feature (110)..(110): n is a, c, g, or t
  misc_feature (152)..(152): n is a, c, g, or t
agctgcataagagagacgcgatcagcaggagcgtgctgatgtctcggtgcatgtctcatcaggattgtgataagcttacagcgtcagtactgtctgtcatctctcggatngcagtgtccttgtctcggctgcttgcttgaatgttctcaggngtggagcttgtgaactgcattatctgcatagcagctgtgcgagtagactacacgta

SEQ ID NO: 497464 - DNA, 1164 bp, Homo sapiens
gacccagtacagtgagatgcctaaaatggtgcttgctaactgctctctcatgtgcagcaccaccatgctgttgttctgcatcaaccatcacactgctcactggccagcaacacacgatacatctcaatgcatgcagcacactggccagtgtccactttcgtcacatgcaaaaccactccattcaacacaccatcacacagtttatgcaccaaggaacacattatcatattgtatttggtctcaaccattgatcacaaagcttccaccttaatcacatcatcagccaccgtcgtcattccaatcctcgtgtggggttacaatcaaattggcaaacacaacacaattggtagcatccgaatcaatggtaaaaggtttaccgttgggagaagcattttcatattaaatgcagtcgtatttagtgaagagcaagtgggtagtgcaacacattggtatcgttcgttcagcagaataaattagttgttaaggcgtttgtttggaaatagatttcattggcatgaggttggacattggggacaaaattccaatttcccaaaattcgtggggattttggttacacatggcagagttggagcgtcccaatgggcgataacacagaggggcacccaaggatagactattattacaataccaccttgaaaacagtttacttccttggggaacaaaccggttataccacatttaacgaccaaaaaccattcggtcatacatagggtaactccttccccttgggcgtcattccttcattcacattcaacaggcaattacccgaaaaaggcgcgttaaaacagcagaaccacagtggacttgaatatgggcaaagacacggcaatagaaacagcttccctaagcccccccaaaggggcggaaccaaatcttctactactgggcaccaaatcttggggacacacaacgggggggcaattcacctcccgaaggccacagtaccaacgggtggctaccaccaattccaaaaaacaccatcggtggacccaacaattacaatcactcactcccaaaacagccagggggaaagtgaacgaataaccacataacatacacactaggggccccaacgacgcgatacagacacaggaaagagggaaaacactccacaacaccagcgaccagtagcacacgagggac

SEQ ID NO: 497465 - DNA, 1241 bp, Homo sapiens
tccctttccgcagtgctaggagatgcgcgcggcgcacaccgaaggactgatgttgtctcgtgctatgttgtcttttgccgccgattgttgatgtgttgctgtccctctcctcttttgtggttcttgtcgctcgtccgtcttcactatgggtgtgcctactccctgaagcgtcacacacgttgttgtgggccacacataattagcgggtttccggctgtgccagaggttctttccccctctggtctcccctctctatgttgtaggtgttttccctccccgtggcccgatatccccggggtgaactcaggggcaaccatcgggcgccctcttggccccctcccgcagatgggattcccagccgggtgtcccgccgtgcgggcccctcgctgtgtgcccccgccaatggctctttagcggactcaccagatgcgttagcatttcctcgcatgggttaaattgggaattgacatttgccccccggcgcaaggcaccccccctcatgctacctcccgaactggaataagccttcgaaagaaattgtcccgaagcttgtatctgatatccgcacctggattttagaacttgttcctcgatttggaccctgtattgaagttaactgttccccctggtatttgtttaataaccccggacatatctttgagttccaacctttagtacctgtggcttggtcacttcgtggcctaaggtaagtaacagtgtcttgctggagagcaccaagtctctggtggccttggtgagtcctgtgtggccccgccagccttcttgaatcttcgtcgcccgggctacttaacggtgctccagggcttgaggtgttcttgggactttctctttatgaggctctggccagagaccccgttgttttctgtcttcgcggcgtctcgtcacgggttggaaccgtcccacccgttggagcccacctttcctttttctagctgagtgtcctttggcccggaccccctgggctgttaacttgctttgaggttggagatccggtcttgcactttaacgcctgtaaaatgtagtttcacttgcttaaattataatgataacggtcttgtttgttgtagcgcacacttcctcgattcttctgaatgagatgacccacccaatcttctggttctctacctgcttatgtcgagaaccacttatggcccaccaggccacaccgtccattgatgtacagagaaaaataaaagtgctgccgtttaaataaaaataaa

SEQ ID NO: 497466 - DNA, 545 bp, Homo sapiens
caaaataataaaagaaagttctaggatagaagaggaaatcacaccagatagaaattctgatacccaaaaagaaataaagaacataaagagcatatagaaatcatatgggcaaattaaaatttgtatataaaagtttgcttttatactatatataatatatcctctttttctataaaagagacaggttattctctagtcatactaggctggagtagcagtgtcacaatctacggctcactgcaacctactgaccctgggatacaagcgatcctcccacctacagccacccaagtaagctaggaaccacgggcatgcaccaacaggcctaggtaatttaattttaaattataaataaagacaggatataaaccatagctaggaccaggctgatactatgaactcctgagctacaagcgatagcacctagtcttggtctcccaaagtcctgggaattacagacatagagccactatgcctgagccatactaacctctttaacttataaaacaggtctactctatcccaaaagcctgatgtgatttcct

SEQ ID NO: 497467 - DNA, 446 bp, Homo sapiens
ttacctccaggccaggccagagactgtctctctccaggccagggcaggacccctctcccagacccctaccccactctgccttggaacccagaaggtgttgacggcctcgctaaccacaggcagactgccctggctccagccatcacctcccccaacttctctggacccctgacacggccgctggctgcccggggtcagggcttggtacccaggatctattagccaggcagctgtcgggatttccagcacggggggacctctggggctgacacctctgtcagcatctctcttgtctggaatctgctggccaagtctgcactcttctggggtctatgtctggaccctagagcatctgccatgagaaaaaaggacacagcaggaaacaggtggccttggggtggcttgaggcagaagaccagcacaggccttgaggatgtgccttgagc

SEQ ID NO: 497468 - DNA, 170 bp, Homo sapiens
tagtgctccagccgtcctattcttgcacgaaaggggatccaacaaccccctaggaattacacctcccattccgataagatcgtcttccacgcttactacacaatcaaagacgccctcggtctacgtctcttcctactctccttagtgacacttgcaatcaggggctctca

SEQ ID NO: 497469 - DNA, 126 bp, Homo sapiens
ctggcgggaaacactgactaaagggtcagcaagcgctcggcgaggcgaccgttggccgccagttcgagaaactcgtcgcccaggcggcggctttcgtccatcgccgcgtgccagtatttctgccgg

SEQ ID NO: 497470 - DNA, 725 bp, Homo sapiens
  misc_feature (725)..(725): n is a, c, g, or t
cctaggctgacagctacgcttgcaggcatggcttgaggcccagtaggactgaggacaccgcataccataggagcagttaaggcatgtcccatggcggttacccatagatgcttaccgagtggcccatcactgtattaatgcaggtactaattgactacagtttaacgagggacacatcttaggatgatgagctacgactacgggcaagaagactgcactagctgacgattagcgttatgtgcataggtacgcaagcgcataacgtccttcgccttgatggaagttatgattgctgaagagagaactggaagcaggcctgcagcagacactgttactaataatggtagatgctgtgaagtagcgtaggagatgtactaaggacattgatatgaagcgtgctatgctgacataccgacgactgctagaagcccatcagactggacatatctgttaccagtactctgtcaccagtagctatgtcatgaggagtatcagtctggcatgtatgcctaagagtatcaatggctgcagacctttctgctgagcttcataaacaggcagaggtgtgaactagctagcaagattcatggtcatgctttaaagaggtttttaacctttttacctcccttctttagcttcgcatgcatttatactactgctatcaatctctccacttcctaactcctttacatagtcctggtctacactctgactccttcattggn

SEQ ID NO: 497471 - DNA, 282 bp, Homo sapiens
gtgtctagaatcggagagcagtcggcgtcatccactcagtgtatcactctaactggttctcggtggcgctccggggcacagtgctcatggggcacatggtcatcgctcttcagtgttttgatgtctgcacttggttgcttctcatctcttaaaccttaacatgcaggatcctcatctgcttcacaatggtgcttttacccagatttctctcaggcaccccagacagacagccaggcggtgcgtggccccgtagacctgcctgccggacgagacctggctgcg

SEQ ID NO: 497472 - DNA, 382 bp, Homo sapiens
cgttccctacaagacgcctttcgtcgacaatagtacttcaccccatccatccccacagcaccatcgagttcagctgcggggaaagagacggggtcgcacagaccactcgaactacccgctcaatccgcatacctccttagacggaaccaacaatccccccccccttaggcctttgcgtccgtcactatagcactaccgccaagcgatatccccgctctctacaatattactatatctccttccttaagctcgagtcgcgtcggggcccgaatcaaaagttacacgcggaacaccgatacgcgcaagaagtatccctagaacgccgcttctcccaagaaacgacctcctaaaacattagcccccaccttcctcaggctccgtg

SEQ ID NO: 497473 - DNA, 175 bp, Homo sapiens
atagcatcatctcaattatgtatctaatgggcagcaagttcccacagcacgctatcctgaaaggagtttcgtatgcagcctcgaccggcactccaatttccccgccaagaggcggggagcgtccgcggccgacacagcttactattccgagaggacttagcagggcgcgacgcat

SEQ ID NO: 497474 - DNA, 1293 bp, Homo sapiens
  misc_feature (197)..(197): n is a, c, g, or t
  misc_feature (353)..(353): n is a, c, g, or t
tcatgcggctgttccagaagagcgatgacatccagagccggtggaggtcttgactgactcttggcaagcgtggtacaggaccaagctgaaaaacgtggggatgccgtcttgtggtcgtacttgtggccgagcgtcgcgcagccggacgctgtatcaccgagagaagtgtagggattatgagcccgtggatctgaggntgacagagtgcgctcttggaggacctgtgatccactgatggagaggagagggctgaagagtgctctaggacaaacgatctgaacgagtcttactcaaggtacctgtagtccgtgaggtacatgccaagagcaggaatttgtaacattaaaccatgnactgcccttcattaattaccttgccaaatttcattctcgtaattcatgagggcacccacatgtgttgagtaccccttctactccgggtggtccgacagcgtcaccaagggcaaagctacgggtaggacctcgtcctttgggttgacacaattgggtagggaaaaggtcggtacattaattccaaaaagcccgtatcccttggaagcagttcgcttgcttcgcgaccatagtcagagacgacctgggactcccaagagatgatcagcactttcgcagggtactgcattggaaccacagttgtggtttgtgagaccatttcactcttggaaaggaattgttcccgaaacaggacttctttccgttggagagagggaaaatgactcaaagtatagggcaactagcaacaatatgtgttgttgcttccttcgcgagagggccaaatttacctggtaagccgagctttgtgcgaaattgcaagacttgatcctatgtcggcaccaaagtcctaattagaggtgggcgtgggccaccagaacgagaagggttagtaacaaggccccacgccaagggaagggggaggattgaattaggtctttggggtacaccccgtccaaataactgctaaaaacggttgggcgggtcttgggagcccacgcctaaaagaggtctccctaggggggcggccctaagtaggccgaaatccgttgggcctgtttttggccttagctaccaagttcaaggaacgcgaccaagtcggtttggcctagttttttacacccagggcgggaaaacaagagcggtggcgccaaatcctttgtaccttggctacactcgcctggggggcatcttggggaatttgtgcgccagcgttccacggggttcaacgtttggctggttttgccgacacttttgggaacaatccccatatccgtataaacct

SEQ ID NO: 497475 - DNA, 195 bp, Homo sapiens
  misc_feature (6)..(6): n is a, c, g, or t
aggcantgtccgtcccgggacctacgcagctgccatggaagctccgggtttcgcaggagactggaataagatcggaataattccaacagatgctccaaccatccctcatggaccacacgcactcttggatgctgaagagcaggctggggtctggggcagcctttaggggctcttgggaccccaaaggtgtccagc

SEQ ID NO: 497476 - DNA, 1093 bp, Homo sapiens
gtcgcagccgccggaagctactgcaaggcaacaagccggagctggacgtgtcttcttgaacactgctgctctttcacttctcaggcgtcaccgagcagctcagcacccaggcctgaactctgtaccattaggcacagaatggaagctgatgcatctgttgcacactgttttccaaagctcctggacgcatcagactgactatcagaactaccaacactggtggaagaaccattgggacttctgacacattccaacaacctggatcaagactggatgcaggattcgccctttggacacagccttacacgaacaaagcagactcccacggacactacagtgcacacgctcacaacacacgcagaaaccaacgacactggacttccctatacgggaaccatggggcaaatcacacgaggtaaacttccacttagtgtgacaccgcacgcacttagcgttcccacagcaaagctcaacacggacacacggtgcaacacttggtgggattatgcccacttagctagcaggagccacctaccaccactttccaaggctgctaacaactaccgtaggaccagaacccaattctgcgccacaattaacttggggtcccaaaggaaaaaacgacccctccgaatgaccccacaaatctcgagtgcaccgcgtgtgaacttggtggcgacacaaacagcaacacctatacgccatttagggacagcgcactcaccgtggcgtcaactcacacaagggtaagttttcgcacagcagacaatacgcacaacctcggccctacaccactaagtacaatggggctaaacaaacacacacaacacgacacgatcaatgcctacggatcgggggcatctattaccccgtagaaagcccttatgaggatcagacctttaccacaaatttgtcacgtgtctcaacccccactcacaagacacacacgctttacagcacaaactgatgcaacagaactatcacgagagtgacactctctagtgcagccattgccgctacacaactcatacacaccagctaggtgggtaaccaactatgtaccagccgggcacgacccccaccacgactgtgt

SEQ ID NO: 497477 - DNA, 544 bp, Homo sapiens
  misc_feature (8)..(8): n is a, c, g, or t
  misc_feature (16)..(16): n is a, c, g, or t
  misc_feature (54)..(54): n is a, c, g, or t
  misc_feature (169)..(169): n is a, c, g, or t
  misc_feature (227)..(227): n is a, c, g, or t
  misc_feature (271)..(271): n is a, c, g, or t
  misc_feature (463)..(463): n is a, c, g, or t
  misc_feature (499)..(499): n is a, c, g, or t
cggggaantggagcgngccggcggtgcagtcacgggggagcgaggcctgctggnttggaacgagggactcggcctcggagcgacccagaccacacagacactgggtcaaggagtaagcagaggataaacaactggaaggagagcaagcacaaagtcatcatggcttcangtctgctccgtggaaaccaagataaagatgcccattttccaccaccaagcaagcaganctgttgttttgtccaaaatcaaaactgcacatccacaagagcangagatctcaaaagattaatgcgaagaattgtcaaggaagaaagtttcctggaagagaagctcttgcctttttctcttgtaagcatgctttgtcacccagggactaagtctaccaaggttattttgggcagctaattctaagatttgggatcattgcccaaagtttgcacgcactgcctcccttacctgtgangaatgcaaaattaaagcatggattaaagttgagaanggagactctcagccttcagcttcccaaattccggtgtccgtgact

SEQ ID NO: 497478 - DNA, 825 bp, Homo sapiens
cgaggcgaggctcccaaccgggtgaattaactcctgggaagccgcaagccgtgtagaaacaacagagggccggtggaaaaccgggtgtacaagaacttcaccacttcttatgggagaacagggaccccccgggaagaccttttcgacaggctgaccacggcccagcctggacaagcacccccaggacctatggacgggctgacgcccacaggtgttccggacctacaaccctccattcactctgcaggagcccactcgggcccctacgcgcccgaggacacgcatagccctaagatcttatcctcaaccgagccaaccgatcgtgccattctcggcaaccatcagcgagccacccccagtacgttcgagaagtcgatgcagaatctcccgacgaagatcccggcccagaaggacaggtggctgaggcccgggcagaacttgaggagggcgagggctgagcaccaagcccacaggggatggcaagtcccggagtgtcctggagaagaagaggcggctcctggagaactgcaggagcaactggcgcagctgagtgtgcaggcccggacaaggaggagaaccagccggtggccctgggcacgtcccagctcaactacctggacccccggatcagccttgcctggtgcaaacggttcagggtgcccgtggagaagatctacagccaacccagcgggagaggttcgcctgggctctcgccactggcaggagaagactttgaattctaacgacgagccgtgttgaaacttcttttgtaagtgtgtgtgtttttttcactattaaagccgtactgggggattttgtaccata

SEQ ID NO: 497479 - DNA, 1837 bp, Homo sapiens
  misc_feature (900)..(900): n is a, c, g, or t
aaaaaaaaaaaaagaggaagaaaatcttaagtgatgggatgctgttttcttttaaaaaaaaaaaaataaaattcattttcttggggttagagctagaagaaaaggccccaaagcttctaatgggtttcttctaaattcttatattggcttaaaagtcatggagttatggtccacttaacccggggcttctggtttcactggtggtcaatctaaacatggggtaagtaactggtttacaccttaaattacacctcaatggggcatgtgtgtgtcaaagggcctattattggagttcaatatctccatattataatggtgttctcaaaatcttggttcaaaaagctccaaaaatttttgggggcctatattgggtaatatggccatgtggtggacacattaaaacgctattttgggtgtcacacaacccaaaggccttttggtaataaactaaaacactggggaaaacacacacaaaaggcggtgtgtaacaatttaacccatcgtgggtgatccgtgaggaaatcctggaggccaaggtccaaagacacacatgcttttttgtcagaggaaaactcttctgtgcggtgaggtgggactctcccctataatattgtttttcatttcagaacagaggtgtggggaccagggggacaagtggccaccactttaaagattttctccacaccacagagggttctcccacaagagacaaatagtgggcgtacttcaccagagcacaattaatatttttcgggagcatatggaccacctggtgggttctcattgggggtcaccacaatatacccaacacgccaggggggtcaatattgagcgcaccctttcatcatagcacatcatatcgggcatacaggctccactgtggccgaggccacacctttncaacaagacggtgtgtggggcaaaaacatattaaatagcgacacaccacataccttgttgtgtggtggcacccacaaataacacaaggaaatgtgtgcccccaatttatgtcaaaaacaatttttttctccagggacaaacgttggggttaacgaacaagcccccaaccaatttttactatccagtagtttaaacccgcatgcgagaggaggacccttacaataatacaccgtgtcggtatcaacacttatcttcgagggagcggaggaatatgcaaacaccgactgttaatgtttgatatgatgggaaagccacggcgatgaacaggcggcgatggcggacaacttaacgatagtagcgcagaactggagctaaccatttatagaacaatgagcacacagggggcttcatatatagaaacatttatcacgagtttgagacacagacattaagtatcaaaaaagattactccacccttgtgcaacattgttgaattctattcgacagacgggcgttacatggcgaaaaaacgatgtctccttttgctcgcgacgaaacaaacgtatacaacaggtggataacaaggggctcactgttgggatcactgagtgtatacacccaccacctttgtgtctgtggtgaaacgagtgttaaaaacaaccattataccctacgcccgtgagaaattactaaaccattaccatcagtggtagagaactatttactaccaggtatatagctagcgattattacttaatatgcttccacaagagaatcaaccactagtgacggtctgtaatagaaacacattaaggtcggtattagttagttataccaacaggcatactcacaaccatagacgattatagtaagcaaacagaagatacaacacactattcgattcaagcagagcaacagactaatttgtacgtcgaca

SEQ ID NO: 497480 - DNA, 115 bp, Homo sapiens
ctgattctgaacatcgtcgtgttgactccgatcaatgggcggttgtgcaaccgcggcgtggttgccggcctgttcggttgcacgatacggtgtcggtcttcgcgctcgaccgtgg

SEQ ID NO: 497481 - DNA, 139 bp, Homo sapiens
gtgatatgagttggaggtaggatgcagtccagagcctcaagcagcgtggatccactggcattgccatccttacgggtgactttccagtcccttgaaccaaagcatgttagcactcggctccagctcatatcaatacatt

SEQ ID NO: 497482 - DNA, 89 bp, Homo sapiens
aggatcccactgtaaaattggaaatgggcagttctgaattatcacgcctgaaatgtaaaatataaacttcagtcaataaaaaaaaaaaa

SEQ ID NO: 497483 - DNA, 181 bp, Homo sapiens
cccctttttgaaaatccctcaaaggtgttcaacagggaatgatccctcccctccttttgacagggtgggatcctcctcctgaggtttaggggttcccttctccctgccctgtgaaaatttgaaagcccatatttaggacaagtattagaaagttttcatacttcaggaaaggattttagga

SEQ ID NO: 497484 - DNA, 145 bp, Homo sapiens
ctgctcatggtcccaacccagggtactgtgagagccagcatccaaccccccgcttgcagtgactcagaatgataattattatggctgtttatcgatgcttcccccagtgtggtagaaagttttgaataaacccttttgccttcca

SEQ ID NO: 497485 - DNA, 567 bp, Homo sapiens
gagacaccaccagcaaattgcaaattccaatggcagctagatttttcacccgatctatgcaatcaaggtaaagcttttagaagttgattctgtctagagtgactcattagacatgatcgtgaatgctcttgcaaattcagtttaaaagttcagcacgaaggcaaaattgtttgtttttgcagtgatgatagacacagaaattctgtggtaaaagcaatgttctcattaaagtcagacaccaaatggggtagagacgagcttgtggtgacgctcacagaattcataactgcggctgtgaccaggtggcaaagcagaggctgtggttattcacctttgccactgtcttccggtgtgcccagtcacaggagctgcacggcaatgcatctgagaccatgcggtgtcaccttcacagaagtgctctggcacagagactcccaccttgcgggcctctcgcctcccaagcacagaagcctccagaacgctgcttcaaggacaagcccaggagacctgccatgctcatgcgtgtctttggcaacaggttctctaaattttgccagtggtttgtta

SEQ ID NO: 497486 - DNA, 330 bp, Homo sapiens
aaagctgaatattccatcctctcgtgatcaagtggagaggcaatagacagagttgggtggcaaggagtattgtatatggcaggacacagaactgcatgacatgctgggaaaaagagaggccatgtgcctcctcccaccaagttcctatggagaagctgcctcttagattacctgactttggtctgactgtgaaagtagttaatttttaggactataaattgtactttcagcctttgtagcctcagctgttaagaacagatatcttattcaggtagcattctcttatgtgtgaatactcgtgaaaaatcaagatatggcactgccctctca

SEQ ID NO: 497487 - DNA, 367 bp, Homo sapiens
  misc_feature (78)..(78): n is a, c, g, or t
  misc_feature (152)..(153): n is a, c, g, or t
  misc_feature (203)..(203): n is a, c, g, or t
  misc_feature (218)..(218): n is a, c, g, or t
  misc_feature (324)..(324): n is a, c, g, or t
ctctgtgccaggctgagtgagtggagatctcggccactgcacctccgcctcccgggtcaagcaattctcctgcctcangctccgagtagctgggactacaggcatgtgcaccatacccagctaatttttgtatttttagtaaagagatgganngctttgccatgtttggcccaaggtcttggtcttcaaaacttttcctgacncctcaggtgatccancatgccttggcctccctaagtgctgggattacaggcatgagccaccatgccctaccaatgttaagttttctagtagccatattaaaagaagtaaaaagaaatgggntcgaagttaattttatataatatattttatttaacccaatata

SEQ ID NO: 497488 - DNA, 212 bp, Homo sapiens
  misc_feature (2)..(2): n is a, c, g, or t
  misc_feature (20)..(20): n is a, c, g, or t
  misc_feature (46)..(46): n is a, c, g, or t
  misc_feature (50)..(50): n is a, c, g, or t
  misc_feature (63)..(63): n is a, c, g, or t
  misc_feature (66)..(66): n is a, c, g, or t
  misc_feature (69)..(69): n is a, c, g, or t
  misc_feature (101)..(102): n is a, c, g, or t
  misc_feature (121)..(122): n is a, c, g, or t
  misc_feature (166)..(166): n is a, c, g, or t
  misc_feature (176)..(176): n is a, c, g, or t
  misc_feature (196)..(196): n is a, c, g, or t
cngcggcccattgcccagtngcactcgctgcggcccccggaccganttangctgctgctgctnccngantcccaccccaagcccccggccaagtctggtannctagcccctgtccccagtnncccgtgaccggccaaagccaagtccagtccccacccttatgtgngcctctgtgnggtgaccccccccccacctnccaccccaaccatctg

SEQ ID NO: 497489 - DNA, 330 bp, Homo sapiens
gccttaggaggctgcagtgcacatgcaatagaaacagtttataattttttaagtaacagaatacttagctgaaccttctactcacttttttaggtcttgatggtcctttggaaagccatcccttgttcggcttcagtccaaggttttgatggcaatggtactgatcctacttctgagctccagagttaaatataagacctaggcctgacaagaatgttccatccttttggccaccagacgactccggggtatggacaaatgacagaagtcagtaataagagatgccatgttgggacttaagtggaactattagagaagaaagattccctt

SEQ ID NO: 497490 - DNA, 106 bp, Homo sapiens
attaccataactattgctaaccgcgatggcacccgctatgtccagagaggagaatacagaacgaatcctgaagacatctacgccagcaaccctactgatgatgacg

SEQ ID NO: 497491 - DNA, 332 bp, Homo sapiens
attcgagctcggttccctgaaagacatcagaatgtagagaggcaatactgtgtaaaaatgaaaaacaaaataaaaaactttatttctattttcccaggctgcacaaatctggctttgatgaagaaactcagaagatcctgatgtctgtggaagaaaaaattccccatctgaccatttcacatggaccttggattgacgaggaatacaagatcaggggtgtgctcctctgatggggaacaccctgaagtagtcgtctcacaaaggctttccttggccacagtgggaccttcacctggcacctctatcctgtaattgcacatcatggcagcagg

SEQ ID NO: 497492 - DNA, 484 bp, Homo sapiens
aagtgtcagagcaagaccctgtctctttatttaaaaagcagggtgaggggcaggcgacgaaattatatagacatatgactaaatccaaaaaagaaaaaaatagtaaaaaggactaaaaaatttaacaaaatgttaacagcagttatttagttcggaatagattttttttcctgctttttctattttgcaagttttttgcaaagatgatgacgtactttgatgattaagagaaaaacagggaccaggcgcggtggctcatgcctgtaatcccagcactttgggaggccagggcgggcagatcacctgagatcggaagttccagaccagcttggctaacatggtgaaacccggtctcaactaaaaatacaaaaattagccaggtgtaatggcgggtgcctgtaatcccaactacttgagaggctgaggcacgagactcgcttgaacccaggaggcggaggttgcagtgagctgagattgtgccact

SEQ ID NO: 497493 - DNA, 558 bp, Homo sapiens
ctcccgtgctctccagaaatcccagccatagtaaaaagaatctgttttttgaggtggagtctcgctctcgcccaggctggagtacagaggttgctgtgagctgagatggtgccactgcactccagcctgggtgacagaccgagactcggtctgaaaaaagaaaaaaggccaggtgtggtggctcacgcctgtaatcccagcactttgggaggcagaggcgggcggatcacaaggtcaggagttcgagaccggctaatataaaaattggccagggtggtggcgggtgcctgtgatcccagctacttgggaggctgaggcaggagaattgcttgagcccgggaggcggcggttgcagtgagctgagattgcatcactgcactccaacctgggagacagatcctgactccatctccaaaaaaaaaaaaaccggggaaacagtctctctagtagggtgggaggaagggggctgaatccagagaccgggaccagtgagggggttaacaaaagaaaaaaatccactttctcatgaataaacccccaaagttcggtccttcaaag

SEQ ID NO: 497494 - DNA, 191 bp, Homo sapiens
atcgtgagagagaactgcagaaggaaacctgtctctaaaaacaaggtccagctaaaatcagtggtccagctccaccacaagcgcagttcctggcgctgttgagtttatgcctctaccattccaatgtagtctctgctccatgaccaagtcccaccactctggacagtcatgtccagtccaaaccacatgtc

SEQ ID NO: 497495 - DNA, 87 bp, Homo sapiens
  misc_feature (11)..(11): n is a, c, g, or t
  misc_feature (15)..(15): n is a, c, g, or t
attgtacagcnaagnttccgccagctcgccgctcgctatggcgtcgctcaccgtgaaggcctaccttctgggcaaggaggacgcggc

SEQ ID NO: 497496 - DNA, 928 bp, Homo sapiens
  misc_feature (1)..(1): n is a, c, g, or t
nctacatgacaaaaaaagaccaaaagaaacagaaaagcaaacatctatccctccctctcatctgttcctcgagttgcgtctttctccttttctgacaacgcccggtggccgtattttttctcaacgctctcgcctaaaacttttcccgcctgacatatatcaattcgggtttgatgttcccgtaattctcagtactcttatatcgtatttgcctgtccaccatcaagggatgttggcgaccacagggtggccatgtttaatagtcctcagcagctcttgcatgtaaccttcgtgcccaaactctgggcctgattctaattccaaccaatttttcttcccccgccagaaggccccgttaagattaatataaaggggggacaccccaaaagaggacctgccccactctgtaggccccgtcccgaagacatttctatctgttgtcattaatcccggttagggtgaactcttccttttttagagacgccaaactcacgctgcttggccatccagcgcccttaatctccctgtgagctcttcttctgccactgctgagaacgccctcctgtaaaaagcgatattttcggaatttcccggggattaaacctgcagtaagcttcttcccgcggggggacgccaccacctattgtcggataggttcccccttgggggagtagatcccctgccccatcttggtgatcctcgcgttatgaccacgctataatttttttcttactcccgcacgtcggttgctatacgccgacggaacggtcccactcccccctcttgataacagggataagatgtgggctttctgtcatcaagaaaaataactccttctttcttattagagacatagtatagtatttgggggcaacccaacttcctaattgcaaaccaaaaaaaaacccatttaacaacccacataaca

SEQ ID NO: 497497 - DNA, 277 bp, Homo sapiens
tatgggcttgggtgagggaggtaggtggtagttggtgttataatattttaagtggggtgatgaggaatagtgtaaggagtatgggggtaattatggggggccatacgggagctatttagtgggggcatcccggataggccgagaaagtgttgtggagaaagaacagttagatatacgccgatgaatatgatagtgaaatggataagggagtaggaacggcctagggtgtagcctgagaataggggaaatcagagcatgaagccatccaattgcatga

SEQ ID NO: 497498 - DNA, 673 bp, Homo sapiens
gaggctgcagcgccggatcgtgcgggtaggcgtctgcgctcggttgagggctcgggcggggtttcctgtgccttcttctgtcgcggttgcagctcgggattcgggctgacccaggtccccatggcttcagaagagctatagaaggatctagaagaggtaaaggtgtcgctggaaaaggctagtaggaaaggagtacgtgatgccgcttacagtggaaaaatcgcaagattgagacaagaaatcagatggaaataatgatgcaaagaaatcgcagaagaaagcagaagtgcttgataatgaaagaacctagtgtgtggtttgtcgcattacaaagggggtatagggtgaaaatcagtaattatgggatgggatcagtcagataggttgggtgaaaatctacattagcttaatggagttcagtcaagttcccactgagaatgtgcggtgcatgtcacagagaggtcatttgatctttgggtaaagaatctaaatgggaagagttacttccatgatttgtgaaggatctctgtgaaaccattctctgtggaaggcagttcagaaaaagtcaagactgatcccgttcttatatggtgtagaacgaaaggggcaccacaggggggttcctgaccaggttgaaaggggtgtagaaaagagaagctttatgacttgaaag

SEQ ID NO: 497499 - DNA, 123 bp, Homo sapiens
attgttgttcgttgagcttggactgaggcgtgagggttggattctccaacgaggccagaggtggtggagcgggcaggtgagagtgttgtgcctgttgagcctgagctgctgggaaaggtagtt

SEQ ID NO: 497500 - DNA, 439 bp, Homo sapiens
cagaagaggcaaggataaaaaaagggaacaggacagagaagtagatcacaaggacagaaagaggggtggaagtgggaaagaagagcaaagagagagaaaaagaatgagaagggagcacaaagaaaaggtgaggaagaagagaaacagagagaactggaaaaagagatatgcaaagaagagaagaagggagagaagaagtgtaagaagggtagaagaagaaaaggagagaaacaataagtgcaggaaggaatggaaaaaggaaggaaggaggaaaaaaaggaggaaaacagagagagaaaagaagagaagagagataaggaaagagaaggaagacgagaggaaaaagaggatcactgtagatagatatatatatatatatatatatatatatatatatatatatatatatatatatatcacctagtgccgaattcctgca

SEQ ID NO: 497501 - DNA, 1161 bp, Homo sapiens
  misc_feature (206)..(206): n is a, c, g, or t
  misc_feature (212)..(212): n is a, c, g, or t
ttgttcgggaagatctcaattccccgctggaatgaggtaatggaggtgatcgtcacatcagttccaggacgaatgagctagaggttgaagtctttgacaagggtacttggacaacggatgattgtatctgggcacgtgtgtacaaggtgacgtcgtcagcacacatgctacttaagagcacgttggcttcctgtgaatgcagtggntgaccnctggacggactgtctccatactggcctgcctgtcacttcgcgccgtggcaagtcgggtctcaacctcaccgttccgcgaacgtagcgtgtcgtgacgtttaggacgtgacgtgtgcgtggacacggctcgtacatacgttggattccaagggatcgtctaggaaagcatggttgccggaggactcgggccgtggtccgagcccccatgtcctagtgcacattgctagtactcgcgaggacgcgtgccaagaggagacacgtccctcgtcgtcgcgtaataaggcatccaaacgcatcactcaaaggcccctttcatggctaacctcctcaacgtggatgtgagacctagtaagctgtcctacattaaataaccgcaaatgaccgtaatgtgaccgcatggaacttttcacgggccacattgtccgtagcgggcacttggaggaaggatagcgctccccctattcctttccaaatcgacgaggagcatacgccaacgatcatcgtcgaagaacggcccttaacgacagctcttgcgagcgtgctttccggaggtgattgcacgggggtcacattgagcctggttgccctgggtcgcttcgattgtattccgcgtgggcctgccctttgcgtccacgggaggccttcgcttccggatgtgcccttggtagccccaaggcggtcctgcattttggggacaccctggtcctgcgtgttttagcgagcgttccggggacagcgtcatggacattccaaagagtggtgcctatcggtggttggccattatctttgaaagaaagcccaacccatgcacttaaggggcacttcccatgtggtcttgtttccccccaagccatctttcatatgtcaaagttgggcgacacggtcgtccaattaatggccactctgagactttcctggctcacacaaggcattccatcaaattcggctg

SEQ ID NO: 497502 - DNA, 133 bp, Homo sapiens
atcatgagtctcacagtaagagttctgagtgtcaatcagttgtgttggttttctccgcaagggaagacgttcccataactggagcaactgttcaccaacctgaggttctagttcctgcccatccctgcttatc

SEQ ID NO: 497503 - DNA, 149 bp, Homo sapiens
cttgattggggcatctactcctgcatctaatttggaagcgccaccctagcattatcatccattaaccttccctctacacttatcatcttcacgattctaattctactgactatcctacaaatcgctgtctcctgcaatcgagcctggaa

SEQ ID NO: 497504 - DNA, 313 bp, Homo sapiens
  misc_feature (43)..(43): n is a, c, g, or t
  misc_feature (48)..(48): n is a, c, g, or t
  misc_feature (54)..(54): n is a, c, g, or t
  misc_feature (56)..(56): n is a, c, g, or t
  misc_feature (62)..(62): n is a, c, g, or t
  misc_feature (85)..(85): n is a, c, g, or t
  misc_feature (88)..(88): n is a, c, g, or t
  misc_feature (103)..(103): n is a, c, g, or t
  misc_feature (105)..(105): n is a, c, g, or t
  misc_feature (114)..(114): n is a, c, g, or t
  misc_feature (119)..(119): n is a, c, g, or t
  misc_feature (126)..(126): n is a, c, g, or t
  misc_feature (148)..(148): n is a, c, g, or t
  misc_feature (159)..(159): n is a, c, g, or t
  misc_feature (162)..(162): n is a, c, g, or t
  misc_feature (184)..(184): n is a, c, g, or t
  misc_feature (208)..(209): n is a, c, g, or t
  misc_feature (260)..(260): n is a, c, g, or t
  misc_feature (263)..(263): n is a, c, g, or t
  misc_feature (286)..(286): n is a, c, g, or t
gggagtcatcaaggacaaatacggcaaggatgccaccaatgtnggggntgaagntngctttnccccaatatcctggagaacagtnaanccttggagctggtgnangaagccatngacanggcttgntacacggataagatcgttattngcatggatgtngcngtctcagagttttatcgtgatngcaaatatgacttggacttcaagnnctcccactgagtcctgtcccgagtacatcacgtggggaccagactgggggnacntcgtaccagggacgtgtgtcagngcacgtagtccgtggtgggtcgtccat

SEQ ID NO: 497505 - DNA, 127 bp, Homo sapiens
ggtccactgatgggcataaacatgcatctccatgtgcttcacttgtattttcctgattactggagagaatgaacatcttttttattgttattggctaagctggtatcctcttctgtattgcctatgt

SEQ ID NO: 497506 - DNA, 831 bp, Homo sapiens
  misc_feature (63)..(63): n is a, c, g, or t
  misc_feature (90)..(90): n is a, c, g, or t
  misc_feature (103)..(103): n is a, c, g, or t
  misc_feature (106)..(106): n is a, c, g, or t
  misc_feature (442)..(442): n is a, c, g, or t
gactccctctttccctccctcctcctccgtccgcccgtccgtccgcgcgtctgtccgttcggnccggtccggcccgaagcatggcctggngtcagcttcagcngtnccaccggccttggtatgtctgctggtcggcttatctgaatcgaagagtgatccggaagcaggatgagcagtcgagctcgatgtggagtcatcttgataccaccagtatgaataagaattgtggcatccgaattgtacccatccacatgactctgccagacactcagcggaagaacgcgcgcggcctgtgcagtggagcgtattcggggacacctgttgattgaaccctacgagagcgtgcatagtacttcggcattcattgccagcttgtcgcaacggacttcgccccatagactttgcttcttgcacgaaacaataacagtcgcatacaatctanaactttgtggttggaagcagaacgcattcgtgccattgattgcctctgttcacagtggcggcattagttagctaattgcccaggcagttgcgctttccctcgtgttggcatcgataggttcatatcccatgtggtttgtgctcgacccgtatagagatccgcttggacacttgcttaagcccatgccgctgtgggactaccgtacccaataaggcacttgcctggtgagttgcgcaaatccacgcgcgccctaggctatgggcctccgtcttaaagacacgctggccttgcgcatgcagaaactctctcccttatggccccattggttgcctttgccttccatgcaaattggctagcgctttgcggcaagttagagtattgcgcatgca

SEQ ID NO: 497507 - DNA, 174 bp, Homo sapiens
  misc_feature (138)..(138): n is a, c, g, or t
atcgtgtgtttgcagctgcatgtttccagttcctgcaagtcaactatggtctccacacattttctcaaggtccaggttcattgacttcagggttgtcatcacaacatttttttcctggttttatggattttccactgnagcaacgcagcttctccttcaatcgtcgttctcagc

SEQ ID NO: 497508 - DNA, 569 bp, Homo sapiens
  misc_feature (63)..(63): n is a, c, g, or t
  misc_feature (90)..(90): n is a, c, g, or t
  misc_feature (103)..(103): n is a, c, g, or t
  misc_feature (106)..(106): n is a, c, g, or t
gactccctctttccctccctcctcctccgtccgcccgtccgtccgcgcgtctgtccgttcggnccggtccggcccgaagcatggcctggngtcagcttcagcngtnccacctgtcctggagactgcttggctgtgcttactgatgtgagtgtgactcctgactatggatgatgctgctggcctgactgtgtgctctgtacacatatgaatgatggctccgatgacctcaagcttgcagcatcatggatgaagtggggcttgcagtgagctttctgggacactttgagaaccagaaggtgatgtactggcttcttgcagttgtcaatggactcccaatgcttgctctgccaaaactacgtgctcatcaacttggtgtgtgtgcgaagatgtgccttgatgccctgcaagtgctgcttgtgccagccactgtggctaagtgtggcagagttcttccagtggtgtcgactgtgatctgtgaactgccagcagcgtggcaagacatagacgcggtgtgccatcgggcagctggctctctaacgggctggcgcgactctccagccctgtgctgc

SEQ ID NO: 497509 - DNA, 316 bp, Homo sapiens
gtgtacacaacctagggtcagtcttgcaggtgtgtagccatttaccaagatagttgtaggtaaagaagggcagatttattagagaaattgtgaaaatatgttgcagtgggcagctcagcagagaaggggctacctgcaaagaggcaagggctggaggaaagttttatagggtcctgctgaagggtgctacgtgtggaatgaggtcattgtgcccgcaggttgtttgtgattagctgtctctaacaattgttcatacaataattgttcattattgttctcaacttggggctctccccaacctggggacccttcctta

SEQ ID NO: 497510 - DNA, 125 bp, Homo sapiens
ggctgccacgaggaggatgtcagcgtgaccgtctcaccatgggcagagaagaaaatgaccaggagtgtcatctccacgaattattggggtcacatatgtcccttcccagtccaattgccactctt

SEQ ID NO: 497511 - DNA, 241 bp, Homo sapiens
aggattgtcacagaacagtacctatcgctggaccgttgtgagatacagaggagggaaggcaagctctggatccgctccctcaggggatccaggagtctctaaagcaactcttcccctggggattgtagagtgaagttgtcaaggatggaacctcgaagatgcgacaggatggaaatcaggtggattactgttgagctatgagaataagagtctggagactgggggccttcagttcggcctc

SEQ ID NO: 497512 - DNA, 256 bp, Homo sapiens
  misc_feature (14)..(16): n is a, c, g, or t
  misc_feature (18)..(18): n is a, c, g, or t
  misc_feature (37)..(37): n is a, c, g, or t
  misc_feature (52)..(52): n is a, c, g, or t
  misc_feature (61)..(61): n is a, c, g, or t
  misc_feature (63)..(63): n is a, c, g, or t
  misc_feature (93)..(93): n is a, c, g, or t
  misc_feature (225)..(225): n is a, c, g, or t
  misc_feature (242)..(242): n is a, c, g, or t
ggagatactgattnnncntaatcacagtgtgagatanttttttctttaatangtgtaatantnaggaagtgggcccagaggaggttgtgcctnggagactctcatgtttgtccttcccctgagatgcatgtcctgtcaggctcagatacctttttataaaagagctgaaatcattatggtatatatctaccttaacagagctttcttattacagtgctaaaatgnttctgataaatggtccnaactcaactagaag

SEQ ID NO: 497513 - DNA, 1232 bp, Homo sapiens
gcagccccgcggctgcgggcggccgggcggccgagcgcgctctgaggttcgtccctcatcgctgaaccctgcgtcctccctgcctgcagctcctcgtgtggagtgtgtgtggctggtctggtgccttgcgcatgatgcctgcctccgtccccgtccgcatgctgctggtgttgagtgccgctgggttccgcgatgaggcgccgaacctcacagtcgcgctcccgcccgccccgtcctgcccgcccccccgccgtcgccccctgcccctcgccctcccgccccctctcccccctccccccccccccacccccccccccccccgcctcgctcccccgccccccccccaccaacgcccctccaccccccccacccactcacactgagccctccccccctcctccatccaccctctcacctcctcaccacacccctcccctaactacacccaccccatcctccccccccaccttccccacctaaccaccaacatgcaaccaaccaacatgataacacctaacctacataacgcacctatccactacactcctcaacgccatctccacccgtctctctcactacctctatcatgctactcctactaactccctcctacccccctcattaactgcctcttcacacccccctcctccgcatcccctcgccaccttcccacgtcaacctcgcccccactcccaccacacccacctcccccgcccccccgcccctccacaccaccatcccccgccaccccgtgacacgccaccacccccctatacatacccctacacaacatcccctcccactcctcccccccctccacagaccccctcccgcccgccccgcccaccgcatccgcccccccacctgaacctcccaccctccgcctcctctccctctcacccgcaccccgccgcgcccctccacccctccctctctcactcccccccacccctgtctaccacaccacccactccctcctccctccctccctcccccctcccgctgcctcccgcggccctcccgccgccccccccccccccctaccgcccgagcgcccgccgcctctccgctcccccccgctccctacaacactcaccacttacgccctcatcatctccctcccccccgccccctcccccttctgccctcccccccaacatatttccccttatggtaccccccccccccctccacaccactcttccccctcccctcccccctctctccctcct

SEQ ID NO: 497514 - DNA, 607 bp, Homo sapiens
  misc_feature (38)..(38): n is a, c, g, or t
  misc_feature (80)..(80): n is a, c, g, or t
  misc_feature (125)..(125): n is a, c, g, or t
  misc_feature (129)..(129): n is a, c, g, or t
  misc_feature (134)..(134): n is a, c, g, or t
  misc_feature (177)..(177): n is a, c, g, or t
  misc_feature (186)..(186): n is a, c, g, or t
  misc_feature (192)..(192): n is a, c, g, or t
  misc_feature (214)..(214): n is a, c, g, or t
  misc_feature (220)..(220): n is a, c, g, or t
  misc_feature (223)..(223): n is a, c, g, or t
  misc_feature (225)..(225): n is a, c, g, or t
  misc_feature (270)..(270): n is a, c, g, or t
  misc_feature (286)..(286): n is a, c, g, or t
  misc_feature (300)..(300): n is a, c, g, or t
  misc_feature (324)..(324): n is a, c, g, or t
  misc_feature (351)..(351): n is a, c, g, or t
  misc_feature (369)..(369): n is a, c, g, or t
  misc_feature (373)..(373): n is a, c, g, or t
  misc_feature (425)..(425): n is a, c, g, or t
  misc_feature (440)..(440): n is a, c, g, or t
  misc_feature (450)..(451): n is a, c, g, or t
  misc_feature (454)..(455): n is a, c, g, or t
  misc_feature (460)..(460): n is a, c, g, or t
  misc_feature (464)..(464): n is a, c, g, or t
  misc_feature (467)..(468): n is a, c, g, or t
  misc_feature (474)..(474): n is a, c, g, or t
  misc_feature (482)..(482): n is a, c, g, or t
  misc_feature (489)..(489): n is a, c, g, or t
  misc_feature (511)..(511): n is a, c, g, or t
  misc_feature (515)..(515): n is a, c, g, or t
  misc_feature (522)..(522): n is a, c, g, or t
  misc_feature (525)..(525): n is a, c, g, or t
  misc_feature (591)..(591): n is a, c, g, or t
gggggagcaggaaccaggcggggacgacgaaacggaangggccaagggggacagacagggcggggaccgggcggcccccncggagggggagggggggggcagggaggagggagaagaggcagggngccngcggngcgggcggggcagacggggggaccgggccagcgccagcagccntcggggccncggcgnggaggacaccccccgcaacggncgggcncanancacgaacagcaaagcgacccaaagggggagaggcggagaagcgcncaacacacaggggcgngccaggaaccagancaacaagggcagcagcaccagacngcaagaagggagggccagcggccagcngttgaccagaacggcgancaancggggccggcagcgcagcaaacgggcaggccaggggagccgcggggcgcaanccaagacaggggcanagccggcgcnnatnnggccngganggnncagganaatcaccngagcagngaagccagctgcttccattggngggncattttngcngtcaccagcaacgttgccacgacgaacatccttgacagacacattcttgacattgaagcccacatngtccccaggaagagct

SEQ ID NO: 497515 - DNA, 340 bp, Homo sapiens
  misc_feature (1)..(1): n is a, c, g, or t
  misc_feature (37)..(37): n is a, c, g, or t
  misc_feature (88)..(88): n is a, c, g, or t
  misc_feature (91)..(91): n is a, c, g, or t
  misc_feature (191)..(191): n is a, c, g, or t
  misc_feature (282)..(282): n is a, c, g, or t
  misc_feature (301)..(301): n is a, c, g, or t
  misc_feature (335)..(335): n is a, c, g, or t
nggcacgaggatctccgttgtctcagctaccaagggngtgccagctggaaacagtgacacagaggggggccggcctggtcggaaacgngcntggggagccacacagccaccacacagaagaaaccttccatcagtatcaccactgaatcactaaagagcctcatccccgacatcaaacccctggcggggcnaggaggctgttgtggatcttcatgctagatgactctcgcatctctggaggatggagacagagcgttaatggcgatagatggggacccatgnacaaaggggcttgaaaatnttgccggacagttcacttcaggttagttacctgncagtt

SEQ ID NO: 497516 - DNA, 1435 bp, Homo sapiens
  misc_feature (457)..(457): n is a, c, g, or t
gagagagagagagagagagagagagagagagagagtcaacgggtggggggacaagtccgttgaggctgtccaggcgagtcagcgcctttgtggagctcgcgtgactcggctgggctgtgccgtgaagatagacccagtctccatctaggaattatgagcgaaacaaaggatgtagatgcccaagagaccgctgtcaactcttcccgccccagccctgtctaacgacggcccgtgcgggtgtctctccccggcccggagacgacgaggagtggttgtgaaacacctccgagctcctagcgcggcggcgaggaacatctggccgggtgaggcgcccagaggatcggatccctaccaccggaggacaggactcccaagatactactggaaaagacgcagaacataggggacttggtgaccgacctaagagtggtgtggatggacccaaggtgcccccttntcatccggggggacacccttttacccaaggttcgccgatcggtcggtagatgtcccctcgattgtggacaggcaacagccctcccggagagaataacgacgcgctcgctagactagatagcgttgacaattgagctgcctgggtgttgtgctttcgccctcgaaggagcgaaagaaaccaatccattccgttccctttgcccacacttcccggtgcagagcaaaaccgtatgggacaccaacaaccgcctaggagggaacaaatttctgcgccccacagaaacaagcccaaacagctaccgcaaggaggggaggaccaaaggcgacaggtgagttcaattggccttgagagttggcagaggcgcacaccgaccgctgctcggttgggtaccccaatcagacagtgcccctcccccaagtgaacctcacgcaaaggaaagcgccgcgtgagttcggtttccggttccacacagaagagaagcgctacgcgcgtgagccagagccggaattagctgttggtatgtgagtgaggaggacagaaagcgtaattacataaacgtaaggttggtggagcattgtaaacccagagttatgggaatgggtttacaaagcaatctcataagtgtcggcgtgggagagaagatgttgggaagttctccatgatcgcacagttctattgccgttcaggatgcgaagactcctagttcagttgccgaattcctgtggtagtggaagccacaacccgtggggcgcgacagagtaacttggcaacgattttgtaagcgatggagccgaggtttcggtgaaacagcaagcggagtggcactataaagagggagtctacaatcggtgtagtccgatctttacgttacaacggccgtgacacatctctcaacagtatgtaacgggatggggggctatctgcacaaacgagaacacacgtgtaaggcagaccaaagggacagccacggaaacgaca

SEQ ID NO: 497517 - DNA, 1296 bp, Homo sapiens
  misc_feature (205)..(205): n is a, c, g, or t
agaattggaagactgtggatagtcaggacaaaagtcacttctggggcccataccctctagtggcattatgaattgtttgcgcagtatcaacatggacgcctactgtacctcttgctgtttctcaaagtagacagcccgtgcaccggtttgcgtctataagaaatgtggatcatctctctggccagtacactgagttgtgaagtgngatccaccaagatctctcacatgatagtctcaccttgatcgatcatcacaggtagaacaatctcatttctctacagtgtgatgtccgttacgcgtgcgcatgacagcaagtcgttgacgctcagtggggttaagactttgacagagacctctgatcagtggcagcgatgaactgctttcaaggaagcaaaagatgactaggcccatgatcggaaggacaatgcggtaacaggatccagcccaagtgcgtaagcacaaccacgttcctggtaagagttgtgcttgccaaactcaggttttcctagcaatttcttacaagtaaccgaggttcgataggggcaagaaggatcgtgcaccatttgctctacccatgtcccatgttcgggaagtcaaacgtaatactcccgaacctaggtcccaagctttggggggaaccattgtttgcgactccattgttacaattactaatctcggaatgcgtcctattccaacttggcggaaaacttgacatagctggtcgatgagggcccaccttctcctatctttcttagaacccttataaccaaggggggccccgcgtcccgttcttacaccaataggaattcccttggactgtcgttgggggggcccacaatcccaacttatcgcggtaatccgaggggtgtcttgcatagtggttacctagcggtgttggtcccctttaaatgttgagcaagaggcattggaccaaaatagaggtgtaagcgcgtatatggagggcgtacacacatgtgtttaccacaaaaggagccaaagctaaatagcgcagaaagattctgaacctcagcacaggcggctttcccgggagcgcaaggaggataaggcatagacatatggtggtggggggggaacgactaaataggtgacgaaatttgtatataccaacagggaattattttttaaaaagccttgtgtaagtgtgcccttgtttttaggataatataacacaaagttcgtagttaaagagttgataacaacaaatgggcatgagagacttatattttgtgggggcatagaagaggtgcatgagataagaaagagcacaattataag

SEQ ID NO: 497518 - DNA, 437 bp, Homo sapiens
agtagttagaatcagatcacttcagtaacgtacgtgatgagcatgcgctaggaaatctttgtaataacccagaagccaaaagacatccccaactcatggggtgtgttctttgggacggtacagcttatatcttcggtttatacagtcttagacttgagggctttgggtcaaagcatcatcatcagatttcaccacaactctcaccattcacatcagtgtcaacacacaaaaaggtcaccatgtcgacaaacaacatggctgggaaagcacaaatcatgctccaactcattccacaagtgggtataagttcattggctggagtgggtcatgactcatggctggcatttttcctttcctttggttatcacttttctggtggtttaaccaccctggtgccagccactggggctctgtagcgggggcatcctcgaagcagt

SEQ ID NO: 497519 - DNA, 135 bp, Homo sapiens
catccctccattatgctcatccctccttatgctcatccctccttctcatccctccttaactccaggggataggcaggtagagcttatgaaaagccaaggtttatatgcctatccccaggagtaaggagggatgag

SEQ ID NO: 497520 - DNA, 81 bp, Homo sapiens
agtgatctcttattgttctctactacctggacgccacctccctgacctccctgacctccctgacctccctgacctccctga

SEQ ID NO: 497521 - DNA, 284 bp, Homo sapiens
acgattttgaacactggtccaatgtataaataacgtcttttatatatctaaatgtattctgcacagaaggtacactggtcccaaggtgtacagctttaagagtcatatctattacatgtttaatctctgctgaaactcagtgcaaaaaaaagaaccaacgataaaacaacagggccacaataaaaacaccatgtatttttgtacacaaagtttttaaagttatactaacttatattttctatcaatgtccaggcgtgaaccgctctgccaaaccccagctgcgg

SEQ ID NO: 497522 - DNA, 478 bp, Homo sapiens
  misc_feature (284)..(284): n is a, c, g, or t
cccaacaatgtcagacagccgtttgtgacttccacctcgtggcctcaagatggcagtcaccttcattggcaatagcacagccatccaggagctcttcaagcgcatctcggagcagttcactgccatgttccgccggaaggccttcctcccctggtacacaggcgagggcatggacgagatggagttcccccaggctgagagcaacatgaacgacctcgtcttttagtatcagcagttccaggatgcccccgcagaagagaaggaggatttcggttaggaggccnaaaaggaggcctaaggcaaagcccccatcccctcagggttttcagttcccttaaccgttttaatcaactgcccccttcctctcccccaaaatttgggtttgctgcctctatcttgttttttgtttttttttttggggggggtctaaaacagggcctggcccatagtaggcgccccataaaaacttgtttgttta

SEQ ID NO: 497523 - DNA, 294 bp, Homo sapiens
agagatcgtggaacggggggccagataagtgctggccggagtctgtacacgggcctgcgctccatcaggcgcagtttggtcgtccccgcttacgagcccttcttcaagctccctgcaggaggtccacccacaggtgcgcaagatcggggtgttcagctgcggccctccaggaatgaccaagaatgtagagaaggcctgtcagctcgtcaacaggcaggaccgagcccacttcatgcaccactatgagaacttctgagcctgtcctccctggctgctgcttcctgcttatctcct

SEQ ID NO: 497524 - DNA, 548 bp, Homo sapiens
gcgttcgggctaccagcaggtagtttactgcatcgctgcggtgtttgccctgggagcagctgagaccacgcaatgctccaactgtaatgcccggtctctgcatatgtgactgtgacgtgcacttgatagttcacatttggcagccgccctattcactgctcacacggtaaaatggtatatcacattggataaaactaccgtttaccacatcaagtaagtatctaacccacaaaggatacaacgaatgaaataccctcatcttcatatacacacaaccactatgctgtctggagctcgttgcggcactgtgaacagggaagttacgggggacacgggaactgggtgatgccgcgttgtcatgcaagtcctttaacaccatcctctttagggataccctggtcaagcggctcacttgttcctaagagtgttgtgagcgggccgtatactacaattcctggagaatatctcacaattcatttgtcctcttatccccatccctctacccctccacttacaccgcctgcttgagagtgctacatgcgtgtccg

SEQ ID NO: 497525 - DNA, 551 bp, Homo sapiens
  misc_feature (1)..(1): n is a, c, g, or t
  misc_feature (95)..(95): n is a, c, g, or t
  misc_feature (107)..(107): n is a, c, g, or t
  misc_feature (122)..(122): n is a, c, g, or t
  misc_feature (124)..(125): n is a, c, g, or t
  misc_feature (133)..(133): n is a, c, g, or t
  misc_feature (136)..(136): n is a, c, g, or t
  misc_feature (140)..(144): n is a, c, g, or t
  misc_feature (151)..(151): n is a, c, g, or t
  misc_feature (157)..(158): n is a, c, g, or t
  misc_feature (164)..(164): n is a, c, g, or t
  misc_feature (170)..(170): n is a, c, g, or t
  misc_feature (172)..(172): n is a, c, g, or t
  misc_feature (180)..(180): n is a, c, g, or t
  misc_feature (185)..(185): n is a, c, g, or t
  misc_feature (197)..(198): n is a, c, g, or t
  misc_feature (206)..(206): n is a, c, g, or t
  misc_feature (214)..(216): n is a, c, g, or t
  misc_feature (220)..(221): n is a, c, g, or t
  misc_feature (224)..(224): n is a, c, g, or t
  misc_feature (228)..(228): n is a, c, g, or t
  misc_feature (231)..(232): n is a, c, g, or t
  misc_feature (236)..(236): n is a, c, g, or t
  misc_feature (243)..(243): n is a, c, g, or t
  misc_feature (245)..(246): n is a, c, g, or t
  misc_feature (252)..(252): n is a, c, g, or t
  misc_feature (254)..(255): n is a, c, g, or t
  misc_feature (257)..(258): n is a, c, g, or t
  misc_feature (264)..(264): n is a, c, g, or t
  misc_feature (267)..(270): n is a, c, g, or t
  misc_feature (272)..(272): n is a, c, g, or t
  misc_feature (274)..(274): n is a, c, g, or t
  misc_feature (278)..(279): n is a, c, g, or t
  misc_feature (281)..(281): n is a, c, g, or t
  misc_feature (284)..(284): n is a, c, g, or t
  misc_feature (287)..(287): n is a, c, g, or t
  misc_feature (302)..(302): n is a, c, g, or t
  misc_feature (332)..(333): n is a, c, g, or t
  misc_feature (341)..(341): n is a, c, g, or t
  misc_feature (357)..(357): n is a, c, g, or t
  misc_feature (368)..(368): n is a, c, g, or t
  misc_feature (380)..(380): n is a, c, g, or t
  misc_feature (383)..(383): n is a, c, g, or t
  misc_feature (388)..(388): n is a, c, g, or t
  misc_feature (429)..(429): n is a, c, g, or t
  misc_feature (434)..(434): n is a, c, g, or t
  misc_feature (438)..(438): n is a, c, g, or t
  misc_feature (440)..(440): n is a, c, g, or t
  misc_feature (447)..(447): n is a, c, g, or t
  misc_feature (454)..(454): n is a, c, g, or t
  misc_feature (467)..(467): n is a, c, g, or t
  misc_feature (482)..(483): n is a, c, g, or t
  misc_feature (517)..(517): n is a, c, g, or t
natacagtcaaggttagttgggtcaaaaactgatgttgattatgattaaaaagatacaaaactcagcacctccttcattaaaaataaaggttganaaacttgataantaaaaaacttaaaanannctttatanctncctnnnnnacatttnaagccnnccacanacacananccttatanccatnccaccccagctnnactaaaantaaacgcnnntcannatnaatnaanntttncccgcgncnncgcccncnncnnacaccnggnnnnanangggnngnggngcngggggctgggactanggggaggaccggggggcggggaacggagtnnggatgccnccgatatacgagaccngctgcggtaangctttttagagnctntttgntcgtgttagcctattactacggcgaggggatgagcttctcnttgtnggcnanatccacncccccgncatgagatacctncgcctaagccgccgnnagcgcaggggaggaagagagacggggcttgtccnattctcagtagcattactccggcgtattatcagg

SEQ ID NO: 497526 - DNA, 178 bp, Homo sapiens
cgttcccctgaagttatattcttatcctaccaggcttcggcataatctcccatattgtaacttactactccgtcacaacaaagaaccatttgtctccatcggtatggtctgagctatgatatcaattgccttcctagggttcatcgtgtgagcacaccatatatcgacagcaggaata

SEQ ID NO: 497527 - DNA, 125 bp, Homo sapiens
atatgtatgtcttccgtgttacaaatgtgcttataagtactttttgtctaaaattgttatatttaaagaatgtgaattgaaataaatgttttgattgttttcagatccaaaaaatagtaaacatt

SEQ ID NO: 497528 - DNA, 255 bp, Homo sapiens
gccgtgggtcaaaaaggttagtttcctggttcgttgtcagattggtggtaataaaggaacaaggtcacccttttgtcagggttcctgaattgggggaggaaaataactggggcctttgcctttggaatggggtgggtgccaaaaaagtcaaggtcctgggggtgtttgcttgcctggttttgttaaccaagggtggtgtggtttaaatgagaaagtgaaactttaggaaggtttgagaagccctttttcctccca

SEQ ID NO: 497529 - DNA, 131 bp, Homo sapiens
ctaggtctcgccaactggtccaggacgatgacatgctgtattggcacaagcacggggatggactggaacgacccccgtccccatggaggtacggatccctgctggacacagacatgctcatgtcggaactt

SEQ ID NO: 497530 - DNA, 1590 bp, Homo sapiens
  misc_feature (270)..(270): n is a, c, g, or t
  misc_feature (725)..(725): n is a, c, g, or t
  misc_feature (933)..(933): n is a, c, g, or t
  misc_feature (1062)..(1062): n is a, c, g, or t
  misc_feature (1458)..(1458): n is a, c, g, or t
attgctccctggtatctcggagctgcgtcatactgaggaggacccacacgctgtcttgcgagttcagcaggtcacttcctagagcatctgtccaccctggtcacgacaagcactaattggtcgacatggaagaccgtcgcctgggactgttcatcagcataggagattagcataaagaggcgtggaaggtatccgaagaagagtacaagggagaaagtaaataaagttgctctccgcttcgctccgccgtccccgattcccggatcaggncgccttatccctcattacacttcctggccgtacttcgtatctcgaatgtcgcagaagtagttggcgtgattagctacaaataggacaggccttcgtgggcgacccgtgggaggaaacgtcgcgcgtaggatatacgcgcaacgcgcgtaagtgtttgatccatgtccagtggatcgcgcatgtacatagcaattaggtcgctcgttatccgtggactctcccatgggtaaatccaatcctacttcatgggcgttcgcggtacgaacccacccacgaggcccacaattgtttagcaccctagggaacccactcccgtttgtgccccatggaaccatcggcggtaaacaggggaatggaactaaaacacgacaggctatcttcacaattgctactgaagagggagtcgaagatacccgagatcagaccaattcttgtatggagcctcgccattggancaagggaacctaccagggggaaagctcgaagatcccctcgacttggcagaggcgactcgagcaaggccccctaggttatgcatagtgtatctactgcacgagttattcccccccgaggcaaattggtacccccagtatagtacgattacccgaaaaagggagccgcacattcaaagcaacgttgagccgagagagagttaaatagcgntggggaataagtgccgcaccgcattgtcgcgatgtgcgagagagaagagattggggagaagattagtaatctcgggacaagagaggtgacggattacatgatatggaacgcccgcagaacacgtaagtntgtagcggccatatgccaaaagggcgatagggagtaaaaccggtatatggcgacataacagtactaatcaagagacgcgtgtgggattaacgacaataaagatatcggttaaggttcaaagaagagggtggttggagtaaagttagggatacaagtataatatatgatgagcgctatctatataaattttgccgcttattctacgtgtgggtatagcacacggatcaattaacttactatagatacacaaagtggacgggggtagcgtacgagggtacacacccagaatgtaacgaaagtacccaactgtacccggccaagcgaaacagtcaccccgatcaacaacaacaaaaagaatactcaacacagacaactctacagcggcgaagtgaaggnccacagcacatatcatatacaaacgatataccagaacgacacgcgaacataggtgcgcgcacccaagcaacaacccaagtacaggagctgaactgaccagcggccacggcgaacacttagaatggagtgcac

SEQ ID NO: 497531 - DNA, 195 bp, Homo sapiens
  misc_feature (41)..(41): n is a, c, g, or t
  misc_feature (66)..(66): n is a, c, g, or t
  misc_feature (111)..(111): n is a, c, g, or t
  misc_feature (137)..(137): n is a, c, g, or t
gctggggaaagggaagagagtggctcagctgcaggtaagcnaggctagaaaagccaaggccaaagntggaggggagaggacagtcagcatgtccagcctggggtctgggtntagggttatcccttctccctgtggcnatcccatctcgtccatgagcctaggtcttggagccttgtgttggaggctgagccactc

SEQ ID NO: 497532 - DNA, 388 bp, Homo sapiens
ctctggctattgctgctgcactgtccacctggtcttggctcctgtacagcctcttcgggcagccccagcctttccagctcccacctcctggcatagcccccaagaaacatcagacccaggggccaggcagttaagaagggctagagagagggcactgaggctttctgggaggtgtgggagtttcccacagcagcttatcacgcccctacagtgaagcaactcaggtgtcatctcactggatcccacagttgccataggagggatgtgttgttgcctagtttacatagtgaaccggtttcacaaatgagtaaactgagccccagagaagatgaatgcttttctcatagattgcactgccagtgagtatgggcaggaggggtctctatat

SEQ ID NO: 497533 - DNA, 156 bp, Homo sapiens
  misc_feature (67)..(67): n is a, c, g, or t
tcatttggaagatcatgaacattttccaagtgacagtacgtgatgtacaagatcatgcatggctcanagatgattcgaaagtgtaagacaggccagtggattttaatgtattaacaatataagagtgcattaagttttcggagtcgcgcttgtcgt

SEQ ID NO: 497534 - DNA, 611 bp, Homo sapiens
  misc_feature (37)..(37): n is a, c, g, or t
ctaatttgtactttgtagagacggggtttcaccatgntggccaggcctgtctcgaacttccgacctcaggcgatccgcccgcctcggctcccaaagtgccgggattacaggcgtgagcaagcaggcatggccgtatgataaaatctgattgagtattctgtatggcgtggtaactggaggaaggagtgataaatagtatcatgatgtggctctttgcaagaaaggaattttgtaagaattaagagatagggtagtaaggtcgtgagagaacaaaacacagaataagatagtctaaggttgtgactgtgcttacgacattgcagtaatttctaagaaaaaaatctgcatagagaactaatcaagattcaggagatgttccctgcagaagtaaattacgtcctgactcaaagcctccagtttgttggtttatgttattttgggaagacagagtctgtgttctggtcgccaaggcaggagtgaagggggggttgatctttgtgtaattgaaacctcccgccttccgggattcaggggatttcaagttgagctcccgagaagtggggattaaaggtgttgccaccaattcaagaaatggggaataaagaaagggg

SEQ ID NO: 497535 - DNA, 685 bp, Homo sapiens
gcgcagccaccgccgtccgggctgcagccgcacgcggagcccggcggctactcggggccggaggacattatgccagtggacaatattaccaggcagaaccaattctacgatacccaggtcatcaagacaggaaaacgagtcaggctacgagaggagaccactggaaatggagcaggccggacaggccgtatcgtcgcagataatgaagagcagagatgaagcaaggagcacctcaccatgcattcctcccgacctgaaagacttctctaaaggcgtcaacgtccagatcaggcagcagattccagagtctgaaagaggccttagtgagagaaaaccggggacgggggtactgtttgaggactaccgagaggcataggagggggccgcgtcgtccgtcagctcctccctgactgaagaggtatgcacagcagtgcactcttgaactggatgaccctgggctctgccttatagaccatcctaactcaatcttgggactccttcacagcgttacgacgcggtgggctcctgacggattcgggagtaaagatcggcgtaagtcccgcgttcaccaaattggaccgggctttatgctataaccttgtgcgtcaccggagccctgttgtccgagctaatggcgcgtcagaccggggccggtgtattgcctttccgaagactcgcccgatca

SEQ ID NO: 497536 - DNA, 409 bp, Homo sapiens
gatggagacatacagccccacctctctggaacagtgaaagatgactggcgaggaaacacagtgacagcatggagaacaggagtcacagaaggacacagggagtagggctgtctctccacctccacacattaaggctaacagggacgcagacacattcaggtgcctttgcagaaagagatgccagaggctcttgaagtcacaaaggggaggagtgaagaaatcctgcatctcagtccctcacaagacagctgtctcaggcttttacaagctgtgagagacacatcagagacctgtggcacagtcgcatggacgcagactgagagtacctccctccttatacacctgagctcttcctcctacacatcacagtcacgaccacagatccgatgaccacaactactaaggtaac

SEQ ID NO: 497537 - DNA, 154 bp, Homo sapiens
gggcccccctcccccggaatgacttttcctataaggggttctcttggcatagtcacgaggcccccccccccccctcttcctgggtctcccgcaagttttaaactctaatatttaaagggcttttttttttcgcccaaaaaataataaaacgttt

SEQ ID NO: 497538 - DNA, 536 bp, Homo sapiens
  misc_feature (8)..(8): n is a, c, g, or t
  misc_feature (79)..(79): n is a, c, g, or t
  misc_feature (84)..(84): n is a, c, g, or t
  misc_feature (109)..(109): n is a, c, g, or t
  misc_feature (111)..(111): n is a, c, g, or t
  misc_feature (118)..(118): n is a, c, g, or t
  misc_feature (128)..(128): n is a, c, g, or t
  misc_feature (207)..(207): n is a, c, g, or t
  misc_feature (220)..(220): n is a, c, g, or t
  misc_feature (225)..(225): n is a, c, g, or t
  misc_feature (229)..(229): n is a, c, g, or t
  misc_feature (232)..(232): n is a, c, g, or t
  misc_feature (254)..(254): n is a, c, g, or t
  misc_feature (341)..(341): n is a, c, g, or t
  misc_feature (377)..(377): n is a, c, g, or t
  misc_feature (380)..(380): n is a, c, g, or t
  misc_feature (383)..(383): n is a, c, g, or t
  misc_feature (407)..(407): n is a, c, g, or t
  misc_feature (421)..(421): n is a, c, g, or t
  misc_feature (424)..(424): n is a, c, g, or t
  misc_feature (461)..(461): n is a, c, g, or t
  misc_feature (505)..(505): n is a, c, g, or t
aacaaatntccaataatcctgtaaataatatttctaaattttcccccaaattctaagcagagtatgtcaattggaagtnaactnatgcacgcttaactatctcaacaancnttgagtncaagaaattnaagagttcaaatctgaccaagaagttgatgtcggataagagaatcctctgccccccacctctaagtcgccagccctccnagagccacctgtngagcnaccngcncagatacatcaaacatggaganagccctcaaagtagaattataaagaagaacatgtccatgtcaacattattataaccctacattttgtgcataaagtgtaagtgtatnagcatatcaatattaaaaggcaagccagccgaattnggnatncatccaatccaaatccggcaactncaaacctccatgangcngcttacatgtctcgatcccactcaactatcttgggcngtcacacagtcacatggttcacacggcaggcatactcatctctntcagtcggggtcaatccagtatagtacaaga

SEQ ID NO: 497539 - DNA, 116 bp, Homo sapiens
ctgggataaggcgtgagccaccgtgagctgccttatttttccccttttatacatttgctttgcttaattctttcccctactgtgtgttctctctaacgtcccatatatatgggtat

SEQ ID NO: 497540 - DNA, 168 bp, Homo sapiens
gcggccgcctactactactaaattcgcggccgcgtcgacgccaaagtaagaggatcacttaaggttaggagtttgagaccagcctgggcaacatagtgaaattccatccctacaaaaataaaataaaataattttacaattagccagatgtgttggtgcacatttgta

SEQ ID NO: 497541 - DNA, 735 bp, Homo sapiens
tacggctaggtacgaggctgggtgtactcaatggcaaatgggtcccctttgagtggcgatgatatacatcctgtaggttcgtccagcattgatccttttgtgaggaccttcctggaagaaagaaaggtgagcaacatacagtgtgcagtatcaagttgcccgacgtgtatggtgtattccagtttaaagtggattacaaccggctaggctacacacacctgtactcttccacgtcaggtatccgatgcagtgcctactccagcgacagcgcagatatgagtcgcttcagtccccatcggcacttacaccactacatactgccagacgcctttctccatgtatgctggaggctcttcactcttcagactatcgtcttcttgcacatgaagagacaagagacgaagtccgactgagagggactaagagaccactcgtccgacacaggcgatgagatgacggggacaggcgacggggggttaattaggactctggtggttctctgtctcttgctctctgtttcaaagccgtgggaaaagtggcacaacatttacctctgtgggacgatgcaacagctgaagacgccgaaggggtagaggacgtctgcggactacacttttctactactaacacagaacgttttttccagcttctgaaacacatacaccaaccacacacacaccaacccttccagggccctttattgttcggtttcccaaaaagaggttctaaagtggc

SEQ ID NO: 497542 - DNA, 244 bp, Homo sapiens
gcccccaatgtagctggattacaggcacatgccaccatgcccaactaattttggtatgtttagtagagacggggtttcaccatgttcgccaggctggtcttgaactcctgacttcaggtgatccgcctgccttggcctcccaaagttctgggattacaggtgtgagccaccatgcccggctgtcaaaataggtgtatggttgtgttttttttttttggaaagggaggttggctctggggggcca

SEQ ID NO: 497543 - DNA, 233 bp, Homo sapiens
ttcttgattgtactgcctgcctttcttttcctttttttctttcgagacagtctcactgtgtcacctaggctgaagtgcaatggtgcgatctcagctcactgcaactccgcctcccgaattcaatgcgattctcagtgcctcagccctcctgatgtagctgactacatagcaggcttgttgccaaccacaccgcggctaaattttttgcattttttggtaacagacgaggtttc

SEQ ID NO: 497544 - DNA, 723 bp, Homo sapiens
  misc_feature (177)..(177): n is a, c, g, or t
  misc_feature (179)..(179): n is a, c, g, or t
  misc_feature (321)..(321): n is a, c, g, or t
  misc_feature (355)..(355): n is a, c, g, or t
  misc_feature (435)..(435): n is a, c, g, or t
  misc_feature (505)..(505): n is a, c, g, or t
  misc_feature (509)..(509): n is a, c, g, or t
gcccggggcgctctcacagaagtggcatgtttcacgttcagccagttgtggcggaatcgtgtggcttccaagagacttttacacgccgcctcggctcgctcgcgatcgccgtgcgttgctgtcgtgcgacggaatcgtctccgcggtcatgtgatgcataggcgctcgtttcctgangntcggcatccgtccgcgggcgcatctctccgtgcttcctgttgcttcttgtcgtcgcgagacgtaggactcatctggcgcaacgtcttgcgggctcgtggcgcaagccgccgcggtgcactgttgatgattagccattgcagnagaacactcttaaggaattgagcgcaggaaacangccgtagatgacgcaagcgagactaagggcgcggctacactcacgcgcaacagacgcatgctccggcgtggcattcaagncgatgtcacgatgcccttgagggatagacattaagataaactcaggagtgtatcctggatagatcctttntganctccccaggatttggcgagcaaatagtttgtaacacgaaacatagtattcaccacatctctttcttccgaactcacattcaatatttatcctcgaggttctcgtctggctgaagctttgaagtacgcccatgtggcgacgagggagtcccacttgaccgcgtttcttagtttccaccggaacgtcacttaagtcgccagggacagcaggggaaa

SEQ ID NO: 497545 - DNA, 198 bp, Homo sapiens
gtgattgacaatgagaatatttatttagagtttattaagcagagtggaaatggctttaggcctttgggtggcagcagagatactttcaataggttagagcaactgtagtatgcagtggtcaggataagttttgatcacgtatgaacattctgtagagcccactgtattctccgcagtgctcccttctgtcgtcttctc

SEQ ID NO: 497546 - DNA, 397 bp, Homo sapiens
gactgatgtctctcagccctcggcctgcaccccatgactcctctccccgaccctgcaccactcctgcagccacactgtcaccacaactgctccgggcatctcccacattaagaaccgttgcactggattctcttcccgtctccaggcgttccttcctcgcctccttcgaggctctgctcaaatgtcaccaatttccctatttaaaatgtaccccctctggccaggcgcagtggctcacgcctgttatcccagcactttgggaggccgaggcgggcggatcacgaagtcaggagatcgagaccatcctggccaacatggcgaaactccatctccactaaaaatacaaaaaattagccgggcctggtggcaggcgcctgtaatcccagctactcgggag

SEQ ID NO: 497547 - DNA, 1085 bp, Homo sapiens
tgaaaaagccagttgattaattggctcggggggcagggggctcaggagctctggggggggcgggttccgattcctcttcaccattcacaggcttcgtggctgcccaggattggcccgtggcccgtgcggattggctgccagtgcgcaggtcggggcggaccctgtgtctggcggactcagtgtgtctgatgctgctgaccgttggcccgagcatcctggtgagatggtgtgggccctgcaacataggagagtgtgcgccagggctctcccgctgggccgagaatcttccggtataagtggaccacccacagaaccctctttggcctgtacggagctggcccgggttcccaactgcccaacaggtcctcggcgaggggagaaatcagggtcctctgtgtgataccgctgagaaggggaatcggggggcgccttctccaaatgtatattggggcgcctcaacggcgctgtgaaggtgtcctgcgggtatatctaccctctttggactcagggggaaacttggtgacgccagtgtccccaggcaggagacccactccattttgcgcaagatttgccgccaaaaactttggcgcggggggcgggtctcccacttcccgaggcaaggagaaaggaagaaaccttgagtgtctctcccgaggggatttatgttgtatattatctatatttttgtaacagagatctcccacacattgtctgtttatatataccggcacaaaaacccccctttgtttttgtgtctccccccagagtgcttctcaaggggccggattttcaccccctaataaaaggggcccccaactagtgtgttccccccgtgggtcccccaagcctgtgctccccttgtgtgcccccctgttggcccccccgctctgtgggagagccgccagggtggttctcctctatttgggcgcgcgtggtgtctcgccggtttgccccccacagaggggttgtccccccgggggtgtgttccggcggccccctcctgcggcgctctagcgcggcgccccttcagcgggttgtggtggtcacccccacttgcgggggacaaccaccctgggttgttcgtg

SEQ ID NO: 497548 - DNA, 320 bp, Homo sapiens
caggatcgacctctagacggactccccttgaatgggcaagaaattagtggagattacacttaatacaaatgcttcctgatgatgaccaaatctagagaaaataaggtcaacaagggacagttatctggaacataacttatcagtatacctctgcagttattaagtgctgaactactgatcatcctaaagctaacccactgaaaagtcttctctaatccagttttacaaacggaaagtcttattaaccatttggtttgataaaatgtttgccgaagcaatactttacttaggcctgttttacttatctgtgcccattacaa

SEQ ID NO: 497549 - DNA, 599 bp, Homo sapiens
atgaaagcagtcctggactgtacaaccgcacgctgcggatcatgtactttcattggagtagctgctggtagcaacggattgactgtttttccagaggagctagtaatatggacgtactatcaatggaacattctttggcggacgggtgtagattctatcccaaagctggtcactgactatcagaataagaaatccaatctggatgcactggtgacccataccctgccttttgacacaatcagtgaggcatttgacctaatgaaccaaggactatctgattgaatgagaacctggctgcgtaatatattacctgattcgatgaaccaaggaaagccatgcgtttaaacaaatatttacatttaatatgggaacatacaagagctttaaatattatagactgtgtacctgctgtatatatgagatattccctatgttagatagtaataataactagtgtttatgcatagaggcatatcatctatagaaattgcttacaattagatcttgtgaagttggtggcgaatgaagagatcgtaactataactagaattggcatatgttcatgatacctgtagattgacgtatgaatacatgggttt

SEQ ID NO: 497550 - DNA, 399 bp, Homo sapiens
  misc_feature (6)..(6): n is a, c, g, or t
  misc_feature (41)..(41): n is a, c, g, or t
  misc_feature (48)..(48): n is a, c, g, or t
  misc_feature (89)..(89): n is a, c, g, or t
  misc_feature (97)..(97): n is a, c, g, or t
  misc_feature (147)..(147): n is a, c, g, or t
aaattnatcctcaagtttgaatccccaactaagggcagccnaggcccnaaaaaacccactaagtcaagttcattcctgataatttaaanaattcaanatgaacctgtcgcagtggctcacatctgtaatcgcagcacttttgggagnacctaaggtgggtggatcacttgaggtcaggagttcgagaccagcctggccaacatggcgaaaacccatctctactaaaaataaaaaaatcagtcgggtatggtggcaagtgcctgtagtcctagctacttgggaggctgatgggggagaattgcttgaatctaggagttggaggttgcagtgagccaagattgcaccactgcactccagcctgggtgacagagcaagactccatctcaatttaaaataatt

SEQ ID NO: 497551 - DNA, 250 bp, Homo sapiens
gatcgacaagggaatggaattagtacccttgggttccaccttcatgacctaattacctcccaaagtctcccctcctaataccatcaccttggggttaaaatttcagcgtgtgaatttggagggcagacacaagcattcagtccatgacactgttcatttatttaacaaatagttttctatgcctactgtgtactcagagctgtgctagatgctgggggctccatagtgagaagaacaaacatcgtcgacg

SEQ ID NO: 497552 - DNA, 241 bp, Homo sapiens
accggtctgttgatttcatcgatcctttcttctgcttcatggaatctgctgttgaatacctccattgaatttaggatagttcagttacagtatttaccacatcttagactgtctattgggtactattttatcctttctatctcttagtcagcgttcttagttggttatagcctggttctttggccttcagtgaacatctttatcaccatgatcttagattctctgtcaggtaaatcacata

SEQ ID NO: 497553 - DNA, 238 bp, Homo sapiens
aagcagccagatataccgagaaagaaatatacaaagacagggatagccagatcacagccaatgagaagactttcgaggatgcccagaaatcaatctcacagcattacagcaaaccccgagtcacaccggtagaaggatcatgcctgatcatacccagaaataaaagatgtgaatcaaatccatgatgctcagagatgaatctatgactcagaacccagaaccccaagagacacgcagt

SEQ ID NO: 497554 - DNA, 482 bp, Homo sapiens
cgattctgactcatagtgattcccattgaggaggacaagtgattctatttagaaacagaccatcctttttaaggcaaaagtgctttaacatctttgactgaaaaacatatatggatccaggaagaatctccctgtaaaatcttctagcttaattatccgggaaggctcccacctggctcccacattccctcaaggcggggccaccactcttatgtgaaagttggtggagatcacatttagcctacgcgttatgcagggggttcagatggacaccacacagcttccctgacacagaagctgattaccctaggagggaagaggtctaccacgtggggtcgggtcctggctggatctgagagctcccatcagcctcttttatttcttctggggctggaatttccaatgggcttggtacagctgattctgtgtatcacggggccttctgattcactctgatcaaccagctggtttttactcacaag

SEQ ID NO: 497555 - DNA, 354 bp, Homo sapiens
  misc_feature (196)..(196): n is a, c, g, or t
ccagaaaaaaatctttcaggaaagttctccccggcagaattttttttccttgttaaaaatcaggaatataggccgggtgcggtggctcacacctggaatcccagcactttgggaggctgaggcgggcggaacacctgaggtcaggtgttcgagaccagccaggccaaaatggtgaaaccccgtctctactaaaaanacaaaaaaaaatgagccgggcatggtagcaggtgtctgttatcccagttaggaggctgaggcaaaagaatctcttgaacctgagaggcggaggttgcagtgagccaagatcgcgccattgcactccagcctgggggacaagagtgagacttagtctca

SEQ ID NO: 497556 - DNA, 173 bp, Homo sapiens
gtgtgtgcttggtctccacactggccagcagtaagggccaccaactcaatttctagcacagcttgtacaagatgtggggaccacatgttctcaaagatctctggtggttctgaggattccctgtaaagagagaagtgaagtttcacctagagaatatagggacgagatgtgag

SEQ ID NO: 497557 - DNA, 492 bp, Homo sapiens
  misc_feature (492)..(492): n is a, c, g, or t
tgtacctatgtgaaagcgacgtctaggtgggaggatctcttgacgcctgggaggcgaggttgcatgtgatgctgagatcacgccactgcactccagcctgtgtgtgacagaagactgaaaccctgtctcaaaaataaaaaaacccacagccggggtgcgctggctaatacttatattctcagcccttcaggagggttgggaggtggttcacttgtggccaggatttcacgacctccctacccaccttggtgaacccccatctctactacaaatacaaaataaaatttagctaggtggcgcgcttgtattcccagctatgtgggaggctgaggcttgagattcgcttgaccccaagaggagccgtgctcctgtgagcgagatcaggccactgcactccagcctgcttgacagagccagaccctgtctcaaacaaacaaaaacacacaagttctggcccccgtggcacatgccgggacccccgggacttgggan

SEQ ID NO: 497558 - DNA, 513 bp, Homo sapiens
  misc_feature (362)..(362): n is a, c, g, or t
ccacgcgtcgcggacgcgtgggtcgacccacgcgtcggacccacgcgtcggggaaatccagctagcggcagtattctgtacagtagacacaagaattatgtagatgcttcttagaagaagaatctcatagtacatgttaatcctgtggcatccagtaaacattgtactatacgatgctattcacgaggtatcggtcttgcgtggctctcgtaaaagccctctggcctacgagagaagagagtgataaccagggcagtgaacagcatcacgtaggatactagtaacggacaacttcatcggtggaatcgataccttggatggtgatgcactgagtattcgaggcgtgattgggtgcaccctgnagcctgttcacggaggcggtatgcctttcacgcgggcgcgaccgaggaacctggggaggggttatcccataccatcgcaacgaaagccgcctcaagacgctgcagatacatcaggcccacagaaatcaccttgtgcacagctggtcctgat

SEQ ID NO: 497559 - DNA, 374 bp, Homo sapiens
gacaaattaaatctgtaaacagaacaaagacagaattccagtctgcagggcaacgtcgatgaatctcaaagcgaggtaagagctggaagatcaggctgggtgtggtggctgatggctgtaatcccagcactttgggaggccaaggcgggcagattgcttgagctcgggagttcgaaggccagcctgagctacatggcgaaaccccttctctaccagaaatacaattagctgggcctggtggtgcacacctgtggtcacagctactcgggaggctgaggcatgagaatcgcttgagcctgggaggcggaggttgtagtgagatgggatcatgccactgcactgcagccgtgggtgacagagcgagacctagtctc

SEQ ID NO: 497560 - DNA, 199 bp, Homo sapiens
tcacatcaatggcctggctggaactggcttccacggacccaggatcataggcctccctcagagccgggccgggtccctgagacatcagtaggaacgacagcgtccgcctggctgtgctgatgtttacacagacaccacctggctgattaactctgaacagtgtgaaagtgacgcagaaggctagtggccccaatgttca

SEQ ID NO: 497561 - DNA, 610 bp, Homo sapiens
  misc_feature (12)..(12): n is a, c, g, or t
  misc_feature (71)..(71): n is a, c, g, or t
  misc_feature (97)..(97): n is a, c, g, or t
  misc_feature (101)..(101): n is a, c, g, or t
  misc_feature (103)..(103): n is a, c, g, or t
  misc_feature (106)..(106): n is a, c, g, or t
  misc_feature (126)..(127): n is a, c, g, or t
  misc_feature (135)..(135): n is a, c, g, or t
  misc_feature (166)..(166): n is a, c, g, or t
  misc_feature (188)..(189): n is a, c, g, or t
  misc_feature (294)..(294): n is a, c, g, or t
  misc_feature (332)..(332): n is a, c, g, or t
  misc_feature (364)..(364): n is a, c, g, or t
  misc_feature (371)..(371): n is a, c, g, or t
  misc_feature (378)..(378): n is a, c, g, or t
  misc_feature (390)..(390): n is a, c, g, or t
  misc_feature (400)..(400): n is a, c, g, or t
  misc_feature (409)..(409): n is a, c, g, or t
  misc_feature (428)..(428): n is a, c, g, or t
  misc_feature (431)..(431): n is a, c, g, or t
  misc_feature (439)..(439): n is a, c, g, or t
  misc_feature (442)..(442): n is a, c, g, or t
  misc_feature (445)..(445): n is a, c, g, or t
  misc_feature (460)..(460): n is a, c, g, or t
  misc_feature (484)..(484): n is a, c, g, or t
  misc_feature (526)..(526): n is a, c, g, or t
  misc_feature (533)..(533): n is a, c, g, or t
  misc_feature (555)..(555): n is a, c, g, or t
gtgcagtttgtntcttgatttgtgtctccttctcagaaagtgtgcatatatctgcatgggaggtgaatgtntcagcattaaactctttgggaacgtntgtntnatngacttccagagctgaaaagnntggtcgcntgttcacccagggttctgtgcagcatttggngactctgtcacttactggcgtnntctcatgcaacacacataactggttcaggaccacggatagatagtcttctgcacagggcattctttttgcttcaggatgtttacaacatttgctgcccacttttnctaggtttcttgagacctctacaagagttggagttganacttggggtactttcttggtgtaacgaactantagcgcnttctggnatttgtactctncaagctgctnaaaaagctnacaattttgtttgattaanttntgaggctnttncanaagaggtttaaattnatcgaacactttggactagcattnatgaggatctgcagcggcacagcacttctctagagtggtttnatatgtnttggcaagtctcagcagcagcncgacagagtaatcaggatgccttcttgcatattcatacaaaaacatgccagggag

SEQ ID NO: 497562 - DNA, 118 bp, Homo sapiens
cacgatggcgcggtccagtgtgaaggtgtcagaccacgagatcctggcatgctccgtggaatggccgcgtgagaccgtagtgacctaaggatggggcagctcttctcagactacgtgg

SEQ ID NO: 497563 - DNA, 1076 bp, Homo sapiens
ggcgtgatgtctcagagatgagttctcagatcccagcacatggcgtccctcccgcttcgtggctcgaagacgcagtggcaggcatcgtgggaaggtgaaaagcttccctcatgggatgactcgcatccaaggccggtcctaggctcgagcagcaccttacctgggtatacgaaggctggctagtgacatcactagtcgtgacgggaaggtcagactgggacctgggattcctcaggatgaggcaacgatagggaagagtgtctggaggctagtgaaccatgttgttcgaagagagcatcgaattgagtgtgtggtgggcatggtgggctacggtggaaagggactccgaggggactccggaggggttcatagaaatatgtacttgagctagatcacagtacagggagactgatgtgacaaagaggcagttctttcataaaagaaaatctgcgacattaggagtcgtaaaaggagaggaaaaggccatgttgagggcaaaagttgagcatggaagagaaaatggagcacggatagagagtatggggtagaggaaagcggagcgtagttgatgaatggagatcttgagacgagccattgaagaggcaacgtgacctgatcaggagatcaatgcaggaagtacctatgggcgcgacaagcaacttggaatcgacgcaattgtctttacgtactcgccgacaccatgacacgacatgtgtggccacacgtggaactgggaggaaatcccatgcgtagaataggaggcatgggtaacgggttgcgctctgcagaaaggcctgggcacatgaaggcctgcgggggaggaacaggccttattcatgtcacgacgagaggacccctgatgacaccacaaacgtctgtaatggggcctgggtaccggaaaaatgtagtccaaagatccatcgggaaggttgagtccattacgcagcgagaaggcttcacagagaccgggggtctccccatcccatcttggggcctcccaatggtaaacgttggcttgcagccaaagaaacacggcgctgggccctggcctgagcgccgccgggggaatgggggcc

SEQ ID NO: 497564 - DNA, 113 bp, Homo sapiens
gaggatcccctaccagatttggagggaacgtgttcctgatccagtcccgtgaatgcatctgcagctgtcactcgtacaatttttgccttctactgtgcattgttttcctttgt

SEQ ID NO: 497565 - DNA, 307 bp, Homo sapiens
gaacttgaaaattcaaaagggacatttgggtaggttactgtacatcaatctaagcataaatggcagcttgttttcttgagcccctgtttaaattttgtttttatagaaattttttaaactgattggttcataaatggtcagttttgtacccagattgaacaatacagccctttgccaaaaatgagggtagcattgtttaaacattgtgtgttaacccctgttttttgtaattgggttgtggggcattttgccctacctggagttccagttttcaatctgtcagtaaataaagggtcctttaacttca

SEQ ID NO: 497566 - DNA, 200 bp, Homo sapiens
gagcagttggaccggatccagaggtacaaggccgcggccctgctcagactaggggcccgcaacgtgcccctgggctttggagagagctggaagaagcaccttagcggggaagttcgggaaaccatatttcatcaagctaatgggatttgtttgcagaagaaagaaagcattacactgttttatccacccccacaccagag

SEQ ID NO: 497567 - DNA, 744 bp, Homo sapiens
tgccactgcacgccagcctgggcaagagagtaagactctctctcaaaaaaaaaaaaaaaaaaaaaaaatttaaaatcccaattaattttctaactcttttatgggatgtatttaaaacacagtatacctatagtatacctatgtgtttataatgttgggtaaagtggtaacgtgacattttaatttatttagaagttactttaccccgtgccttttctccatttttattcaggggctacttgagaaaagcaaagggaaaaacataatagttatcaggtagtgtcacgggaaagaagagaggagggacaaaactgagcagcagaaattcgtatagactttttccggtttaatttctaaaagcccaattggagatgttcagggaggggtttggttttggcccttgggcctcatagaatggggttccatgaatggggctccaggggcttataacctcttgtaaaattctattctaattttggtccttttatttggtcccgggttaaattccagaaggacttctccaacatattttttttctttacccctctattattaaaaaagttactttaacttaagtttggaaccgctttataaacattcaagctcggtgaaaagtgtactcttaataaccttttacttacaagcaatggtttttccggaaattagattaaggtgaaaagcagaggggttccttggaatagggtcccccggttactcaaaggagtgggtaatgtggccggctag

SEQ ID NO: 497568 - DNA, 364 bp, Homo sapiens
gttgctgtttgggaaggggatgggcatccttttggggttttgcctgtggggacccttatcaacaacgtggaaagttagccaggccggggtgcccaatatattcgagttgcaggtgctggaaacgtgggttgtaacagtaggccgagtattcaacgttgtttttaacaaacgggtttttggcaaggcaggttgcaacccctggttgggcaaaaggcctaacagtggggggtggccccccaaggggggttggggtggccaaaaaatttggccccttccccccatgaagagttaggtgaaggtgccttttggttttggccaaaggtgatatccctgtgttttaataaaatggcccccccccccccga

SEQ ID NO: 497569 - DNA, 105 bp, Homo sapiens
ggttaggatgagtgggaagaagaaagagaggaagtaaagtttaattatgcctttttgggttagcgatggaggtaggattggtgctgtgggtgaaagagtatgatg

SEQ ID NO: 497570 - DNA, 824 bp, Homo sapiens
caccgtttttttgtcgccgcgcgccgtcgtgcactgcaaggggggaccgccggtgtcgacgcgcggccccctgtggggcgttctaacaagcgggaccactctgttttgtagagccattgtgccccacgagggtttccgcgttctcgcgcggaataaagtgccccccgaagaccagtctagtgttagccacctcccttgtcacgtgggccccctaatatgtgtcacacaaaggacctgtcaggccaatgatctttgtggcgccacccccataacaggcgaccccattcctttctgtgggtgctcaactaaaacgttctgtagaatagttcgccgctttataccccccgcagtcgccgttctagtcagcttttcaagtaaggctctcccggcggggcgttttcttagacactttttacgtcgtgctggcggccacaccggttagtttcactccacggcaccccccccagctcgcggggcactcgcccctctttcatcgttggtcgtgttgtacacagtagtagggccacccctccttgagttgtgcgcgcgccgctcttgtatggaacatgtacctcactgtctccgcggtacgtattttctttacctcaataacatcgctatcctctattatttatccccctatttaattgtaggtcacagaagagacatgaaaccccctgatggcaaaacacttttgatgtcaaaataacgtaacaaggaatcttttcacagcttccacgaattcttgccctcacttgtagaacgtttgtgcccctctctgcttaacaaattctaatcctttactcctcaacggcacaaaaaca

SEQ ID NO: 497571 - DNA, 961 bp, Homo sapiens
  misc_feature (159)..(159): n is a, c, g, or t
  misc_feature (447)..(447): n is a, c, g, or t
caagtaataccagcgaggcatggcaagccaaggaagaatacagtagcattgaacactttggccatttattctgcattcttctaggaatgcttatttcacttctaatctttatggatttcacactaatttcgatagctcagttgcctaaccttccttcantctcgcaaagctgtcttcatttaccttccataagagggtgggagtcgtgtgtgtgtgtgtgtatggaatgatttaataggaaaatatccttttaatgtgttagtgtgttaagagaatctctcttctctggctgtagttacaaagctgcataggttctgagtggtctgcctgtaactattgtcctataagtcctgttctttttagcgaactattcttcagcggtttaaaattttttttgcaggaacacatattatgttatgacagatacttcaggagataaaatttggntgttattttactgcatataacaaaacaaaactaaaaacaaaaatgtatactagtatacatattaattgcatgatctttaaaacacaagactactgtttagacttgaatttataatttgagaaatgtcttgggatttcaaacaacagctttagtagttagtttcattctggtcatgtgttttagaagaataaaatttctacaagttacgttaaactgtgtagcactaaaactcattaactttgttggaatttttggaattaaccctgcctttaatgtacatcttagtatttttcaaggtaaatgatgtctttttacatttacaatgttgtgagaaactaaacatatcctgtgtatgtaactgatcagccctttctcttctgtcagcggcacctttggcactgcttccatgagcaatgcccacaggattcgggcactccggctcctaaagtcttcccaacagtttagtggcagcttcagagctggcttccagccaagcaaggttcctcaaaagaaa

SEQ ID NO: 497572 - DNA, 738 bp, Homo sapiens
cgccgaggacgagtcgggcgagggcttccccctggagttcaagaaggaactgactgggcagcgactccgggagggagatgggcccgacgggcctggcgatgacggggcagggggcccagggcgaactggagcacaggctggtggtggcgggcgagaagaaggacgaggggccctacagggatggagcacttccgctggggcaggccggccaagggacaagcgctacggcgggttcatgaactccgagaagaggcagacgcccctggtgaagctgttcaaaacacgccatcatcaagaacggctaacagaagggcgaatgaaggcacagcgggggcccaggggctaacctcccccaggagggcgaacccaaaggcccttggctctcccctggcctggtggcggctcccaacctggggggtcgtgggagattatcaggctcttaaagctggctggagttaggaaataaaacctttcaaatttcacattcaactcttactttgaatggtaactgtgtgaattaagtaaaaatacgtaggcggtcaaaacacatcactcagcactctcacacacactcgaggggggggcccgacccaatcgcctatagtagtcgcatacaatccgggcggcgtttacacggtctgatggggaacccggggttccattattcccttgggaatccctttgccgtgcgtatacgagaggcgccgatgcttcttgcctgatgatgacatggctttg

SEQ ID NO: 497573 - DNA, 768 bp, Homo sapiens
cttggaacgatgtacgatacggtcatagtgaccattaaacctgatcctccaaaaaaaaaaaaaaaaaaaaaaaaaaaaaaaaaaaaaaaaaaaaaaaaaaaaaaaaaaaaaaaaaaaaaaaaaaaaaaaaaaaaaataacaaaaaaaaaaacataaatgaccctataaaaaaaaaatataattatgaggtataggcataataaaagaaactaaaaaaaaaaaagaacttttggtccagtttggcccatgtatatttaaaacaagataaattttttatggggaccgaaaatttgcacaatttggaaaatcccctttttgtgggcaggttttaaaatataggttgcctggattttaaaagaatgggttggaaaaaacctggggttcccaaattaaaaagggaataggaaaaaacccctttttaagagttgggacaaaaagaaaaaagcgccacacaatgcccttttcaaaaaattggaagacttttattggaatttaaaatttaaaaccttttatatttttgaaataacagggtaaattttttgaaaaacaggtttttttttaacaaattggccaagaaatgcaaaacccttataaaataaaaaaaattccacggtagggggggggggtttttttttcttttggaaaaaagcctccttattaagaaagggggcctctacgaaaaggggggatacctcttttaaggggggtgcctcaaagaagaacaaagcactaataattttttggggggaggggcgcaaacaacctgtg

SEQ ID NO: 497574 - DNA, 159 bp, Homo sapiens
tccaaattctgctccccacaaaggactttcccacggtgggagtggggctgttcagtggggctgtgggagtcttggacgccaccacagtagagccaggagccccctcccagttggccctgtggccgatgtcttaggtcctactctcagaagtgtctcctt

SEQ ID NO: 497575 - DNA, 562 bp, Homo sapiens
  misc_feature (542)..(542): n is a, c, g, or t
acctcagcataggcaggtaacaccgttaagtcaacaatttggaactgccttcttggatcactcagctgtgctttcatggctggactgactggaacacgtgtgcgaagacgagattgggggcccatggaaagtagtcgcgttcactgcttagtacactcctccagaattgtctttgctggtaggagataaactcgtacttcagccaaaagatcaggacaatatgacttgagtccatcaaggacacgaaacacctgagtagctgggcagcccttggtcagggtcgtaagccaggtagtgaataatgatctggcctagatatttaagggaactctaggaagaggcctaggtttttaaaatcctgtctctttgtcttaccataagaggctgagcctctcttcattttgtcttgaagggccacttgtgttttctgttctgggaacatcattcatttctctactgggttgttgatatatgcagtaatttctaggagctgtttaatgtttggaggtaattggtccttgtccatatatatgagatgtacnccaggtccagttatcttatt

SEQ ID NO: 497576 - DNA, 952 bp, Homo sapiens
gcttgtcttggcaagatggcggcgtacgacttgactactcgcatcgcgcactatgggatcggcatctagtctttccgcttctgaatactctctgtaaagggagatatataatgaaacggactaatagaaggtaaattggcccttcttagtgataccaacgtggtagacgtgtgctatggatgtatacaaaaagctttattctgatgatattcctcattgcttttgcagacgtagaccacagactccactgttggttgcacaaggtgaaagcaggttcgggcaagaaacagaagccaatggtgacagactgttggatgatccagacagtacaaggccatatgcgtcaaccaagggactgggtaggctgcgtcttttgagctaccctggccggagcaagcactggtatttagcggcaggaatttatttaggatacactctacggatatgcaaaattcccatgtagcgatagggtggaaaatacttcacggagcagtccagaatatcttgatttcctctaccaggtgctggttccgcagcctacgatagaaacgtgcttaaagttcactctgggagaaagcttggctctgaactcttaatgcggaaattgcatgcaggtcatggaaggacttacaggggtagagagacgtagactaataattctggaagtctccactcaggtctcttcaccagagaagtggtcctgcatggctctgttgtttctcactcacccaaggtgggataagataatggccttcgttataagcaaattttatgtcttgacagggtctcctctcgcatggatacgcagcatgaacacgatttcaaccggcggtacagctgtagcgttaccgggttcataaagacacaattgtgatgcacaactgggcacaccgtgtatagctacatgtgccatccatctatctcaccattgttacggcacaggttacacact

SEQ ID NO: 497577 - DNA, 349 bp, Homo sapiens
  misc_feature (43)..(43): n is a, c, g, or t
ggctcggaccgtgagactgccagaacctggttcgacagaacgngtagcgcttcatttcgcatcatctgccgcccagcttctacccttgagtgcatagccctcaggactgaacgctctcatgtacaatgacctgaagttccctcgttctgatcgtgcaccgcgacttctaggccgtccctgtcgccggtgatcgggttcgaggcattgcccgggagttggaacaagagggcttcagatatcttttctgccgtgtatctacgctgaaggccggctggtgtgcctcaatcccgtcacggtctgccgtgcatcctgattgccgccgaaggcgccggggactatacccatttgc

SEQ ID NO: 497578 - DNA, 648 bp, Homo sapiens
  misc_feature (128)..(128): n is a, c, g, or t
  misc_feature (288)..(288): n is a, c, g, or t
  misc_feature (311)..(311): n is a, c, g, or t
  misc_feature (313)..(313): n is a, c, g, or t
  misc_feature (342)..(342): n is a, c, g, or t
  misc_feature (354)..(354): n is a, c, g, or t
  misc_feature (360)..(360): n is a, c, g, or t
  misc_feature (547)..(547): n is a, c, g, or t
  misc_feature (573)..(573): n is a, c, g, or t
  misc_feature (587)..(587): n is a, c, g, or t
  misc_feature (590)..(590): n is a, c, g, or t
  misc_feature (594)..(594): n is a, c, g, or t
  misc_feature (598)..(598): n is a, c, g, or t
  misc_feature (617)..(617): n is a, c, g, or t
tttgcttggttcggggaaaatccaaattttggcaaggaaaaaggcaaggggactggccttgtctatcggggaaagtaggcacagggcaagcccatggtgacgattgttattatggggcagaagcttgntgagatgatccggtttttggcccccaggcttgtttttaaggggggaaaccttgagaagaccctcaaagttgacaaggcaaatgcccaggccgcagttctgtataaggtttttgatgccactggacagatgaacttgaccaaggtggttgattccagcccntttgcccttgaactgctgatatntnatgactgctttgtgctggacaacgggctntgtggcaagatntatatntggaaggggcgaaaaacgaataaaaaggaacggcaggcaccccttcaggtggccaagggtttcatcttgggcatgcagtacgccccgaacactcaggtggagattttgcctcagggccgtgagagtcccattttcaagcaatttttcaaggactggaaatgagggggggggttttcctgccccatgntcccctgcccccccccccctgcctgnttgtttttttgggngcntggncagngcaaaggggccccctgcanatgttcaataaaggagacaagggctttccca

SEQ ID NO: 497579 - DNA, 227 bp, Homo sapiens
cgggcatgtactcacaactaagtgccagctaacatcgcgtgagaacacataaacatatggagaggaacaacagacactggcgcttaccaccgggtgacgggtgcaatgagagagaggacccatggcaaataacaagatgcatactaggctaaatacatgggtaacaaaataatctgaataacaaccccgtgtgacataagttaactatttgtaacagacctgtacat

SEQ ID NO: 497580 - DNA, 126 bp, Homo sapiens
ccccaaaactgggggcaaggcaaaggacaggttttttcaggttaaaaaaaaaacgaaattttaaaacctttaaaaaaaacttataaattcggatcaaatttgggggaataaaaaattttagagcca

SEQ ID NO: 497581 - DNA, 1110 bp, Homo sapiens
gggaggagcagaacctgctacagcccagacttcctgccagccaaggctgctggtgcgctccgggtctggcctgggcttacgaagtttcagctcccgtgtgtgccattagactcgttgcacgcagctgtgttggatgacggaggctggacacccatgatctgggccacagagtacaagcacgtggacctcgtgaagctgctgctgtccaagggctctgacatcaacatccgagacaacgaggagaacatttgcctgcactgggcggcgttctccggctgcgtggacatagccgagatcctgctggctgccaagtgcgacctccacgccgtgaacatccacggagactcgccactgcacattgccgcccgggagaaccgctacgactgtgtcgtcctctttctttctcgggattcagatgtcaccttaaagaacaaggaaggagagacgcccctgcagtgtgcgagcctcaactctcaggtgtggagcgctctgcagatgagcaaggctctgcaggactcggcccccgacaggcccagccccgtggagaggatagtgagcagggacatcgctcgaggctacgagcgcatccccatcccctgtgtcaacgccgtggacagcgagccatgccccagcaactacaagtacgtctctcagaactgcgtgacgtcccccatgaacatcgacagaaatatcactcatctgcagtactgcgtgtgcatcgacgactgctcctccagcaactgcatgtgcggccagctcagcatgcgctgctggtacgacaagatgagggcggcctcgtgtgcgtgggctcatgtggtcagtgcctgctggtccgggtctgcaaaaacagtgcaggcgtcttgtgaccccagcgctgtcgtggcagcgtctgggaaggagttggaggtgagctgggtgtgacatgcagtggtgagtgcacagcgggcaccagcacccgagtcagggtcgtgagccgaggacatggctgcggattccctgggtgctgggtgtcctgatcctttgttgctgcctggatggtgtcgggggtgggcagcgtcagcctggcttggccccaggaggaggtgctgcttatgttgtgtgtatctggta

SEQ ID NO: 497582 - DNA, 2755 bp, Homo sapiens
agcggagagcctcgcggagggtgagcggccggcggcttcgaccttggagtcccaggctgtgtgggacttggcgggcgctaatattgacacctgctcagaagaccagaggaccccgttgatggaagcagccgaaaacaaccatctggaagcagtgaagtacctcatcaaggctggggccctggtggatcccaaggacgcagagggctctacgtgtttgcacctggctgccaagaaaggccactacgaagtggtccagtacctgctttcaaatggacagatggacgtcaactgtcaggatgacggaggctggacacccatgatctgggccacagagtacaagcacgtggacctcgtgaagctgctgctgtccaagggctctgacatcaacatccgagacaacgaggagaacatttgcctgcactgggcggcgttctccggctgcgtggacatagccgagatcctgctggctgccaagtgcgacctccacgccgtgaacatccacggagactcgccactgcacattgccgcccgggagaaccgctacgactgtgtcgtcctctttctttctcgggattcagatgtcaccttaaagaacaaggaaggagagacgcccctgcagtgtgcgagcctcaactctcaggtgtggagcgctctgcagatgagcaaggctctgcaggactcggcccccgacaggcccagccccgtggagaggatagtgagcagggacatcgctcgaggctacgagcgcatccccatcccctgtgtcaacgccgtggacagcgagccatgccccagcaactacaagtacgtctctcagaactgcgtgacgtcccccatgaacatcgacagaaatatcactcatctgcagtactgcgtgtgcatcgacgactgctcctccagcaactgcatgtgcggccagctcagcatgcgctgctggtacgacaaggatggccggctcctgccagagttcaacatggcggagcctcccttgatcttcgaatgcaaccacgcgtgctcctgctggaggaactgccgaaatcgcgtcgtacagaatggtctcagggcaaggctgcagctctaccggacgcgggacatgggctggggcgtgcggtccctgcaggacatcccaccaggcacctttgtctgcgagtatgttggggagctgatttcagactcagaagccgacgttcgagaggaagattcttacctctttgatctcgacaataaggacggggaggtttactgcatcgacgcgcggttctacgggaacgtcagccggttcatcaaccaccactgcgagcccaacctggtgcccgtgcgcgtgttcatggcccaccaggacctgcggttcccccggatcgccttcttcagcacccgcctgatcgaggccggcgagcagctcgggtttgactatggagagcgcttctgggacatcaaaggcaagctcttcagctgccgctgcggctcccccaagtgccggcactcgagcgcggcctggcccagcgtcaggccagcgcggcccaggaggcccaggaggacggcttgcccgacaccagctccgcggctgccgcgaccccctatgagacgccgccggccagcggggcgctcgggagccagggaccgccgcgtcgccgattagaggacgaggaggagagattccgcacgcaaccgaaagggtccttcggggctgcgccgccggcttcctggaggggtcggaggtgaggctgcagcccctgcgggcgggtgtggatgcctcccagccaccttcccagacctgcggcctcaccgcgggcccagtgcccaggctggagcgcacactttggtccgcgcgccagagacgctgggagtccgcactggcatcaccttctgagtttctgatgctgatttgtcgttgcgaagtttctcgtttcttcctctgacctccgaggtccccgctgcaccacggggttgctctgttctcctgtccggcccagactcttctgtgtggcgccgccgaagccaccgttagcgcgagctgctccgttcgccctgcccacggcctgcgtggctggggccgagtcccaggggccgcacggagggcacagtctcctgtcaggctcggagaggtcaggagaccgaccccaccactaactttggagaaaatgtgggtttgctttttaaaggaatcctatatctagtcctatatatcaaacctctaactgacgtttcttttcgaggaagtggcttggtgggtgcagcccccgccggttccgttgacgctggcaccttctgttgattttttaagccacatgctatgatgaataaactgatttattttctaccattactgaacattaggacaaacacaaaataaaaaacaaaacacagacaacggtgctgattctggtgtggtttctactcaccacgtgaaataaactatcaactgtataaagagaacaaagtgattttagaataaaatgcaggaaaaacttttttaaagatgttagtcttgtagcgtgaataaatttgccatcaccttttgtgtggtggcctggcaggtcatatacttttttttggcatatacctttttaaagactgtaattagtgcagtaacagtggggttttttttgtgcaactcttctaaaaacattcataatgcagtcatgtttatttttttctgttaaaatgtttttgacagttttaagagcagtcttttggctctgaccatttcttgttctgtttccaatgaaatcaataaaaaaaaagaagtacttta

SEQ ID NO: 497583 - DNA, 139 bp, Homo sapiens
cgcagaaccttttgaaacattagtggatgttgcagcgacagactgcaaaatggattcgtcatgaagtggtctgagaagtgccatggtctaatggagtctggtcttcacctctgtggtgcactcgaagcaagggactttg

SEQ ID NO: 497584 - DNA, 2592 bp, Homo sapiens
gggaggagcagaacctgctacagcccagacttcctgccagccaaggctgctggtgcgctccgggtctggcctgggcttacgaagtttcagctcccgtgtgtgccattagactcgttgcacgcagctgtgttggatgacggaggctggacacccatgatctgggccacagagtacaagcacgtggacctcgtgaagctgctgctgtccaagggctctgacatcaacatccgagacaacgaggagaacatttgcctgcactgggcggcgttctccggctgcgtggacatagccgagatcctgctggctgccaagtgcgacctccacgccgtgaacatccacggagactcgccactgcacattgccgcccgggagaaccgctacgactgtgtcgtcctctttctttctcgggattcagatgtcaccttaaagaacaaggaaggagagacgcccctgcagtgtgcgagcctcaactctcaggtgtggagcgctctgcagatgagcaaggctctgcaggactcggcccccgacaggcccagccccgtggagaggatagtgagcagggacatcgctcgaggctacgagcgcatccccatcccctgtgtcaacgccgtggacagcgagccatgccccagcaactacaagtacgtctctcagaactgcgtgacgtcccccatgaacatcgacagaaatatcactcatctgcagtactgcgtgtgcatcgacgactgctcctccagcaactgcatgtgcggccagctcagcatgcgctgctggtacgacaaggatggccggctcctgccagagttcaacatggcggagcctcccttgatcttcgaatgcaaccacgcgtgctcctgctggaggaactgccgaaatcgcgtcgtacagaatggtctcagggcaaggctgcagctctaccggacgcgggacatgggctggggcgtgcggtccctgcaggacatcccaccaggcacctttgtctgcgagtatgttggggagctgatttcagactcagaagccgacgttcgagaggaagattcttacctctttgatctcgacaataaggacggggaggtttactgcatcgacgcgcggttctacgggaacgtcagccggttcatcaaccaccactgcgagcccaacctggtgcccgtgcgcgtgttcatggcccaccaggacctgcggttcccccggatcgccttcttcagcacccgcctgatcgaggccggcgagcagctcgggtttgactatggagagcgcttctgggacatcaaaggcaagctcttcagctgccgctgcggctcccccaagtgccggcactcgagcgcggcctggcccagcgtcaggccagcgcggcccaggaggcccaggaggacggcttgcccgacaccagctccgcggctgccgcgaccccctatgagacgccgccggccagcggggcgctcgggagccagggaccgccgcgtcgccgattagaggacgaggaggagagattccgcacgcaaccgaaagggtccttcggggctgcgccgccggcttcctggaggggtcggaggtgaggctgcagcccctgcgggcgggtgtggatgcctcccagccaccttcccagacctgcggcctcaccgcgggcccagtgcccaggctggagcgcacactttggtccgcgcgccagagacgctgggagtccgcactggcatcaccttctgagtttctgatgctgatttgtcgttgcgaagtttctcgtttcttcctctgacctccgaggtccccgctgcaccacggggttgctctgttctcctgtccggcccagactcttctgtgtggcgccgccgaagccaccgttagcgcgagctgctccgttcgccctgcccacggcctgcgtggctggggccgagtcccaggggccgcacggagggcacagtctcctgtcaggctcggagaggtcaggagaccgaccccaccactaactttggagaaaatgtgggtttgctttttaaaggaatcctatatctagtcctatatatcaaacctctaactgacgtttcttttcgaggaagtggcttggtgggtgcagcccccgccggttccgttgacgctggcaccttctgttgattttttaagccacatgctatgatgaataaactgatttattttctaccattactgaacattaggacaaacacaaaataaaaaacaaaacacagacaacggtgctgattctggtgtggtttctactcaccacgtgaaataaactatcaactgtataaagagaacaaagtgattttagaataaaatgcaggaaaaacttttttaaagatgttagtcttgtagcgtgaataaatttgccatcaccttttgtgtggtggcctggcaggtcatatacttttttttggcatatacctttttaaagactgtaattagtgcagtaacagtggggttttttttgtgcaactcttctaaaaacattcataatgcagtcatgtttatttttttctgttaaaatgtttttgacagttttaagagcagtcttttggctctgaccatttcttgttctgtttccaatgaaatcaataaaaaaaaagaagtacttta

SEQ ID NO: 497585 - DNA, 2869 bp, Homo sapiens
  misc_feature (2765)..(2765): n is a, c, g, or t
agcggagagcctcgcggagggtgagcggccggcggcttcgaccttggagtcccaggctgtgtgggacttggcgggcgctaatattgacacctgctcagaagaccagaggaccccgttgatggaagcagccgaaaacaaccatctggaagcagtgaagtacctcatcaaggctggggccctggtggatcccaaggacgcagagggctctacgtgtttgcacctggctgccaagaaaggccactacgaagtggtccagtacctgctttcaaatggacagatggacgtcaactgtcaggatgacggaggctggacacccatgatctgggccacagagtacaagcacgtggacctcgtgaagctgctgctgtccaagggctctgacatcaacatccgagacaacgaggagaacatttgcctgcactgggcggcgttctccggctgcgtggacatagccgagatcctgctggctgccaagtgcgacctccacgccgtgaacatccacggagactcgccactgcacattgccgcccgggagaaccgctacgactgtgtcgtcctctttctttctcgggattcagatgtcaccttaaagaacaaggaaggagagacgcccctgcagtgtgcgagcctcaactctcaggtgtggagcgctctgcagatgagcaaggctctgcaggactcggcccccgacaggcccagccccgtggagaggatagtgagcagggacatcgctcgaggctacgagcgcatccccatcccctgtgtcaacgccgtggacagcgagccatgccccagcaactacaagtacgtctctcagaactgcgtgacgtcccccatgaacatcgacagaaatatcactcatctgcagtactgcgtgtgcatcgacgactgctcctccagcaactgcatgtgcggccagctcagcatgcgctgctggtacgacaaggatggccggctcctgccagagttcaacatggcggagcctcccttgatcttcgaatgcaaccacgcgtgctcctgctggaggaactgccgaaatcgcgtcgtacagaatggtctcagggcaaggctgcagctctaccggacgcgggacatgggctggggcgtgcggtccctgcaggacatcccaccaggcacctttgtctgcgagtatgttggggagctgatttcagactcagaagccgacgttcgagaggaagattcttacctctttgatctcgacaataaggacggggaggtttactgcatcgacgcgcggttctacgggaacgtcagccggttcatcaaccaccactgcgagcccaacctggtgcccgtgcgcgtgttcatggcccaccaggacctgcggttcccccggatcgccttcttcagcacccgcctgatcgaggccggcgagcagctcgggtttgactatggagagcgcttctgggacatcaaaggcaagctcttcagctgccgctgcggctcccccaagtgccggcactcgagcgcggcctggcccagcgtcaggccagcgcggcccaggaggcccaggaggacggcttgcccgacaccagctccgcggctgccgcgaccccctatgagacgccgccggccagcggggcgctcgggagccagggaccgccgcgtcgccgattagaggacgaggaggagagattccgcacgcaaccgaaagggtccttcggggctgcgccgccggcttcctggaggggtcggaggtgaggctgcagcccctgcgggcgggtgtggatgcctcccagccaccttcccagacctgcggcctcaccgcgggcccagtgcccaggctggagcgcacactttggtccgcgcgccagagacgctgggagtccgcactggcatcaccttctgagtttctgatgctgatttgtcgttgcgaagtttctcgtttcttcctctgacctccgaggtccccgctgcaccacggggttgctctgttctcctgtccggcccagactcttctgtgtggcgccgccgaagccaccgttagcgcgagctgctccgttcgccctgcccacggcctgcgtggctggggccgagtcccaggggccgcacggagggcacagtctcctgtcaggctcggagaggtcaggagaccgaccccaccactaactttggagaaaatgtgggtttgctttttaaaggaatcctatatctagtcctatatatcaaacctctaactgacgtttcttttcgaggaagtggcttggtgggtgcagcccccgccggttccgttgacgctggcaccttctgttgattttttaagccacatgctatgatgaataaactgatttattttctaccattactgaacattaggacaaacacaaaataaaaaacaaaacacagacaacggtgctgattctggtgtggtttctactcaccacgtgaaataaactatcaactgtataaagagaacaaagtgattttagaataaaatgcaggaaaaacttttttaaagatgttagtcttgtagcgtgaataaatttgccatcaccttttgtgtggtggcctggcaggtcatatacttttttttggcatatacctttttaaagactgtaattagtgcagtaacagtggggttttttttgtgcaactcttctaaaaacattcataatgcagtcatgtttatttttttctgttaaaatgtttttgacagttttaagagcagtcttttggctctgaccatttcttgttctgtttccaatgaaatcaataaaaaaaaagaagtactttaaaaaaaacanaaaacacacacaaacaaagaacacacaaacacccgcaacccacaaggacaacaaaacgaacaacgccaaaacataaccacacaccccgccggcagccacagggc

SEQ ID NO: 497586 - DNA, 510 bp, Homo sapiens
ggtcaccgacggggtgggaaggtgttgtaaaagaacaaacaggccaggcgcagtggctcacacctgtaatcccagcgctttgggaggccgaggcgggtggatcacgaggtcaggagttcaagaccagcctggttaacatggtgaaaccccatctctactaaaaatacaaaaattagccgggcttggtggtggtcgtctctaatcccgctcctcggaaggctgaggcagataattgctcgaacctgggaggcggaggttgcagtgagccactgcactccagcctgggcaacagagcgagactccgtctcaaaaaaaaaaaggacaaacaaaccaagtaaggggatatcattaaacaatggaggactggctcccttgtcccctggccagggcctgcagggaacgtcaagggtcatgtcccttttaaacaaagccaagtcatcatggccctccctgggtttgagacgctagagtccgtcaaggaagccgggttacctatgggcaccgcctagg

SEQ ID NO: 497587 - DNA, 165 bp, Homo sapiens
caagatgttactgtctcagcaactatgtacaaaatgtcacattattttctttcttcttttaagaacatattataaaaagaatactttcttggttgggctttaatcctgtgtgtgatactagtaggaacatgagatgtgacaatttctcatccttgggagcaattt

SEQ ID NO: 497588 - DNA, 86 bp, Homo sapiens
ttttaaaccccccccccccttcccggcccccccccctgggggactttaagggggggttgggttgttttaaaaacaacaaaagggca

SEQ ID NO: 497589 - DNA, 2446 bp, Homo sapiens
gggaggagcagaacctgctacagcccagacttcctgccagccaaggctgctggtgcgctccgggtctggcctgggcttacgaagtttcagctcccgtgtgtgccattagactcgttgcacgcagctgtgttggatgacggaggctggacacccatgatctgggccacagagtacaagcacgtggacctcgtgaagctgctgctgtccaagggctctgacatcaacatccgagacaacgaggagaacatttgcctgcactgggcggcgttctccggctgcgtggacatagccgagatcctgctggctgccaagtgcgagcctcaactctcaggtgtggagcgctctgcagatgagcaaggctctgcaggactcggcccccgacaggcccagccccgtggagaggatagtgagcagggacatcgctcgaggctacgagcgcatccccatcccctgtgtcaacgccgtggacagcgagccatgccccagcaactacaagtacgtctctcagaactgcgtgacgtcccccatgaacatcgacagaaatatcactcatctgcagtactgcgtgtgcatcgacgactgctcctccagcaactgcatgtgcggccagctcagcatgcgctgctggtacgacaaggatggccggctcctgccagagttcaacatggcggagcctcccttgatcttcgaatgcaaccacgcgtgctcctgctggaggaactgccgaaatcgcgtcgtacagaatggtctcagggcaaggctgcagctctaccggacgcgggacatgggctggggcgtgcggtccctgcaggacatcccaccaggcacctttgtctgcgagtatgttggggagctgatttcagactcagaagccgacgttcgagaggaagattcttacctctttgatctcgacaataaggacggggaggtttactgcatcgacgcgcggttctacgggaacgtcagccggttcatcaaccaccactgcgagcccaacctggtgcccgtgcgcgtgttcatggcccaccaggacctgcggttcccccggatcgccttcttcagcacccgcctgatcgaggccggcgagcagctcgggtttgactatggagagcgcttctgggacatcaaaggcaagctcttcagctgccgctgcggctcccccaagtgccggcactcgagcgcggcctggcccagcgtcaggccagcgcggcccaggaggcccaggaggacggcttgcccgacaccagctccgcggctgccgcgaccccctatgagacgccgccggccagcggggcgctcgggagccagggaccgccgcgtcgccgattagaggacgaggaggagagattccgcacgcaaccgaaagggtccttcggggctgcgccgccggcttcctggaggggtcggaggtgaggctgcagcccctgcgggcgggtgtggatgcctcccagccaccttcccagacctgcggcctcaccgcgggcccagtgcccaggctggagcgcacactttggtccgcgcgccagagacgctgggagtccgcactggcatcaccttctgagtttctgatgctgatttgtcgttgcgaagtttctcgtttcttcctctgacctccgaggtccccgctgcaccacggggttgctctgttctcctgtccggcccagactcttctgtgtggcgccgccgaagccaccgttagcgcgagctgctccgttcgccctgcccacggcctgcgtggctggggccgagtcccaggggccgcacggagggcacagtctcctgtcaggctcggagaggtcaggagaccgaccccaccactaactttggagaaaatgtgggtttgctttttaaaggaatcctatatctagtcctatatatcaaacctctaactgacgtttcttttcgaggaagtggcttggtgggtgcagcccccgccggttccgttgacgctggcaccttctgttgattttttaagccacatgctatgatgaataaactgatttattttctaccattactgaacattaggacaaacacaaaataaaaaacaaaacacagacaacggtgctgattctggtgtggtttctactcaccacgtgaaataaactatcaactgtataaagagaacaaagtgattttagaataaaatgcaggaaaaacttttttaaagatgttagtcttgtagcgtgaataaatttgccatcaccttttgtgtggtggcctggcaggtcatatacttttttttggcatatacctttttaaagactgtaattagtgcagtaacagtggggttttttttgtgcaactcttctaaaaacattcataatgcagtcatgtttatttttttctgttaaaatgtttttgacagttttaagagcagtcttttggctctgaccatttcttgttctgtttccaatgaaatcaataaaaaaaaagaagtacttta

SEQ ID NO: 497590 - DNA, 1389 bp, Homo sapiens
gttctatgattcggcgagcggcctgcccattctccctactatgcctagaaggaataatactatctgctgtttcattatagctactctcataaccctcaatcattctcactccctcttagccaatattgtagcacataataagaacagtactagatctaaagaacgacgtgcgaaggcaggggtgggcctcagcccgtactaagtctccaatctgcgcgaaggagatatgggccgagagtacgtacagtagagccgtaaagcgcgtagctccacaatgctaagagagctaactcggtgcgcgcaaccaatctatacttacctaccactgaacaatgaacttgtcgcaagagagagagcgagcgagtgaagtgtgtgacatcaagcaacacacacaacccagcaggcgcgtgagagtgtgaccctcaggcgatgcagtccccacacgtagcgtactctgctcgagaggagagcgcaaagtcgaagcaagcaagccgtaatataagactgctggccccgaagcgccgtataagacctggcggagagccagcacacataaaaaggaaaaccccccgcacgttacccgttcacataaaacataaaaacataaaaccatagaaacatacacaataaacagcagcacgaagcagaggaaagccctcggggacaaaggcgcacaaaacgcgcgcagcgttgggaagtaccgccagagagaaaaccacaaaactgaagtacgaccggaaaagaacaaaaaaagatgacgtagaaaagcctacatacgtggaagttgacgctgacaaatccatggcgcgcgttgaaagagagaagtactgaaccattagaagtgtaagtgaaaggcgcaacattatgccgagcgaggggacaagagaaggaaacaacctgaagaggcgcaaggaactatgtagcaagtgcaataacttgagcgtacaccaggaaaaaaaagccgaccacacttttcaattaaggcacacaacacaccgttagggagacttcaaacccgagtgacaagagcaccagggaacaggacagaggccaacaacccaaaagggccacgacaaaccctaggcccttcagagaaaccgagcaaaaggagcgaagccacattaacagctagaagcaccccgaaaatagagcgtaaaccaaacacaccgataaaacagtgcagcgggggcacacacacacgtagtgagcagagcacgtatgaaagctgcccacattccagagccacgatgacaaattaataaaccacggctgccagcgaccaaagacaacgccagtaacaggatgctagcaacataaacacaccaagctaccctgcaaaatcaacatgacaagaaccaagcaccaatctaaggccctcaacagacatgg

SEQ ID NO: 497591 - DNA, 127 bp, Homo sapiens
catccgaggtgcagaagtacatcgactacgtgcgagacgtcgccgcggccacgagctgctgctcgagcagcgtctggacatcagccgttgggtgcccgaggccttcggcacgtccgacgcggtgatt

SEQ ID NO: 497592 - DNA, 169 bp, Homo sapiens
agctcatgttgcgtgtgtgacatggtgcttgtgatgcgcgggaccactattctgtttgtgtaggtaccgtgtatcactgggcctcttggcaacagtacgagacatgtgcttcctaggtgcccaatagggtttcgcagtatggttaacaccacatgtgcatgctgtggcg

SEQ ID NO: 497593 - DNA, 2755 bp, Homo sapiens
agcggagagcctcgcggagggtgagcggccggcggcttcgaccttggagtcccaggctgtgtgggacttggcgggcgctaatattgacacctgctcagaagaccagaggaccccgttgatggaagcagccgaaaacaaccatctggaagcagtgaagtacctcatcaaggctggggccctggtggatcccaaggacgcagagggctctacgtgtttgcacctggctgccaagaaaggccactacgaagtggtccagtacctgctttcaaatggacagatggacgtcaactgtcaggatgacggaggctggacacccatgatctgggccacagagtacaagcacgtggacctcgtgaagctgctgctgtccaagggctctgacatcaacatccgagacaacgaggagaacatttgcctgcactgggcggcgttctccggctgcgtggacatagccgagatcctgctggctgccaagtgcgacctccacgccgtgaacatccacggagactcgccactgcacattgccgcccgggagaaccgctacgactgtgtcgtcctctttctttctcgggattcagatgtcaccttaaagaacaaggaaggagagacgcccctgcagtgtgcgagcctcaactctcaggtgtggagcgctctgcagatgagcaaggctctgcaggactcggcccccgacaggcccagccccgtggagaggatagtgagcagggacatcgctcgaggctacgagcgcatccccatcccctgtgtcaacgccgtggacagcgagccatgccccagcaactacaagtacgtctctcagaactgcgtgacgtcccccatgaacatcgacagaaatatcactcatctgcagtactgcgtgtgcatcgacgactgctcctccagcaactgcatgtgcggccagctcagcatgcgctgctggtacgacaaggatggccggctcctgccagagttcaacatggcggagcctcccttgatcttcgaatgcaaccacgcgtgctcctgctggaggaactgccgaaatcgcgtcgtacagaatggtctcagggcaaggctgcagctctaccggacgcgggacatgggctggggcgtgcggtccctgcaggacatcccaccaggcacctttgtctgcgagtatgttggggagctgatttcagactcagaagccgacgttcgagaggaagattcttacctctttgatctcgacaataaggacggggaggtttactgcatcgacgcgcggttctacgggaacgtcagccggttcatcaaccaccactgcgagcccaacctggtgcccgtgcgcgtgttcatggcccaccaggacctgcggttcccccggatcgccttcttcagcacccgcctgatcgaggccggcgagcagctcgggtttgactatggagagcgcttctgggacatcaaaggcaagctcttcagctgccgctgcggctcccccaagtgccggcactcgagcgcggcctggcccagcgtcaggccagcgcggcccaggaggcccaggaggacggcttgcccgacaccagctccgcggctgccgcgaccccctatgagacgccgccggccagcggggcgctcgggagccagggaccgccgcgtcgccgattagaggacgaggaggagagattccgcacgcaaccgaaagggtccttcggggctgcgccgccggcttcctggaggggtcggaggtgaggctgcagcccctgcgggcgggtgtggatgcctcccagccaccttcccagacctgcggcctcaccgcgggcccagtgcccaggctggagcgcacactttggtccgcgcgccagagacgctgggagtccgcactggcatcaccttctgagtttctgatgctgatttgtcgttgcgaagtttctcgtttcttcctctgacctccgaggtccccgctgcaccacggggttgctctgttctcctgtccggcccagactcttctgtgtggcgccgccgaagccaccgttagcgcgagctgctccgttcgccctgcccacggcctgcgtggctggggccgagtcccaggggccgcacggagggcacagtctcctgtcaggctcggagaggtcaggagaccgaccccaccactaactttggagaaaatgtgggtttgctttttaaaggaatcctatatctagtcctatatatcaaacctctaactgacgtttcttttcgaggaagtggcttggtgggtgcagcccccgccggttccgttgacgctggcaccttctgttgattttttaagccacatgctatgatgaataaactgatttattttctaccattactgaacattaggacaaacacaaaataaaaaacaaaacacagacaacggtgctgattctggtgtggtttctactcaccacgtgaaataaactatcaactgtataaagagaacaaagtgattttagaataaaatgcaggaaaaacttttttaaagatgttagtcttgtagcgtgaataaatttgccatcaccttttgtgtggtggcctggcaggtcatatacttttttttggcatatacctttttaaagactgtaattagtgcagtaacagtggggttttttttgtgcaactcttctaaaaacattcataatgcagtacagaatatagttatgctgcagagaactgatttgtgacagtctgtaaaacgcgagtcttttgctctgaccagtttcagtgataagcggggggagaaacaatgaataaataaccc

SEQ ID NO: 497594 - DNA, 2370 bp, Homo sapiens
agcggagagcctcgcggagggtgagcggccggcggcttcgaccttggagtcccaggctgtgtgggacttggcgggcgctaatattgacacctgctcagaagaccagaggaccccgttgatggaagcagccgaaaacaaccatctggaagcagtgaagtacctcatcaaggctggggccctggtggatcccaaggacgcagagggctctacgtgtttgcacctggctgccaagaaaggccactacgaagtggtccagtacctgctttcaaatggacagatggacgtcaactgtcaggatgacggaggctggacacccatgatctgggccacagagtacaagcacgtggacctcgtgaagctgctgctgtccaagggctctgacatcaacatccgagacaacgaggagaacatttgcctgcactgggcggcgttctccggctgcgtggacatagccgagatcctgctggctgccaagtgcgacctccacgccgtgaacatccacggagactcgccactgcacattgccgcccgggagaaccgctacgactgtgtcgtcctctttctttctcgggattcagatgtcaccttaaagaacaaggaaggagagacgcccctgcagtgtgcgagcctcaactctcaggtgtggagcgctctgcagatgagcaaggctctgcaggactcggcccccgacaggcccagccccgtggagaggatagtgagcagggacatcgctcgaggctacgagcgcatccccatcccctgtgtcaacgccgtggacagcgagccatgccccagcaactacaagtacgtctctcagaactgcgtgacgtcccccatgaacatcgacagaaatatcactcatctgcagtactgcgtgtgcatcgacgactgctcctccagcaactgcatgtgcggccagctcagcatgcgctgctggtacgacaaggatggccggctcctgccagagttcaacatggcggagcctcccttgatcttcgaatgcaaccacgcgtgctcctgctggaggaactgccgaaatcgcgtcgtacagaatggtctcagggcaaggctgcagctctaccggacgcgggacatgggctggggcgtgcggtccctgcaggacatcccaccaggcacctttgtctgcgagtatgttggggagctgatttcagactcagaagccgacgttcgagaggaagattcttacctctttgatctcgacaataaggacggggaggtttactgcatcgacgcgcggttctacgggaacgtcagccggttcatcaaccaccactgcgagcccaacctggtgcccgtgcgcgtgttcatggcccaccaggacctgcggttcccccggatcgccttcttcagcacccgcctgatcgaggccggcgagcagctcgggtttgactatggagagcgcttctgggacatcaaaggcaagctcttcagctgccgctgcggctcccccaagtgccggcactcgagcgcggcctggcccagcgtcaggccagcgcggcccaggaggcccaggaggacggcttgcccgacaccagctccgcggctgccgcgaccccctatgagacgccgccggccagcggggcgctcgggagccagggaccgccgcgtcgccgattagaggacgaggaggagagattccgcacgcaaccgaaagggtccttcggggctgcgccgccggcttcctggaggggtcggaggtgaggctgcagcccctgcgggcgggtgtggatgcctcccagccaccttcccagacctgcggcctcaccgcgggcccagtgcccaggctggagcgcacactttggtccgcgcgccagagacgctgggagtccgcactggcatcaccttctgagtttctgatgctgatttgtcgttgcgaagtttctcgtttcttcctctgacctccgaggtccccgctgcaccacggggttgctctgttctcctgtccggcccagactcttctgtgtggcgccgccgaagccaccgttagcgcgagctgctccgttcgccctgcccacggcctgcgtggctggggccgagtcccaggggccgcacggagggcacagtctcctgtcaggctcggagaggtcaggagaccgaccccaccactaactttggagaaaatgtgggtttgctttttaaaggaatcctatatctagtcctatatatcaaacctctaactgacgtttcttttcgaggaagtggcttggtgggtgcagcccccgccggttccgttgacgctggcaccttctgttgattttttaagccacatgctatgatgaataaactgatttattttctaccattactgaacattaggacaaacacaaaataaaaaacaaaacacagaca

SEQ ID NO: 497595 - DNA, 1837 bp, Homo sapiens
ctccagccgtccttctctggactgtggtctttatctggttctggtcgggcagagattgtgtcacagactttgacaccccacccatcttagaagctcggagcagcgctgtgtgctctgccagacgagctgcccctggtgaaagctgggcctggcccctccagtcggaagcccctcactctccatttgctgcttatcaagaccttcgtgtgtgcgccgttgctagttccggaattgcattctgcacgaggaggggtcgcctatagattcttagtccatcagaccccgaagcagaggccaaagtccacgccaggacggggaggtttactgcatcgacgcgcggttctacgggaacgtcagccggttcatcaaccaccactgcgagcccaacctggtgcccgtgcgcgtgttcatggcccaccaggacctgcggttcccccggatcgccttcttcagcacccgcctgatcgaggccggcgagcagctcgggtttgactatggagagcgcttctgggacatcaaaggcaagctcttcagctgccgctgcggctcccccaagtgccggcactcgagcgcggcctggcccagcgtcaggccagcgcggcccaggaggcccaggaggacggcttgcccgacaccagctccgcggctgccgcgaccccctatgagacgccgccggccagcggggcgctcgggagccagggaccgccgcgtcgccgattagaggacgaggaggagagattccgcacgcaaccgaaagggtccttcggggctgcgccgccggcttcctggaggggtcggaggtgaggctgcagcccctgcgggcgggtgtggatgcctcccagccaccttcccagacctgcggcctcaccgcgggcccagtgcccaggctggagcgcacactttggtccgcgcgccagagacgctgggagtccgcactggcatcaccttctgagtttctgatgctgatttgtcgttgcgaagtttctcgtttcttcctctgacctccgaggtccccgctgcaccacggggttgctctgttctcctgtccggcccagactcttctgtgtggcgccgccgaagccaccgttagcgcgagctgctccgttcgccctgcccacggcctgcgtggctggggccgagtcccaggggccgcacggagggcacagtctcctgtcaggctcggagaggtcaggagaccgaccccaccactaactttggagaaaatgtgggtttgctttttaaaggaatcctatatctagtcctatatatcaaacctctaactgacgtttcttttcgaggaagtggcttggtgggtgcagcccccgccggttccgttgacgctggcaccttctgttgattttttaagccacatgctatgatgaataaactgatttattttctaccattactgaacattaggacaaacacaaaataaaaaacaaaacacagacaacggtgctgattctggtgtggtttctactcaccacgtgaaataaactatcaactgtataaagagaacaaagtgattttagaataaaatgcaggaaaaacttttttaaagatgttagtcttgtagcgtgaataaatttgccatcaccttttgtgtggtggcctggcaggtcatatacttttttttggcatatacctttttaaagactgtaattagtgcagtaacagtggggttttttttgtgcaactcttctaaaaacattcataatgcagtcatgtttatttttttctgttaaaatgtttttgacagttttaagagcagtcttttggctctgaccatttcttgttctgtttccaatgaaatcaataaaaaaaaagaagtacttta

SEQ ID NO: 497596 - DNA, 1638 bp, Homo sapiens
atttcggcggctgtggttgtggggggatgtgtgtcgtgcacgctgtgtgtgtgtgtgtgtgtgtgtgtgtgtgtgtgtgttcgtgtgaccctcctcgtgcccgcctcggtgcgctctcgcttcctctgcgtccacacgatgccccttctgtgctcctcccaagagaatcagcacgtatcatacatccacgacgcggccgtgcatgcggagaggacgggatgagcgagcatcagtgagcttggatgtactcgtagagcagcatcatgtgtgactatcaaaagtcaaacttcgtgctgtctgcctattgtaagatccacaccaagtgccggcactcgagcgcggcctggcccagagatagggccaacagacagggcgcaggagggcccaggaggactggctcttggcaccgaaaccatgttccgaagagtggcgacacccctagtgcacacgcctagcggaccagcggtggcagctccgagagaagccacggggtccagccgtcgtctgaccgagttagacagggaaacgaggaggagagattccgcacgcaaccgaaagggtccttcggggctgcgccgccggcttcctggaggggtcggaggtgaggctgcagcccctgcgggcgggtgtggatgcctcccagccaccttcccagacctgcggcctcaccgcgggcccagtgcccaggctggagcgcacactttggtccgcgcgccagagacgctgggagtccgcactggcatcaccttctgagtttctgatgctgatttgtcgttgcgaagtttctcgtttcttcctctgacctccgaggtccccgctgcaccacggggttgctctgttctcctgtccggcccagactcttctgtgtggcgccgccgaagccaccgttagcgcgagctgctccgttcgccctgcccacggcctgcgtggctggggccgagtcccaggggccgcacggagggcacagtctcctgtcaggctcggagaggtcaggagaccgaccccaccactaactttggagaaaatgtgggtttgctttttaaaggaatcctatatctagtcctatatatcaaacctctaactgacgtttcttttcgaggaagtggcttggtgggtgcagcccccgccggttccgttgacgctggcaccttctgttgattttttaagccacatgctatgatgaataaactgatttattttctaccattactgaacattaggacaaacacaaaataaaaaacaaaacacagacaacggtgctgattctggtgtggtttctactcaccacgtgaaataaactatcaactgtataaagagaacaaagtgattttagaataaaatgcaggaaaaacttttttaaagatgttagtcttgtagcgtgaataaatttgccatcaccttttgtgtggtggcctggcaggtcatatacttttttttggcatatacctttttaaagactgtaattagtgcagtaacagtggggttttttttgtgcaactcttctaaaaacattcataatgcagtcatgtttatttttttctgttaaaatgtttttgacagttttaagagcagtcttttggctctgaccatttcttgttctgtttccaatgaaatcaataaaaaaaaagaagtacttta

SEQ ID NO: 497597 - DNA, 1509 bp, Homo sapiens
  misc_feature (516)..(516): n is a, c, g, or t
  misc_feature (518)..(518): n is a, c, g, or t
  misc_feature (560)..(560): n is a, c, g, or t
  misc_feature (565)..(565): n is a, c, g, or t
  misc_feature (608)..(608): n is a, c, g, or t
  misc_feature (694)..(694): n is a, c, g, or t
  misc_feature (784)..(784): n is a, c, g, or t
  misc_feature (950)..(950): n is a, c, g, or t
ttttttttttggtatttttaaaaaccagaaacatttatggcatgtgacataactcgtggacatttctataagaagtgaacgtggatgtgcgtgcaacagttgtgccctcttggggtttaagggtggtggtctcctttcagggaatctccagtgccgtgaactcgtggggatatcacaattttaagggtgcctctcattctcgagaccaggtttccggggggtatttctcggctcttttatacgccttgtggcactctccaggtatattactttctcctcttggcggcttgtggcaggggtacgcccactttttggcccacgggctcgacttctcgtggagagggtgcgtatgaggccttatagagagcccacagacgagggcggggcgggcacacacagcggtggtggcgtatcttaatagtgtggcgagagcgcctttttcacaaaagcgaaagatgaagcgtgtctcccacttttcgggtccattcttcgacattgctgtggcgccctctcaanancctataagggggcctctcccataatattatattctctatagncacanctccttctataggacctataaggcgcgtgtataataactctcnaaactcctctcgtgagatctcgagcgggggtgagggccatttctaaaactcttcaaaaaatatagagcccgcgtgggaagctgcgngggcgcccacagctgtgggagagagaacgagtatagccccacaaaaaagacaaattctctcatatattggagagtctccacctctatagncacatttacattttcataacatattcaaacgattttaccttaaatataaggggggggggcatcccttttataaacctccctttcagcgggccccttttatttcaaccaaaaccacaaatagaaaacaaccgctttcggtggagatttaccttccgcggtgcgcaantacaagtggaacccccttcgtggggccacattaatataatgtggagtttataattctccccaacaatagtaaggccagagagagacccaaagcggagaaacccccctcttttgagaaccctttgtgcgcaggaagggagggagagctccagagataatataagtatgtctcagcaggggggtttaacaccaattttagggaaaagatagggcaggggggggcgcaccattattgggacacatatatatttcttacaaatagagggagcgggaatgatatcacccaccaacacctttttttttttatttattataaaatagaggccctcctttgaccacgctattaaaaaaatcttctccctgagggagaaccacaacatgtgttaggggcgaacatctctccgcgggaaagatctactaacacccaccatcattcgttgggtggccaccaagaacacccctaatatataaaaaccccgcggggtgatttagaataatgagaacgggagaaatcacgcccgcgatgatgcaagaaacaaataactacgtcgctgtataaa

SEQ ID NO: 497598 - DNA, 2490 bp, Homo sapiens
agcggagagcctcgcggagggtgagcggccggcggcttcgaccttggagtcccaggctgtgtgggacttggcgggcgctaatattgacacctgctcagaagaccagaggaccccgttgatggaagcagccgaaaacaaccatctggaagcagtgaagtacctcatcaaggctggggccctggtggatcccaaggacgcagagggctctacgtgtttgcacctggctgccaagaaaggccactacgaagtggtccagtacctgctttcaaatggacagatggacgtcaactgtcaggatgacggaggctggacacccatgatctgggccacagagtacaagcacgtggacctcgtgaagctgctgctgtccaagggctctgacatcaacatccgagacaacgaggagaacatttgcctgcactgggcggcgttctccggctgcgtggacatagccgagatcctgctggctgccaagtgcgacctccacgccgtgaacatccacggagactcgccactgcacattgccgcccgggagaaccgctacgactgtgtcgtcctctttctttctcgggattcagatgtcaccttaaagaacaaggaaggagagacgcccctgcagtgtgcgagcctcaactctcaggtgtggagcgctctgcagatgagcaaggctctgcaggactcggcccccgacaggcccagccccgtggagaggatagtgagcagggacatcgctcgaggctacgagcgcatccccatcccctgtgtcaacgccgtggacagcgagccatgccccagcaactacaagtacgtctctcagaactgcgtgacgtcccccatgaacatcgacagaaatatcactcatctgcagtactgcgtgtgcatcgacgactgctcctccagcaactgcatgtgcggccagctcagcatgcgctgctggtacgacaaggatggccggctcctgccagagttcaacatggcggagcctcccttgatcttcgaatgcaaccacgcgtgctcctgctggaggaactgccgaaatcgcgtcgtacagaatggtctcagggcaaggctgcagctctaccggacgcgggacatgggctggggcgtgcggtccctgcaggacatcccaccaggcacctttgtctgcgagtatgttggggagctgatttcagactcagaagccgacgttcgagaggaagattcttacctctttgatctcgacaataaggacggggaggtttactgcatcgacgcgcggttctacgggaacgtcagccggttcatcaaccaccactgcgagcccaacctggtgcccgtgcgcgtgttcatggcccaccaggacctgcggttcccccggatcgccttcttcagcacccgcctgatcgaggccggcgagcagctcgggtttgactatggagagcgcttctgggacatcaaaggcaagctcttcagctgccgctgcggctcccccaagtgccggcactcgagcgcggcctggcccatgctgtcatgtgccatgctgcgtgcccatgtgagggcccacgtgacgtgacgcggcctttgccccagaacagccagggctcacagcctggcttgcctgcgcagaccacccccatattgatgactgccggcccgggccaagcagtgtgggccgcctctgggagaagcccaagtggtaccgccggccagcgggatccgcactcgactttacgaccgggaactgcatgggactgtgacggaaacaattcccccgcaaccagccaaaccactggacaacgtggggtcccactctctgctgggagccatgcaggcctgccctagagacttattcccttggggcacgcgcgggttctcgggcacgctgtcgactcgtgctaggccaaggcgcccacttggccagtgtgcccgagccctcagttaggcacttggccgcattcgcccaatgacaccaacccttttcaccccaaagaaccctttggcgggggcccttccaccaccggctcgcgaggcgcaaaacggtgtaggcccaccacggagcccatggcgaagcgccagccaaccgaaccctcatccggaggatcccaggaccggccagacccaccaacggaacaagccataggcgcgaacgggtcccccaggccacccacgggagccagataccaacccaatccttcctcgtgcacggcttctcacccttggaaagtggcccgattggaccatctcactggcacgcacgatcatagcgcccggaactatccgctatcatccagtaccaggcattaccgtcccgtattccccccttcccttgcgcaaccgccatttcacctggacatggggagtcacaccccactggtccagtcggcaaacccccaaccagtggtgcgagccttattgagctcatccactgtgattatccatctccacgtgtgagataccatgggtggccccccaaacgaacacctccatctctccattggataggcttgagcg

SEQ ID NO: 497599 - DNA, 628 bp, Homo sapiens
cgtgttggtcgtagtgtcatgccaaatgcaacgccgcacgtagtcatatttcttgaagcaaaaccaggtgcgggcgtgacaaacagatctgcgtctccggtctcgtcgcttagctcgctctgtgtagtagttgtagtatatccactctctcaaagcatccaggcgccccctggcttcgggttctatgtaaactccttcatgcgccgctgccctgataacatccaccaccgcagaataagccacacccagccaacctacacattcgttctgcgagtcacacacgggaggagcgggaagagctggaagaaccatgttttttttttttattccaaaagattatccaaaacctcaaaatgaagatctattaagtgaacgcgctcccctccggtggcgtggtcaaactctacagccaaagaacagataatggcatttgtaagatgttgcacaatggcttccaaaaggcaaactgccctcacgtccaagtggacgtaaaggctaaacccttcagggtgaatctcctctataaacattccagcaccttcaaccatgcccaaataattttcatctcgccaccttatcaatatgtctagtcgacgcggccgcgaatttagtagtagtaggcggccgc

SEQ ID NO: 497600 - DNA, 117 bp, Homo sapiens
ctccgttcttcgttactttcttgtggctcccgatttgtcccggaatgtgtgtgtgtgtgtgtgtgtgtttgtgtctgtctgtcgtgtctgtccgtgagtgctgtatgtctcgtaagc

SEQ ID NO: 497601 - DNA, 459 bp, Homo sapiens
  misc_feature (37)..(37): n is a, c, g, or t
  misc_feature (59)..(59): n is a, c, g, or t
  misc_feature (118)..(118): n is a, c, g, or t
  misc_feature (269)..(269): n is a, c, g, or t
  misc_feature (334)..(334): n is a, c, g, or t
  misc_feature (394)..(394): n is a, c, g, or t
  misc_feature (403)..(403): n is a, c, g, or t
  misc_feature (409)..(409): n is a, c, g, or t
  misc_feature (419)..(419): n is a, c, g, or t
  misc_feature (430)..(430): n is a, c, g, or t
  misc_feature (435)..(435): n is a, c, g, or t
  misc_feature (439)..(439): n is a, c, g, or t
gtttcttaaaagccccaagccccaaaacccttatttnaaagaggcatcctctgtgcccnaaagatcacctaaacccaagatgggaatagtggaaggagcgccgggactgtgttggganagtgagggccgggacagagactacagtaacccgacacgaaagcagatagcaagtcctaggggtgatccagaatcacccaaagacctccagcccctggatgatgccttttccatccctggacttattccctgggacgttggttccggtcccnggtagccttgttaaccctcagaggccttcaagtcctttccactttctcacccaattgcccaccanttaataagcttagcttctcttgccaccttcaaggggcttggatatgtggaatagtgaacntggggccantgtcangtttgtcacntcacccaaacntgacntaantaaaaaaatttatttatgtt

SEQ ID NO: 497602 - DNA, 346 bp, Homo sapiens
tactatacgactcgagtctcgtactgtgggtagcacaacctagggtcagttttgcaggtggtaaagccatttaccaagatagttgtaggtcaagaagggcagatttattagagaaattgtgaaaatatgttgcagtgggcagctcagcagagaaggggctacctgcaaagaggcaaggactggaggaaagttttatagggtcctgctgaagggtgctacgtgctggaatgaggtcattgtgcccgtaggttgtttgtgattagctgtctctaacaattgttcacacaataattgttcattattgttctcaacttggggctctccccaacctggggacccttcctta

SEQ ID NO: 497603 - DNA, 1019 bp, Homo sapiens
tgttgctattttttgtttttgagggagagaggagggaggagagcaacaagaccacggagtgtgagcagacgcgcacacgcgctttttttgttctctttggagcgcacctcgttcgcgtgtctccgcgtgttgtcgctgacccggcttctaggtggtagagacctttcacgcccctgttcctgagttcggtcttcttccggggactggtgttggacacgcttttggggccgggccatcacaagcgccggtgttgcgtggccgcccccttgtcccgttcggtcgcgtgttaccaggagcctgtacacattggagtttcccttggggcctctcataccctctggactcgccgggtttggcatgaggtcatttggcttccccgtcccttccccgggggcgaaccccgtgaccccgggacacctggggtttgctctgctgctccccagtcccacccagggtcctggccagcctgccccctttccctggacagggctcgtcgcgagcattggctcccgcgtgcttgggcgataatcccaattgcccagaattcaagtctacctccagtacaccatcccggaggctgggtaatgtccatgcctcttgcccttttcatgtgtctagcgggccagtgccccagaggcgcccaccaccccccccagagcccctctgatggaccagctctctaccactccacaccccacctgtggccccacgccaggagccccgcctggccatccagtatttattgccgtccgtccagttccgtgcccatgggccacataggccatggcgccgtgttctcccccggctcttctagtgcccaccaacccccggcaggccttccctgacacccagcccaggaaccaaaaaagggaccaccagtgcacaaccttgctgagaaccgtctcctgtgcctcccccgccccatccccggttttcgtgttgtgtctgcccggctcaggcagaggcgcctgtccctgcttgttttttgaccggggaatataatgcccctgaaggagcca

SEQ ID NO: 497604 - DNA, 858 bp, Homo sapiens
aatgcatttaattgttttgattcttgtagcttgacaaaacttacgtcatagactgtccaagttcttcacgccatctcttgcacagcttgtaacagaagagtctgttggtgttacttttggtaaaggagctgttagcagactttcctgccagtgtcagtaaaatcctattgtatgaagtcctgtcggttattccttgagtatctgaaaagaataccgaataagtagtaccattactatgaggttattctctaagatttgcaaaagataagagaatggaaattgcagtcagactaaattactaaagtacaagttctggatacacaatatttttcgttcattttaaaactttttttgaactaataatggctttgaaagaagaggcttaattggggggtggtaactaaaatctaaagaaatgattgagcttgagggtctctgtttggtaatgaatacactcatttaggcttaatagtaaggcatgctaggaacggttagcttgtacattgatgtagcttcgtgttcaatatgtaacgtgttacttgggtctagttttaccgtcaactttgaacagataagtttgcgctgcatgctggacatgcctcagaaccatgattaggccgtagctatgatctgtgtggaagcattggatctgtagagtcactgttggaataaagtgcttactatgagaagtaccccccagccttttgaagaacggggggcttgttacacgggacgcgtatgtagtggcccgtacctaacaggcagtgggttccgggaaaactggggattgactttggcgtcagagctccttttggtcctactttcaaccatattgggcgtcaaaaaccaccccacttc

SEQ ID NO: 497605 - DNA, 380 bp, Homo sapiens
gctcgaccagaaacaagcaaaacagaacaatagattgttgaaatattcacacaagagttgtaagaccacatttttttaaaaaattaaaagataaggctgggtgtggtggctcacgcctgtaatcccagcactttgggaggccgagatgggcggatcacctggggtcgggagttcgagaccagcctgaccaacatggagaagccccatctctactaaagatacataattagccgggtgtgatggcgcatgctagtaatcccagctacttggcaggctgaggcgggagaatcgcttgaacctgggaggtggaggttgcggtgggccgagattgcaccactgcactccagcctgagcaacaagaccagaactctgtcccccaa

SEQ ID NO: 497606 - DNA, 956 bp, Homo sapiens
  misc_feature (80)..(80): n is a, c, g, or t
  misc_feature (302)..(302): n is a, c, g, or t
ggtcgcctattgtggcctcttttctccttcggcggggcgactgtgcgtggaaagcgtagactgaggagatgctaggtatngtgtgagttcggatcgcaagctatggatggccacgttacctgcaagtgatcaccgtagagcacttggatccagagagaacgtgcggtgtgggatacttgagtgggaactcgtatgtggaacgatatgcaggcaggccgagatgccgagagggccaaggaactgcttcagatcacgctggttcgctggatcgggcgtgacttggtgcgccggcgttggttcantgctgggctcagcatcgttccagtctggatagtgaccgagactactgacggatcgcactctacgcctgcccagccctctttctctggctcctagccagcatccgtccggtcgcatgcctgccagtgtgccagcgcaaggagagaccagcgtacattgctagcccgatagtcctagtcgtgcgcgcatctacatgggttctgggcccatgatcgtggtcccgtttgcagcatagtatatatcttagaatttatcactacttgctgtgagaaccccctagaatcgcatcaggttgcgcctttggccctcatgaattcgacgaaatattttgccgagcaaaaatctcgtcccatagagggagtgctggacacgcgtaatggcacagggtaccgtggcgctcgggaggtgcagggaacgtggcccacttaccttggaattgcgtggcaaaccgcttaaccgcactttagggccgtgcccctgagatcgcatgtgcttcccctcgcccgatggccaagccttgggaacctagtattctacaggaaaccttcttaccccacacgactggaagaactaacaattggccctatatggacactcgcatggtcctcgtgggccgtcccggaatctggatccattttcccccgccaagtcttccc

SEQ ID NO: 497607 - DNA, 212 bp, Homo sapiens
tagatagcaattatctctcagatagtaaacgtattcgtttgatcccaaaactacgttggcaggtagttttaactttgatcttaacttaactcattagccatagattttctatacgttgtgcacaagatccacccagagcgcaagggttctcttgaaagaaaagtagcttctgtaccaattaaaggattgaagtggtctcagatgttgatgca

SEQ ID NO: 497608 - DNA, 599 bp, Homo sapiens
  misc_feature (387)..(387): n is a, c, g, or t
  misc_feature (391)..(391): n is a, c, g, or t
  misc_feature (400)..(400): n is a, c, g, or t
  misc_feature (510)..(510): n is a, c, g, or t
  misc_feature (512)..(512): n is a, c, g, or t
ggcacgaggcctcgtgccgggatccgtatgtccattaaacttcatcagtatttaggatcattttacttctccagatgaatatgatgaccctactgtgctctatgaagccatagtatctcatgagaagaacctcgtaatagcccatgaaggggaccctgcatggcggagtgcagtacttgccaactctccctccttgcttgctctgcggcatgtcatggatgatggcaccaatgaatataaaatcatcatgctcaacagacgctacctgagcttcagggtcattaaagtgaataaggaatgtgtccgaggtctttgggcagggcaacagcaggagcttgtttttctacgtaaccgtaacccagagagaggtagcatccaaaatggcanaaanaaggggggnccccccaaaaaaaaaggggggccctgagaaacatgataaactcatcttgtgatcaacctattggctacccaatctttgtctcacccctgacaacttcttactctgagggncncgaaaggcttaaagacattcttgggggtcctatcagcttgggaaatatcaggaacttcatagtgtcaacctggcacaggcttaggaa

SEQ ID NO: 497609 - DNA, 774 bp, Homo sapiens
agagtgtgatagagtcctaaaggtgctactgtgtccatgagtcaatgcttggacgagtctagtgatgccaccgagagtgtcttatccacctgtgcttccacggtgtcacgtagcgcactgcggattctatgggtcttaggcgctaagtgctgagtagcgcaggcgtagctttggtagtttggttccttatggcaaaaggtagcttttaaggtaccattagtgaattctagcattgtaatgatcttgcaagttagtgttgaggcgtagtaaggtcttagttgggaacgccctcgttggttgggttcatccgccagtggggatttaacgggtcgcggagcgatttttgaggaggacattgatattaatgcatctggaagggacgttcgcgtttaacccacaattccgatggtttgggccctttgggaattccctttggccacagaaggttcaccacccttgtttgtggcggttcccctttcctgctgtgtgggttttcaccccaggagaaattatggcggggggccccggtttttaaaaccccgcgcgggaaagagaatttctctttttatttttctccctttggagaaggcgctttatacattggggaatccttggggcgttttggtgccaggagtagggaatgtccacgctttcacacgtgtttactgactgttgcagaataggaggggttgtttcgtagtccccttgcagttgaagtcaaacctgtaagggccagtgaacgggctcgttcatgcgacgttcctttgcgccgag

SEQ ID NO: 497610 - DNA, 124 bp, Homo sapiens
tgcttttaggcagacacgagactagagagtctgacttgagtaagtttatgggcccggagatactgtcctggtgacagtgagttgggctgtggagagtgccacctgtgcaggcataatgctggat

SEQ ID NO: 497611 - DNA, 116 bp, Homo sapiens
agtacttgtgtaattattgaggactaaacgtcagttaaaggtgagagggaaaactaggttgcagactaacagctgttttgcatctcacaagaacataggccttaagacaaaatttt

SEQ ID NO: 497612 - DNA, 710 bp, Homo sapiens
atctgtttaacatcagtgaaggagtttagcgaagaatttcgccacctctctttattccatgagtaagggagatagcatctgggtgagctatagagaaacgctgcgttcatgcatggctctgctggagaaacgactgagctaagacgtggtcattcgtgggtagagagcctccctgtgcctgctgttgaccttgaaaccctacccctaacatgtggcttcctattagtcaccttatatgatgcaattctgatatgtgccagtgctataagcaaatggccttgattcatactaggcatgcgtcatgaccaatcgagcatacacgttcatagaagaaacatagtggtgcttctttctgatctctagtggagatctcttgtgagctgctgtacgtacctagaagtgtacttgaatggttatctaacgtctaatagtgcctggccagtggtccatttatatagtattgttccaagaggctagacgtgctttgagccttttgttagaaagacctcccattgtaatagttcacagttgtgtagaccactgtatagcattgtactcaaggaagcttagccttgtccatttgtgaagctcttgggcaatcgtcatgcaggcgaaaagtcacgccatgtaccactgatacctgttgacttactgagggattggtgatggcacggagatcttagtgcactagtacatcgtcttctggtgcc

SEQ ID NO: 497613 - DNA, 930 bp, Homo sapiens
ggcggggactggctggtcgacgtgggacaaccaagcccgcttaaccaaaactggagggagaaagtggattattttgtggtccacacatctgggaccagccggaatgggatcctacgatggaacaaaaacccattgcgcaaagggctgcagggcgagaggtgggtcagtccaggggatgttggaagctgggagtagaccgggattatttctccagggtgggtggatcccaaaactttaaccacatcttcagggccacaaatagaacgagacaattcatgtaattcctgggcggggcccagcaaaaaagcagctggtggccagcgaccccctccagaagaccccagaaggggcagagacacctctcaggcgtctcatctccagaggacaacattccttaaggaattacgcccaggacaaccttttggaacaggtacatttttgggtggaagcaaatgggattcggggttaacattaagcaatgccaacttccagcacatggaaggatatgggccaaaggtcgtcccctggatctctcaggatttccaaacgttggaaccatggggccagtggacccagattgggacagggggaaccaaggttccgggcagatggggaagagtttgaaccggggtttacacccctggcatttggtggctgtgccttttggggcacagcctgtgtccaataggggcatgtacacccaaggattacacgtatcgcagaagggaaaacactccacgccgcacccccagggggtgccccgaaacacgacacctttaaactcgcgaccaggggaaccgggccctggggcttaaaggtttggggccgggggacaaacgggagctacgggagaactaaccggtcccagacccttcccggtgacggccgggggagctgacggccatacacgacggccacgtggatagccgg

SEQ ID NO: 497614 - DNA, 219 bp, Homo sapiens
ttcagcacattagtgtatgttttatgactaagaatggtggaggaacagttaaatcaactttttcagggtatttctggaacataggattacttagttcagttaaaggcctgattggcttgggtggactttatgagactagggttttttggacagtgaacatagacttaacattaaatcctgggatataaaatcttaatttcatgagccatgatactattg

SEQ ID NO: 497615 - DNA, 119 bp, Homo sapiens
agtctttccgtaccggactctggaccgagaggtttgtttcccttgccccactacctgaaagaaatagaataacctgaaagacccatcaggttccgagaatgtcataaatgcatgcagga

SEQ ID NO: 497616 - DNA, 103 bp, Homo sapiens
cagacaggcggacccccaaggctcattggggttccagctaaaatctgaaatcttagcagtgtgtcctccatgacataacaggagttctggaggcccatcttct

SEQ ID NO: 497617 - DNA, 269 bp, Homo sapiens
gcggtcccacggcaggtgtactgggagagaaaaatagcatggagtagataagctgtaagcaaaagaacaattgcagttaactttttttttttggagacggagtctcactctgttgcccaggctggaatgcagtggcgggatctcagctcactgcaacctccgtctcctgggtttaagtgattctcctgcctcagcctcctgagttgctgggattacaggcgcacgccaccacgcctggctaatttttggtatttttagtagaggcaggg

SEQ ID NO: 497618 - DNA, 761 bp, Homo sapiens
  misc_feature (57)..(57): n is a, c, g, or t
  misc_feature (70)..(70): n is a, c, g, or t
  misc_feature (115)..(115): n is a, c, g, or t
  misc_feature (123)..(123): n is a, c, g, or t
  misc_feature (146)..(147): n is a, c, g, or t
  misc_feature (153)..(153): n is a, c, g, or t
  misc_feature (163)..(163): n is a, c, g, or t
  misc_feature (168)..(168): n is a, c, g, or t
  misc_feature (172)..(172): n is a, c, g, or t
  misc_feature (208)..(208): n is a, c, g, or t
  misc_feature (218)..(218): n is a, c, g, or t
  misc_feature (225)..(225): n is a, c, g, or t
  misc_feature (231)..(232): n is a, c, g, or t
  misc_feature (247)..(247): n is a, c, g, or t
  misc_feature (259)..(259): n is a, c, g, or t
  misc_feature (263)..(263): n is a, c, g, or t
  misc_feature (268)..(268): n is a, c, g, or t
  misc_feature (276)..(276): n is a, c, g, or t
  misc_feature (285)..(285): n is a, c, g, or t
  misc_feature (289)..(289): n is a, c, g, or t
  misc_feature (293)..(293): n is a, c, g, or t
  misc_feature (310)..(310): n is a, c, g, or t
  misc_feature (325)..(325): n is a, c, g, or t
  misc_feature (398)..(398): n is a, c, g, or t
  misc_feature (419)..(419): n is a, c, g, or t
  misc_feature (421)..(421): n is a, c, g, or t
  misc_feature (489)..(489): n is a, c, g, or t
  misc_feature (496)..(496): n is a, c, g, or t
  misc_feature (499)..(499): n is a, c, g, or t
  misc_feature (505)..(505): n is a, c, g, or t
  misc_feature (521)..(521): n is a, c, g, or t
  misc_feature (563)..(563): n is a, c, g, or t
  misc_feature (574)..(574): n is a, c, g, or t
  misc_feature (739)..(739): n is a, c, g, or t
aataagagagagagaggagcagctcacacgtggcctagggggggaggacgaggccanaaatactgcaggnggggggcaagggagccctagggggaggggaaagcagggggtgggnagggaganggctccgggggaaaagacactgnnggcttngggcgggggngccanctgnctctcactccaggggcgagcagcttcacttggggcncgggggctgngagtccncctcgnngtcttcgtacatctngccctcttccgngggnggggngtccgggnactgcgggnactngganaccagggcgttcatgtngctctgggcctcggngaactccatctcgtccatgcgctcgcccgtgtaccagtgcaggaaggccttgcgcgggaacatggccgtgaantgctcggagatgcgcttgaanantttctggatggccgtgctgttcccgatgaaggtggaggaaatcttgagggcggggggggggatgtganacagggncancttcangttgttggggatccantccacgaagtagctgctgttcttgctctggatggccagcatntgctcgtacanctccttcatggacatgcggccccggaacacggtggccaccgtcaggtagcggccgtggcgcgggtcgcaggcggccatcatgttcttggcatcgaacatctgctgggtgagctcgggcacggtcagggcccggtactgctggctgccccgggctgtgaggggggngaacggggcatgaagaagtgca

SEQ ID NO: 497619 - DNA, 349 bp, Homo sapiens
  misc_feature (10)..(10): n is a, c, g, or t
  misc_feature (24)..(24): n is a, c, g, or t
tttttaaacnagtttgaatgtggnacaagtaagttgtcctgaagaaatcctctgggcgccattgcaccggttgtcacgcctataatcccagcattttgggaggccaaggcaggagggtcgcttgagcccaggagtttaacaccagcctgggtaacatagtgagacactgtctctacaaaaaatagaaatacattagctgggcgtggtggtgcatgcctgtggtcccagccactcaggaggctgagacaggagaatcacttgagcccaggaggttgaaggtgcagtgagctgtgatggtgtcactgcactccagcctcggtgatgggtgcagagcaagactctgcctcac

SEQ ID NO: 497620 - DNA, 157 bp, Homo sapiens
tcaaactgctcacaccctaattcttcttcagcaaactccattacttccagtttcttccagacacacagcctcagtgaggctaatctacttgtcttggcctcttgtcctgaaggctgattcctgggtagttatttctactcgtatctcgtcattttat

SEQ ID NO: 497621 - DNA, 192 bp, Homo sapiens
tgtggttagcaagccaagccgctgtacttcatcaccaaatagcactcgctccttcctggaatcctttttcctagcttcaccaccgaagtggttagcgctccttccttcttcctagcttccttcaccaaatcgcactggctcctggactcttttcctatcttcaccacgaactgctgcttgctcgcttgctcc

SEQ ID NO: 497622 - DNA, 302 bp, Homo sapiens
acctcttgagagctgttgcccttgctgccgccgcccccggccccgctggccaggaagatcggaccggccgatgcatcactgaccgcgattcatcaccgattggaccatcgacgaagagacttgacggtggctacttgataggtgacgaggcagtagaaaagcttgatacgatgaggatgcacgaggggtagcagagagaacgataagcccggacaagcagaggatcctgcaaggcatgaacactacggttggagcctccagaatcttcaccatgaccgtgaccgaatgacgcacgatagcgg

SEQ ID NO: 497623 - DNA, 298 bp, Homo sapiens
  misc_feature (117)..(117): n is a, c, g, or t
  misc_feature (213)..(213): n is a, c, g, or t
  misc_feature (256)..(256): n is a, c, g, or t
  misc_feature (259)..(259): n is a, c, g, or t
cattggataagggagagggctggggaaacatggcaaagtggaccagttagagccattaatcttgatcattccggttttttttttgtccatcttgtttcatttgcttgccccgccccngagacggagtcttactctgtcgcccaggctggagtgtagtggcatgatctcggctcactgcaatctctgcctcccgggttcaagcttgtccaggtngatcttgaactcctgacctcgtgatctacccacctcggcctcncanaatgctgggattacaggggtgagccaccgtgcccaaccc

SEQ ID NO: 497624 - DNA, 164 bp, Homo sapiens
gaaggtgattctaatgaggatcccagttgctacctccacgaacaggaacatttcacccagcgtcctcctcgacagggtacattccagccagctctctcctcgtacagacacattccatccagtctcctcctcttacagactgggtaccgcagctcgcaattctg

SEQ ID NO: 497625 - DNA, 520 bp, Homo sapiens
gtctagcacagtgcccaggactctgatgagtctctcatcgcattgtaaagcctgagaccgctgcctgtgtgggactgagatagcaggatttacttcacacctctccttagtgacttcaagagcctctggcatctcttactgcaaaggcatctgaatgtgtctgcgttcctagtaagcataatgtgaggaggtggacagacagaccaaccccgtgtccaacgtgacccctgtccccacactgacctgtgttccctctccgatcatctttcctgtaccagagcacagtgggctggatagtctccatctctgtactcaactatcatggtgcgctgcgctgcaacttcttacttccctcaatgacagttaggaacctgcaataaaatttagtaatactcaaaaatataagctatgaagggatgatggattacttaaataaatcaattcctggaaagtgagtcatggtggtgctctggtcatagaaggaggacagcaggtcggagacagagggctgctactccag

SEQ ID NO: 497626 - DNA, 1174 bp, Homo sapiens
acccaccaatcacatgcctatcatatagtaaaatcccagcccatgatcccctaacaggggccctctcagccctcctaagtgacctccggcctagccatgtgatttcacttccactccataacgctcctcatactaggcctacttaagcaagacagctaaccatataccaatgatggcgcgatgtaacacgagaaagcacataccaaggccaccacacaccacctgtcgcaaaaaggccgttcgatacgggataatcctatttattacgctcagaagtttttttcttcgcaggattcggctgagccttttaccactcgagcctaggcccctaccccgccaattaggagggcactggccgccagcaggcatcgacccgctgaaatccgcgctagaacgtcccactgcctgagacatcgcatccgtgatgtgactcgcatcaggagtgatcgaatcaacctggagctcaccatagtctgaattagaatagacaaactgaaggcgaatacattcagagcgacctgttattgcaatttgactggggtctctgatgggaccctcctgagcaagcctgagagtacggcgagtgctccctgtcaacgagtttccggaggagtctacggtgtcaacatatttttgtagaccagcgaggctgccgaagggacttcacgtcagttatgtgggctcacgttgtcctccgctattctgttgcatccggggaagataaatattgcaatttgacaattcgaaaggaatcagtttgggattaggaaagaccggcggcgtggatgatggaatgtgtggatggtgggttgtgactaattgactggaatggtctggagtctatgggagtgaggggtcctaaaaacaagacaacgaacagcaagagggaaaacaccgcgtctgcgcgcgcgaaacgtgcacccgagaaaaccggattgctaacgacacaacgggttcggtggacgcgggggcgaaccaacgaatagggacatgtgacacaccgtggcacaagaagacggaggccgagccgaagaacccgcgggaccaatgacaatacggaagggaggcaccggacataaaagaacgcccgcgggggaaccagaagacaagtggacaaacccacaaggagacacagaggcgtaccgcggacacaacaagggcccaaaggcgaaca

SEQ ID NO: 497627 - DNA, 309 bp, Homo sapiens
  misc_feature (77)..(77): n is a, c, g, or t
ttttttttgagacagggtcttactctgtcacccaggcaggagtgcaatggtgagatctcggctcactgcagccttgnctcccaggctcaagcaattctcgtacctcagcctcccaagtagctgggactacaagggcacaccaccacgcccagctaatttttgtattttaggtaaagacagggttttgccatgttgcccaggctggtctcaaacccctgggctcatgcctcggcctcccaaagtgctaggattacaggcgcaaacttttcttaagtatgaaattatttcaaaatagaaaggtcgtcgacg

SEQ ID NO: 497628 - DNA, 1022 bp, Homo sapiens
gtaagagattaggtattataaatttaaagtgtatacctcaggagagagagagatagggaaagatacagtcattacaaagcattcatgtatgaacctgggcaacatagtgagactctgcctctaccaaaaaaaaaaaaaaaattagctgggtgtgggggtgcatgccggtagtcccaattaaccttctgagtatctgggaaggatcagtggagcccaaaagttggaggtacgtgagagctatgatggtggtacggcactccagccggggtgacagaatgagaaacctgtctctaaaaagaaaattaaaaagaatcactcaggtagaaatacaaaaaaaaaaaaaacacacacgaaaaaaacaaaaaacagaacaacaaaaaaaaaaaaaacaacgcaacaaacaacacagaaacacaaacaaaaaacaacacaacgagcgagggggacgcgaaacccacgaaaacacaacaagacgggaacagacgaacacaaacacaacaacaaaatagaaaatacaaaaacagcgagcccacaagcaaaaagagataacaaaaacacacaaaacaaaacacgcagaaacaaaacaaacgagaggagacaagataaaaaaagaccatgcaaacaaaagaacagaaacacaaaggggggaagaaaaaagaagcaaaacacagcaacacaaaaaaagaaggaaagaaaagaaaaaaaaagagaaaagcgagatcacagaacagccaacagacacgcacacaccagaccgccagagagcaatgaaacgaaacataagaagggaggacagataaaagagacaagaaaagcagcaaccagacacgaaaacaagacaaacaaagcacccacaccagacacacgcaagaagaccaggagcgataaaagccaacagacagcaccaaccaaagcacaaacaccacgacgacaaggatgcgagaacaaagaaaaagaagcaacaagcgagaagagcaaggcaaaaagtgaaaaatagaagaagaagacgcaagaacacaaat

SEQ ID NO: 497629 - DNA, 112 bp, Homo sapiens
accaatctctcagcgactggagggatcgtcgagctcccgccgcagcttagcctgggaggggttgttggtggaacagtccacagacaagatctcccggcacttgtcacactgg

SEQ ID NO: 497630 - DNA, 607 bp, Homo sapiens
  misc_feature (1)..(1): n is a, c, g, or t
  misc_feature (79)..(79): n is a, c, g, or t
  misc_feature (84)..(84): n is a, c, g, or t
  misc_feature (110)..(110): n is a, c, g, or t
  misc_feature (113)..(113): n is a, c, g, or t
  misc_feature (118)..(119): n is a, c, g, or t
  misc_feature (127)..(127): n is a, c, g, or t
  misc_feature (129)..(129): n is a, c, g, or t
  misc_feature (132)..(132): n is a, c, g, or t
  misc_feature (137)..(137): n is a, c, g, or t
  misc_feature (140)..(140): n is a, c, g, or t
  misc_feature (154)..(154): n is a, c, g, or t
  misc_feature (158)..(158): n is a, c, g, or t
  misc_feature (170)..(170): n is a, c, g, or t
  misc_feature (188)..(188): n is a, c, g, or t
  misc_feature (216)..(218): n is a, c, g, or t
  misc_feature (224)..(225): n is a, c, g, or t
  misc_feature (229)..(229): n is a, c, g, or t
  misc_feature (236)..(236): n is a, c, g, or t
  misc_feature (238)..(241): n is a, c, g, or t
  misc_feature (246)..(247): n is a, c, g, or t
  misc_feature (254)..(255): n is a, c, g, or t
  misc_feature (270)..(270): n is a, c, g, or t
  misc_feature (277)..(279): n is a, c, g, or t
  misc_feature (283)..(283): n is a, c, g, or t
  misc_feature (287)..(287): n is a, c, g, or t
  misc_feature (295)..(295): n is a, c, g, or t
  misc_feature (299)..(299): n is a, c, g, or t
  misc_feature (301)..(301): n is a, c, g, or t
  misc_feature (303)..(303): n is a, c, g, or t
  misc_feature (306)..(306): n is a, c, g, or t
  misc_feature (321)..(321): n is a, c, g, or t
  misc_feature (323)..(331): n is a, c, g, or t
  misc_feature (333)..(333): n is a, c, g, or t
  misc_feature (336)..(336): n is a, c, g, or t
  misc_feature (345)..(349): n is a, c, g, or t
  misc_feature (356)..(358): n is a, c, g, or t
  misc_feature (367)..(367): n is a, c, g, or t
  misc_feature (374)..(376): n is a, c, g, or t
  misc_feature (378)..(378): n is a, c, g, or t
  misc_feature (393)..(393): n is a, c, g, or t
  misc_feature (402)..(402): n is a, c, g, or t
  misc_feature (404)..(404): n is a, c, g, or t
  misc_feature (406)..(408): n is a, c, g, or t
  misc_feature (412)..(414): n is a, c, g, or t
  misc_feature (416)..(416): n is a, c, g, or t
  misc_feature (421)..(421): n is a, c, g, or t
  misc_feature (423)..(423): n is a, c, g, or t
  misc_feature (425)..(425): n is a, c, g, or t
  misc_feature (428)..(428): n is a, c, g, or t
  misc_feature (434)..(434): n is a, c, g, or t
  misc_feature (437)..(437): n is a, c, g, or t
  misc_feature (443)..(444): n is a, c, g, or t
  misc_feature (447)..(447): n is a, c, g, or t
  misc_feature (461)..(461): n is a, c, g, or t
  misc_feature (465)..(465): n is a, c, g, or t
  misc_feature (469)..(469): n is a, c, g, or t
  misc_feature (472)..(473): n is a, c, g, or t
  misc_feature (508)..(509): n is a, c, g, or t
  misc_feature (539)..(539): n is a, c, g, or t
  misc_feature (541)..(542): n is a, c, g, or t
  misc_feature (549)..(549): n is a, c, g, or t
  misc_feature (555)..(555): n is a, c, g, or t
  misc_feature (560)..(560): n is a, c, g, or t
  misc_feature (562)..(562): n is a, c, g, or t
  misc_feature (564)..(564): n is a, c, g, or t
  misc_feature (566)..(566): n is a, c, g, or t
  misc_feature (570)..(573): n is a, c, g, or t
  misc_feature (575)..(575): n is a, c, g, or t
  misc_feature (577)..(578): n is a, c, g, or t
  misc_feature (580)..(581): n is a, c, g, or t
  misc_feature (585)..(586): n is a, c, g, or t
  misc_feature (592)..(595): n is a, c, g, or t
  misc_feature (597)..(598): n is a, c, g, or t
  misc_feature (602)..(603): n is a, c, g, or t
  misc_feature (605)..(605): n is a, c, g, or t
nattaaacatcatgattaaatacacatgaaaggcacatgcatactttacagcaacatccacagagaattagctgattanatganagtgacagttaagaactaaagaaacnggnaaaanngaggaatngntgntatgnagnttttaaatgtttgnaatntgaaatcaaaanaataaaatagagtttaangggaatttaagaaaattaaatatatatnnnaagtanntganaatgtanannnnataanntagttannaaatgttaaaaaaanttatgtnnntatnattnaaaaaatnttantntntanatattattaaaaatnannnnnnnnncnaangtggaaatnnnnnataggannnaagaaaagngaatttnnntnaaaaaaagagggaantgcatgganantnnnagannntnatatngnanaanaaaaancanttaaannctnttttaaaaatacancatnttanaanntagtgaataaatatgatgttaaataaaaataaaanngaaaaaggtttaataaaaaatgtaaaaagncnnaaaaaantaaaanaaaananananaatnnnntntnnannatannattatnnnntnnaatnntnta

SEQ ID NO: 497631 - DNA, 646 bp, Homo sapiens
tatccccgggggcctccccggtttttttgggggcccccccgggaaagaaggcgcccgtgccccataaaaaaggggtgtggcgcgccctctgtgggggggagacagggggcaatcgggcgcagcgacggccgcaggcacccgggggggcaagggaaacttgacctgggagcggggagaacttgtttgtaaacacgcgcggcgcgcgggcgggcaacttgtgcgtggcgccggcaaaatcttctctctccacctcttcatagtgactctagtagaagagtggagggtgggcttccgtggccgcggggcgcgcgggaccacccctgtgttctctcggcacaccacgtggggtgtgaacaacaccactgtgggggggtctagaggtctcccggtatattctcccgcgtaacaatgtatgtgggggggtcgccccgtcttcgcggggtgtctctatttggccgcccgaccaccagatcctccccgaaaagtttttttctcgccctcgcgcgtggggggggggatattcttctatacacgccacgcgtggcccccgagagtgaagacacaactctctctcccccgctgagaaacacacatctttgcactccatatcttctctttctataagcgcgtgaagacatacttatca

SEQ ID NO: 497632 - DNA, 294 bp, Homo sapiens
ggaatatacccgggaactcaattcatcttaacagcaaaaaaactccccaacaatctgggcttaaaaatgggtgaacaggctggtggcggtggctcacgcctgtaatcccagcactttgggaggctgacgcaaagaattgcttgaacctgggggatggaggtggcagtgagccgaaatcatgccactgcattccagcctggactccatctcaaaacataaatgaagaaaaaaaaaatttggctgggcttggtagcacatacctttagtcctagccacttgagaggctgagtaggg

SEQ ID NO: 497633 - DNA, 1373 bp, Homo sapiens
  misc_feature (414)..(414): n is a, c, g, or t
  misc_feature (428)..(428): n is a, c, g, or t
  misc_feature (444)..(444): n is a, c, g, or t
  misc_feature (449)..(449): n is a, c, g, or t
  misc_feature (522)..(522): n is a, c, g, or t
  misc_feature (526)..(526): n is a, c, g, or t
  misc_feature (561)..(561): n is a, c, g, or t
  misc_feature (568)..(568): n is a, c, g, or t
  misc_feature (611)..(611): n is a, c, g, or t
  misc_feature (650)..(650): n is a, c, g, or t
  misc_feature (652)..(654): n is a, c, g, or t
  misc_feature (666)..(666): n is a, c, g, or t
  misc_feature (668)..(668): n is a, c, g, or t
  misc_feature (679)..(679): n is a, c, g, or t
  misc_feature (682)..(682): n is a, c, g, or t
  misc_feature (715)..(715): n is a, c, g, or t
  misc_feature (725)..(725): n is a, c, g, or t
  misc_feature (732)..(733): n is a, c, g, or t
  misc_feature (791)..(791): n is a, c, g, or t
  misc_feature (802)..(802): n is a, c, g, or t
  misc_feature (807)..(808): n is a, c, g, or t
ctcgccccatgtactcgccttgtgccccccccttccggggccccaaccgttccggtctaaccccctccgccgggactgccacccccgcaaccccccagccaccatcgcaagcgaccatccacgactcgtgacatcttaaaaatattatattgggacatgggattagaaaatctttgcttgcttccatcaaagttacagcaaaaaaaatttatgctgatgtgtcctcacacacattgggggttgaatttggacacagaattatcgaagttagtgccccaaaataaaactgcagatttgggatacgcccggaccggagcgatttagggctgttacccggagctacttaccgaggagctcgggagcttttatggtctatgatatccactagaagaagtacatataaccacttaagcngctggttgacagangcaaggaatctcaccnatccnaatactgtaataattctcataggaaataaagcagatttggaggcacagagagatgttacatatgaagaagccnaacngttgctgaagaaaatggcttattgttcctcgaagngagtgcnaaaacgggagagaatgtagaagatgccttccttgaggctgccnagaaaatctatcagaacattcaggatggaagcttggatntnnnatgctgctgagntntggtgtacaanacnaaccttcagccccgcagggaggccggctaaccngtgaaccccnaccccannagagaaggctgtggctgctagtgacctctttgctgtggcccctcatttgacctttcanctctgtctgtnggaannagtactttttactgctcattgtcttctgtacatcttactgggtttaattaagaaagaaagagaaagaaattctgttgtaaaaacagtttaacgagcaagataaagtgtaaacaagtagatgtaatcaggttatcacaggcgaagtagagtaataaatctctcctgcatggtaaatactagacttgttttgccccttgtcctcgtgataagtatgtcggccatattgatttaagcgagcgactgaatgatggaggttcactgaatttgtaaccttccccttggggaagctttggcttcaatggacgcgttacatcggggaaattgttagccttttttctcattctcaccggtcacctcgttctgtgcgctcccactagattattggcggggaacatcctgtgaggaccacacgggctctcaacagccacggtcgcaggcaacacgcgcgcagcgtgaactcacaaatacaccgtaccccccagaaaacaactcccgagcataaaacatcacaaccctcctccaacaatgactcgagcccccctgtgtctacaacacgcgacaactc

SEQ ID NO: 497634 - DNA, 347 bp, Homo sapiens
gtctgctgaaggtcggggcaacatctcatacctccgaatgtttttgtcactgtacagtaacggcgcgccatgcgcatagtcttcctcaaagttgatcttcgacggatctcaggcactggatcatcctcttctacctccatggctgatgagtttgtctgcctctctcgttctcgcctaatctcactctcgatggattcaccgatggccaccttgcaagcacgctggctaatctctgtcaggtcagctccagagaagccattagtcactttagccaggaactccaagtccacatccttcgcaactggggacttgcgcaggttagcctgaatggattgctgggtaccgag

SEQ ID NO: 497635 - DNA, 203 bp, Homo sapiens
caggagtggacactaaaatgacagaatgctgcgtctagctacggtgcaagcgggcagctgaagtgatgaggatgatgatgctcgataccaaggaagcagaagaccgacgcggatgactagacagcaaaaaaggcaaagttaaactagaacaaaaaaggccgcagtgacctattcaacctccacatctcgtctcttctcttgta

SEQ ID NO: 497636 - DNA, 114 bp, Homo sapiens
gaaagcgagtgtccctctcgcgccccaggccggtgtacccccgcactccgcgccccggcctagaagctctctctccccagtcaggaggaaaaaaagaagaacaaagtaaaagag

SEQ ID NO: 497637 - DNA, 818 bp, Homo sapiens
tcggtcccctcctccgtcccgtcgtcctgactctctctccctcctttcctcacgaggatgtccggcttccagatcaacctcaacccgctcaaggcaggccactcggcttcatcaaggtcctcgagtggatagcttctatctttgcttattgcacctgtggaggtttcaagggccaaacagaaatacaagtgaataggtcctcctgcagataactgagaataaaactgttacagctacttatggatatccattcaggttgaatgaggcatcatttcagccacactccaggtgtaaaaatatgtgatgtaccatgggaaaagattacgtcctcataggcgattactcttctactgcacaattacaatgtaacctatagcagactttgtgtacctgtacagcattgcagacctatctgcgtaaactgaaggtacacagagtcatgtatctggatagtcgtaaactacctatgataagacttagtagtatacaaccatgttgccacataaaaaaagaagataggagagcacttcagcctggggaaagctctgacacgatattaaaatagctactgggtcacaactattaattgggtgcaaccttcccggccttgtaaggaagaacagcagtaactgtgtacctctaggatcctgtaaccaacactgagatccctaaaatagatcatgtgaaaataaggtaccaaggtatgaaaacactgggaagaaaatgcatgggaaggatgaacaaggagaccagctacacaggccaacagtaatttccccacaatacaagaggaatcaccaccaaccggaaaacaaagg

SEQ ID NO: 497638 - DNA, 562 bp, Homo sapiens
agcgggggccggggagcggggaggcgggcggtggggaggggcggggaggggcgccggtggcgcaggaagcggtgcccggggcgcgccggggccgtgtgcgcggggagggggcgcaggaagcgggcgaggacagaggagcaggagaggcggagagaggcacacagagatgttgccgatacaggaagccagggacaaaagagcgcaggacgacatggcagaccacatagaatgaaaataagaccagaaggatgcacaaaccaagaaggcagcaaaacaacaatagagcacaacacagaacagacaacaagacatagaatatagattcagaagaaagacaaggacaattagagactaccatcagaaaccataaacaagagcaaacaagagcaaacgaaaaataacaatggagaaataaatgacagcaaaccagcaaacaaaagagaacaaaaaataacaagaaacaaaacgaaaacggtaagaaagaaaacaagaacaacaatagcaaaagaagagagaatagaagagagagaaacacaatgacaggaaaagaagataagaaaac

SEQ ID NO: 497639 - DNA, 778 bp, Homo sapiens
atgccatgactatgccatctgcaaatacgcctttctcatatccacgtgacaaagggacacagtcctggacccaagccagaagcctctgcaaaggctctccttccagacctgcgagatcacatatgacaactctgtcctaccagagtagccatctgtgccagacaacactaccaactgcatctgctggtgccagacctcagcatctgaagacatgacttagatgatcttacccggaggtcgaagagctgacaaagaaaacataggtctcttaaaccaggcaactattcacgttaagggagtagagactgagcaatttctccttgtaacacaagaatctccctgacatctgtttacatctgttaaccgtcactcagcacaaacactccctctgggcatcacttcctgctccatccagatatctgctgctttccagtatctctgatagatcctgagacataacaaataggaagactgagagacagagcaaacatggctccctggaaagacttgtgcatagtcacggaataccatgttcagcaggaggataccagggtatccctccttgagaccagttccatgggtcaccatccaaacaggagtggtgacgacgcgaatgcggccaaagccacaatgataggaagaaccaacaaacagacggatggacaagatgggaaagaagcaaggatgtgcaagcaatcccaagacaaacgaatgcaggcagcagaattagaaaccagacaccattctgcgacagggggaccagagaggagcagagacc

SEQ ID NO: 497640 - DNA, 336 bp, Homo sapiens
  misc_feature (336)..(336): n is a, c, g, or t
cgtgtgggccacataccacagggtcttcgataaagtggagctgatgctgtgcgagaaattgaggccgcggtgcacaccatacagaaggtgccagaacaggtttcttctgggctccaattatgaaaagggggttggtgtgtgctggattggctgttatgggcagacctggagacttagcacaggtcaatctggtgttttgatgggtacaggggttatttgggcaagatacttacttgtgattatttcaaagatttttcggatttggagatattacccagaacttaaaggttaagcgcacaaattgaggttctgagcacccggacaatcttgtgtggn

SEQ ID NO: 497641 - DNA, 256 bp, Homo sapiens
cgctgtcgagcatgatgccgtgcaagatggtgaggcgcccgatcgggatcaccgtgctgccggcgacgcggttgtaccgatccacgtgcaccttgcacgtctcgcagaagaacgggctccaccgcgagccgctcttcacggtgtccgcgccgcagccgcggcacagctcgatcgcgcggttgtagtcgtacgccttccatcgcggctcctccggctcgcacgcgcaccgctgcgtgcgctcgatccggctgaaggt

SEQ ID NO: 497642 - DNA, 891 bp, Homo sapiens
tccacagaggccagagaggcgtcagttacacactggaagaaaaaaccgcccacagcagcctggcactcttcagcagatgatacgggctgtcaaatatggcttggtgggattcggagcccaccaacggtggccttgaaatgtggagcgctatccgggagtgggcagtggctgctggcagacacagccggtcaccagctggcagacactactgggaagtgacagctgaagcgctcccagcagttccggatacggagtggcagatgtggacatgtcccgggatagctgcattggtgtcgatgatcgttcctgggtgtacacctatgcccagcgcaaagctaggaacaaccaatgctccggccaacgagaaagccaccagtagcagggtcatacgggcagaccagacaaggtggggctagtaagctaggagtactgacggcccaagaacgctgacgcctgagtggactgtgacgccaggtcctctgtaggattcaacaacgctacacgagcagactatccagggagtcccatggtggatagccttgacccttatgcatactcctgaggaactgggcaacgccagcactagaccacactaccagcggcctccgcacgtggccccggagaggaaccatactagcgaaatggtcgcaaaaaagatagaaaaaatcaaccaaactccacacgcacaccagaggaccacgcacccaacacaaaacaagaacacgccaggaaccccatacaacatactcacacaaactcataagaacctacacaacaacaaacctcactaaaactcacacaacacaacaactcacaaatgaaattatgacaatacccatacagaaaacacaacaaataccatgcaataccaaactacacacaacaacacca

SEQ ID NO: 497643 - DNA, 517 bp, Homo sapiens
caggaatctggggcctgaccacagattcctctcccatccttttctgctccaacctgccccactgggtcccggcaggggccatgcctaccaagctcgagctggcccttgacccccaccagccccaccttgctggagggcagggaccacagggggattgacgtctgcagaaaaagcgagccacaaaaaagcgtagcggctgatgatatactagtctccaaactcccaccgacttcctccatacacaccaatgatgagcctcatgccagtgaggacccggaaacgctagaggaggggtcccagtggagagccatgagaacaccatactgtacatgagcgaacagaccatcaatgtaccataaggaacacacgagaaaggaaaacatgtaggttcaattagagctacctaaagcatagaaacagagtaggagatagaaaagagacaacaacaaagagaaaagtgcaaagcaaggaagcaagaacaaagaacaacaaaggataacaaaacaatctcaaacac

SEQ ID NO: 497644 - DNA, 370 bp, Homo sapiens
  misc_feature (8)..(8): n is a, c, g, or t
  misc_feature (35)..(35): n is a, c, g, or t
  misc_feature (108)..(108): n is a, c, g, or t
  misc_feature (120)..(121): n is a, c, g, or t
  misc_feature (144)..(144): n is a, c, g, or t
  misc_feature (252)..(252): n is a, c, g, or t
  misc_feature (339)..(339): n is a, c, g, or t
ccagaaanagctcagatctcaagcatcatggacgnactagatataccattgtctgatgtaaattcagccatatatggattgatatggtttggatgtatccccacccantctcatcttganntttaaccccctaattcccaggtnttgtggtaggtaattgaatcatgggggcagtttccctcatgctattctcatgatagtgagctttcatgagatctgatggataagtgcctggcatttcccctactggcnctcattctcactcttgccgccctgtgaagaggtgccttccaccgtgattgttaagtttcctgaggccttcccagccatgtggaactntgagtcgaaaattaaacctcttttataattg

SEQ ID NO: 497645 - DNA, 802 bp, Homo sapiens
gacgctgctaggggctcaccaaaaggcacaacctgctgcatcgtcaatcctgcgaggcactcgtgtcacgacctgagaaagcagtcaccagctggagactgatactgacatgtgcatgatacttgtgtacaacgctgaaatctgctgaataggctactaggccatctggggctctgcattatttctgccttccatatcttgtggtcctgcattcttaactggtgtaatcagattcgcatccagaatactagctatacaggagtctggaacacacagaattccagtatccaacttctgcgttgtcaggaaggcttactacaaggaggaagtcgcatgagtgatagctgatcctttcccaggcacttcatcttcttaaacgatagtatattacttacaattctagcccattcttgagtggcgtcatcgtccatctcgtgtgagcttctctttgcataatggcctgtagttggaataatcatagggccaagggattttaacatctgtacgtaacttttgtcctaggttagcttgtatctctcccagctcccataactgctgctgagacatctatgtttgatatcattctgacgtcaacctcccctgcaagccacgaggcagggagagcacctcacccaaagcaaccagtttattggctggtcagcaacctgtgatttctgtagcttaaaaagatgagtggggcttattgtcttttgaactacgacaaaaaggaaagaatttccaattgggggtgggagcttcagctgagaggtttgaagtgagtgggtgtattcttttgcaagac

SEQ ID NO: 497646 - DNA, 285 bp, Homo sapiens
  misc_feature (9)..(9): n is a, c, g, or t
ccccgggcntgggcatctgcccccccaccccaggtgtgatttaacatcaagaaatggaggcctgaaccattttgcattttccccctcctcccagccctctgagggcccaggcctgaaggtactgtcccggggttttttggttttttaaaaccggggttgggggcctaattttaattccttgggggccttttttcctggccaaaaactaaaaacctcgccaaggtaatttctggggtttctatccagcttgggtttcatgttttaaaataaattttaaaaagcaaa

SEQ ID NO: 497647 - DNA, 432 bp, Homo sapiens
gagagagagagagagacagatatagatagagagagagagagagcgagagagagagagactgctacagagagtctctgctggcgattgtgggatgctcattacttgcctccttgtgccgctgttggtctgccatatcggacagtgcgggctgcctgcccttgccctgtgcgctcttcatgtctgcctatggccttgttctccttctagagctctgcattccctggtgctgctctgtaccgtgtattggttgttcctcctgtctgggcttcttccgtgtcctcggcctcgccatgcgagttgactgttgaggcttcctatcctcctgaacgattggcggatcttgacacatttatgcgctattgtactcgatttggggaccatgatcatagttatcagctataacttcgccttctttcagtctacgttatggct

SEQ ID NO: 497648 - DNA, 133 bp, Homo sapiens
acatggaacagttagaacttgccacatatccagaacataaggaaacttattaaatcaatacagtcacggaggacttaacacacataggggcaggagggtagctagcgacttatgcagcctaaaatgctatcta

SEQ ID NO: 497649 - DNA, 227 bp, Homo sapiens
aattcgaaaaggaacagacagcaaacaagcagtagagatgaagaatgataagtcagaagaggagcagagcagcagctaccgtgaagaaagatgagactaatgtgaagatgacgagtctgaggagcgggtgcagatagcactactgctgagcagagggggacctactggatgatgatgataatgaagatcggggggatgaccagctggagttgatcaaggaaaaaaaa

SEQ ID NO: 497650 - DNA, 893 bp, Homo sapiens
gggcctgattaaacctggagactcgggtggccgaggggctctcataccagctgaagagcgacaagccgctgggagccgcggatctcaccgccggcttcaggggtttctagaacttcagccattaacaatgggcaggaattgttcccttgatcatatcgggtggtaccccgtcgtgttatcgttgtggcaaaccgtgtgatagcgatccttgatcatacctgttcaggaattcatctccactcgttccacatggcgccactgggagagcatgtctcttctgtaacaaggtagttaacctgcatgtacacgcgaatgttcaaagatcggtgtcatgctcactggccgccagttggccacgagatgtgagctgcaaaaagtgcaaatagcaaacttgggatgtgatctattgagtttggccattgaagacagccagcgatataaggaaaggccgcgtgatccaggaacgtgctctagttcgagagagtgagggctttgaggagcatgtaccatctgataactcttgaagataccgagagaaatcatcgttttcaccaggtcgtccttcagtgaaaacaaaaatctacttacattacactgttcaccttagcatcagaggtcggataatgaactgcggacagacgtggcgaatctcacgatggacctttgtcttactgcatccaaagtctggttccatcacaccggggtgagtgaatatttcgaccggggatacccattgacctttgcggagggcttgcgtatgtgcgtatcaacataggcgaaagctcttccagaaagggtcgttctctctctgtatcctagttgttttgtctcctgtgtgaaaagacacacggaggacgcgagtagagagaagacgacggacacatagaaggacg

SEQ ID NO: 497651 - DNA, 309 bp, Homo sapiens
tatggaaacactgaactaaacttatatttctatgttgtggggacttggataactagcccaggaaatgactctggttttgattgtcctgtaatgggcagattgctccctcggttctcgatatcttgaccatctattgtgtgatcatgcccacacccttcccacacccattgagcccttagcctcaactacttacccaccccatactcttaccacgagagcacccttacttggcccggcttccaaagaccctccaaatctccgagaagataaacagctgctacctcttagtattattctgatttcattttg

SEQ ID NO: 497652 - DNA, 268 bp, Homo sapiens
catttgccagaaccgtgtatgagcgggtgggagagcgctcgggtcccggcccctccctctccctaatggtttcagttggtccttactgttggaagtaaaaagtgaagcactttattttccctgtggttgttcacgttatgcctggaagtggggaccccttactggaaccacgtgtctgcgacttgtgtggagtgtcaccgcgtgtacatactgtaaattatttagtagtggctaaatgcaagtaaagtctggtttctttgttatttta

SEQ ID NO: 497653 - DNA, 137 bp, Homo sapiens
agctgtacccccgctgccaatggatcgagacacagaaaaagtagggcaacgtgcactgaccaacacatccgctcacacatcagctgggacaggaaccactggggcagcacgtcacaacacaacacagacagaacaga

SEQ ID NO: 497654 - DNA, 501 bp, Homo sapiens
gatcccggtgtatcctttgtctctactaaaaatacaaaaaattagccaggcgtggtggcaggtgcctgtagtcccagctgctggggaggttgaggcaggagagttgcttgaatccaagaggcggaggttgcagtgagcggagattgtgccactgcactccagcctgggcgacagagcaagactccatctcaaaaaaaaaaaaaaaaattctccaattatgactgtggatttgtgtggcctcttttggtccttttttggaagcctataataaggttacattccaaatttaaggatttttgtgtttccctaattgtgaatttgccctttaaattatttagaaaaagtgctttattccatttataattcttcttggatctccccattctgctttggcctttacatttaattaatagcccacaaccaacctttctttgggtttagccaagtggcacaggtgttattcttttccttgctcttttccctttctcaccctttttggtg

SEQ ID NO: 497655 - DNA, 121 bp, Homo sapiens
  misc_feature (24)..(24): n is a, c, g, or t
  misc_feature (96)..(96): n is a, c, g, or t
  misc_feature (103)..(103): n is a, c, g, or t
aagcggaaggcgtagagaacgggnttgaggccacagcgggcgagggcaacccgctggtcaccagcagtgcgacatccttgcgtttggtggcagggnaggtccnctccgcgcgcagccagta

SEQ ID NO: 497656 - DNA, 672 bp, Homo sapiens
  misc_feature (108)..(108): n is a, c, g, or t
cagaactggaaaagctgaaatggtgaaaactatgctgcctccagcttcagtctcctttccccatcagctcgccctgaggcaggttcatatattgagcatctaaccgtncatagaactgtgctttccattccgctgtgggactctaatgcagccagtgggatatggatgtaccactgtctaaggaagacagatcatagatccatgatggatgttgttcaagggtttcctctcctctcacgaaggcagtaccagccagtactcctgctctgtaaaacctgcggtgcaccaccctaagcgggtaggctgacagaggccacacgaccatagctgaatttgttctgtaggcgggaggcacaagccctgtttcttggtgtaatcttacagatgccccttttgctttcacaaagatggtctgatggttttatgtctaaagtatttatatatactaaacatatactaacatttttataaagagacgtaaaaaattcaacgttattttaacaagggaacatttatatacgatatggtgcttttatctatatctcaaggttccaaaggaaacaattgtgttggtccattgttgcatttcttacaaagggagacacaaattattggggaaatggggttaaaggcaggatgagagggattattgagttgttatggaagaaacag

SEQ ID NO: 497657 - DNA, 151 bp, Homo sapiens
caaagggggtttttttaaaaattttaagaagtagcgtattgggaacccttaatgggttttttttcccaaggcttccgctttgtttttagctaaaaacccttaaaaccaaaattattataaaaaaaaattaattaaaagggggggccgccca

SEQ ID NO: 497658 - DNA, 347 bp, Homo sapiens
cattccatgtatcacattatctaaattaaacagagatgctgtagactaaaaacatgtttgctaagtaattacactggacctaggcaaaaccactgacgaacaggtgttcctttttaccacataacgttttgatcactgctgctatgagccacgctataggtataattcagatcattttagcttgtagctgaggatgtcacatcatagacaggatcaaacctgaaagacactaatggttcaatcctctataaggccaacaaggaaaacaaattaatgtgatgtaacttgcatatatgtgcactctgcataggtacccaataatactgtactgtagctgaacacctttc

SEQ ID NO: 497659 - DNA, 164 bp, Homo sapiens
ccaggggagagggtcaccatgacctgcagtgcagctcaagttacgttcatatattggtccaacagaagctggatctccccagactctgattatgacacatccaagtggtctggagtcctttcgcttcgtggaggggctggactctattctcaatcacgatgggg

SEQ ID NO: 497660 - DNA, 333 bp, Homo sapiens
gacggagttaagataaagtactggagcaggtaagctctcatcccagtgcctgctgtgtttataagaagagatggaggccgggcacgatggctcacacctgtaatcccagcactttgggaggccgagacgggtggatcacgaggtcaggaaatggagaccatcgtggctaacgtggtgaaacccatctctactaaaaatacaaaaattagccgggcgtggtgaagcacacctgtaatcccagctactcaggaggctgaggcaggagaattgcttcaacccaggaggcggagactgcagtgagccgagatcacaccactgcacttcaagtcgacg

SEQ ID NO: 497661 - DNA, 719 bp, Homo sapiens
ggggttgaagaaagatgatcagagcctaaggtacctgcggtacaccatcaagtgagccaacgtatgcattgtgagagccccagatggaaaagagggagacagaaaggggcagagagattatttgaagaaataatgaataaaaacttcccaaatttgttgaatgacatgaatatgaacatcaaaaagctcaccaaaatacaaatagggtgagcctgaaagactcacaccaaaacacattataaatactactattgaaagtcagagacaaagagagaattttgaaagcagcagaagagaacagatttgtcatgcactagggatcctcactaagattatcagcagattttttcattagaagctttacaggccagaaggctcagatattcaaagtggtaaaagaaaaaaaactctcagccaataatcaccgtatccaacaaaactgtactgcaaaagaagtaaaggagtgaaggagaaattaagacattcccagataaaacctgagaaaatttattagaactagatctgccctttaagaaatgctaaagggagtccagaaggttaaaatgaggtgatgctagacagtaacttgaagttatataaagaaataagggctttgtattggtaaatatatttgaagtagagctagtggtattttaacaggggatgtaattcacttttcggtcctatatgaattaagacgatcggattttatattttgg

SEQ ID NO: 497662 - DNA, 183 bp, Homo sapiens
acggatgcgtatctgcctcgactatgaaagtcataccgtataaaagatggcgtgtttctttattttgaagatgctgcaggagtcatacgtgaacaactaaaggcgataatgaaaggttctgccattacaggaccagtagcaaaggattgtgctgacttttggccccggattgcatccaatgct

SEQ ID NO: 497663 - DNA, 758 bp, Homo sapiens
ttgaggccggtgtaatagcgaagtaagagatagtgcgcttcggctttgaggtgctctacatggacagctgtgctcggcaccggatctaacgctgctttcaaggaactgctgggttcgggcatgcaccaccacctccagcacaatgagctactccgtgacatctttggcctgggccatgtgtctgttgctggatgccactgcctctgaaggcctgtaaggttccacgtctttgagaagcacctgtacaatgctgctgccttcaaaagcccggagccaaggctcgaagccgtgtgccgggatcaagcagggcagacatgcctgtgaagcaggacctgctgaagaggagactttctatgcccttggtccgtatttgtgtaacagaagacagtgcaagcaactggtctccaccagtatttgtcactttattgttttttaatgacaaaaccagaaaacagacatggggtgggtagctgggggcccgcacacgttgggaccctgagcaccattgtgtacactgcactcagccatgtggcccgttcgtgtcactgtctcaggaccaggataaatagtgtgccttcgatcagggctgatggggcaggcactagggggcctttcccttcctgttcctctctcaggcgttgctcccccaggatgacccactcttaggggggtggtggcatctggacaaatgccacaaacagcaggtaggggtggcaaagcgacctgtaacgaccggggggtgcctcaagttttgttaa

SEQ ID NO: 497664 - DNA, 147 bp, Homo sapiens
  misc_feature (1)..(1): n is a, c, g, or t
  misc_feature (102)..(102): n is a, c, g, or t
  misc_feature (128)..(128): n is a, c, g, or t
  misc_feature (136)..(136): n is a, c, g, or t
ncacacgcctcttgaacggtaagcagagatcaaaagcacagcagcagtaatactgggtaagtccttttgatctctgcttaccgttcaagaggcgtgtcaggnccgacagtcggtgaccccatcactcngcaggacnaaagggggggg

SEQ ID NO: 497665 - DNA, 1190 bp, Homo sapiens
aggctgtacgctcggggttaaacgggatcgtgtcagctgccagaagaagggaaagctgccgagtgatcgaagtggagtgtactgtagctacagcttctggaatagattccagtatggacagtctccgacttaggatttttcaagcttgaggagtggtgtgaaagagacacccattcagatagataagagctgtacttcgagatccagcatgttagatctgttcctggacggctagggataatgatggttacagtgagccactcgttgatgaatgcttgggcagcgggacatgtgtagtgcacagggtcccgaggtcacgccatgtgatcacgggaaatcaaacaatgccatcctcgtaccgctgtactgctgtctgtcaagcctctgttatcggagtattggctgcttttggtgatgcattcatcagtgtctcatgagtgtctaccaataatagtccatgtcacgaatggtactccgtgctattcatgggtgagactgaaggacatggagcgaagggcgaactaacgtctatgagcatgacaaccttccaaggcatacgtcgcccaaggatagacaggtcggagcaaagcgacaggaagtgggccatacgcacgggacgttagggacgttgaggcaagccacggaggttacaacacagaccttcacagggatacagaagcgaacactcagatgctagcacgcgagacactcgtcccgccaaatcaggctaaagactcccgaccttgatccttccacgcagaccgaccaacgggccctgagaagcgaactcggcaccgactactggcacacacacgcacctggtaatcgctgcgcacgtggaaaggacccgcgaacacccagaagccgcgcatacccaccatagggcctactggccggcatggcctcgggctcaagggctaacgacagcgccctactgaaccccctcgccgcacatacgaaccggtagccaggtgaatcccaacctaatacccccaccatgggtcgaaggcgaaagtcaaccgaccgggcattcccggcggtgagggggcaataacaggcaggactggggcccgtcacgcgccgcgtcctccccccccctcctccccccgctctcgtacgactgacatgacaggacgcggccgggcacggcacaacaaatgacgccaagacgcgcgcaggcccacatagag

SEQ ID NO: 497666 - DNA, 1229 bp, Homo sapiens
  misc_feature (52)..(52): n is a, c, g, or t
gccacttggtgtgcaaggtggcccgttttggccacagtcctcagggcccaanttgtttgcttcgctgggcagccccagaggtcattgcacatggaaagcatacaacatccagtgatgtctggagctttgggatactcatgtgggaagtgatgagttatggagaacggccttactgggacatgagtgagcaggaggtactaaatgcaatagagcaggagttccggctgcccccgcctccaggctgtcctcctggattacatctacttatgttggacacttggcagaaggaccgtgcccggcggcctcattttgaccagctggtggctgcatttgacaagatgatccgcaagccagataccctgcaggctggcggggacccaggggaaaggccttcccaggcccttctgacccctgtggccctggactttccttgtctggactcaccccaggcctggctttcagccattggactggagtgctaccaggacaacttctccaagtttggcctctgtaccttcagtgatgtggctcagctcagcctagaagacctgcctgccctgggcatcaccctggctggccaccagaagaagctgctgcaccacatccagctccttcagcaacacctgaggcagcagggctcagtggaggtctgagaatgacgatacccgtgactcagccctggacactggtccgagaagggacatgtgggacgtgagccgggctccaacagcctctgtgagagatgccccacaccaaacccaaccctcccgatggctgcattccctggtcctccgcctctccaccagccccctcctcattaaagggaaagaagggaaaaaaaaaaaacaaaaaaaaaaaaaaaaaaacaaagaaaaaacaaaaaaacaacaacaaatcaaatagaagatgactgagagaacgcgtcgtcgctcccccagctacaacgaccgcactctttttgctggtgccccagtgtagatgccccctctgtcaatatagcagaggcagtccactaacattacaactgagaatgcgggctcggtcaacagcgactggtcacacacaaagcagcagtcgtgccgtagtaccaaaggcacgccctgctcacgagaaagcgcgcgtgtgctcgggccacacttactctctgtacggctggtgggcgcaatcagcttggtgggcggcacatgaccaactcggcgtaggcaccccgcccacgcggagcaatacac

SEQ ID NO: 497667 - DNA, 212 bp, Homo sapiens
tgatgtttttgacaatgctcttgtcaataggaacaagacagtatgcttctctttgttagtgtagttcgtttggtagtattcgactcactacgtacttgtgttggctgacattgttcgattggctgggttgtacctagccaaggtattgggcccagcttgggcactgcccaaagtgaccaaggtgctgaacgctgtgataccggagaacttca

SEQ ID NO: 497668 - DNA, 877 bp, Homo sapiens
tacgtaaaatctttttatattcagaaaaaaaaaaccccaaaaaacaaaagtttcccaacccacaccggggagggttctgggtagggggaggtgtctgtccatccagcccgggcccccagcccaggtggttgggcagcaagaagggggtacgaggggtaagggcccaaacaaataaacagggtcgagtgtgtgatactagggaaaggaaaggggtgcaaacgctgagcggagagcgaggaacggcgagcacggagccacgacgaggatcagaacgtgggcaaacgccgaagggtggcgaggccaattatcaaaacattgtcatggagtcgaaccaacaccacggggacaaacaatagaataggccacaaaaaaacacgggaacataagcgatcaggagaaaacaaacttgtggacgactggcgaaatacgaacggggggggcccccacagggggagcgactatgaggaaaccagaaagaactcacagtgaatacaacatcaccccagtcacgggcacagccccaggagaagaccacgcagacactaagcaaaaaaaaataacggggacaccacaaaagcgtgactccagccacagtacacgaaaaaaaacatggaacgcgggaaaattagaccaaaacgaaagtgaaaaaccacaaactctccaaacgagtgaaatgtagaaaagatgcgaacagaacaagggtagtacccgggggggacaaaagggggggaacacacaaaagagagaaaaggcaggaaaccccattgaacagggccccaaacgaatgaggccccagatccaccacgacaacaggaggaccgcagacccacgaaagacaaggaacatagccaaaaagtgacagtgacgggacaccccc

SEQ ID NO: 497669 - DNA, 769 bp, Homo sapiens
tctactacaaacataaaaaaattagctgggcgtggtaccacgcacctgtaatcccagctactcctctggaggctcagacaggagaactgcttgaaccgggaggcggaggttgcagtgagctgagatcgcaccactccattccagcctgggcaacagagtgagactccatctcataaaaaaaaaaaaggtaaggaaaaaaaggaaaatgttttattcattttctttcctaaagaatatattggggggataaaggattctgggtggacagtttggtggcttttaaaaagccttttataaattgtggctccatggtttctgatgagaaatctggcatcactgaaatctggcggttctcctatatacaaggtgtgttttcttccagtttgtttcaaagtatttccttaacagtgggttccatcacttggattatgatggtgcctgggtgtggttacctttggggattgtgctgtgccagagacggttttaaatacgaatgttctgtacctgtctgtgacatattggtcttgtggccacgatgttgtgcaagttttaggctataattcttcagatatattttcttccaatgtgtgctttcgtggggtctaaggacatgaatttagacgctgtttcattttgtgccaaagagtcccaaggggtcttcttaatcttttcacattttctttctggccatcagaaaaagaaatttgggcatgtttttcaaattatggacttgcacagaatttcatggtgtggagctcaggaaattggg

SEQ ID NO: 497670 - DNA, 347 bp, Homo sapiens
  misc_feature (27)..(27): n is a, c, g, or t
  misc_feature (44)..(44): n is a, c, g, or t
  misc_feature (82)..(82): n is a, c, g, or t
  misc_feature (182)..(182): n is a, c, g, or t
  misc_feature (189)..(189): n is a, c, g, or t
  misc_feature (208)..(208): n is a, c, g, or t
  misc_feature (219)..(219): n is a, c, g, or t
  misc_feature (339)..(339): n is a, c, g, or t
atatatatctttttaaaatctttgttnttgatgacaaacttaanttgtgttaatagggctggtgtgatggctcacacctgtnttcccagcactttggaaaacctaggcaggaggatgcttgagcccaggagtttgagaccagcctggacaacatagtgagaccccggctctacatatatatnttttttntttagctgggcgtggtggnttgtgcctgtngtcacagctactcaggtggctgaggtggcaggattgcttgagcccaggagttcgaggctgcagtagtgagctatgattgcaccactgtactccagcctagatgacagagtaagaccctgnttctctaa

SEQ ID NO: 497671 - DNA, 476 bp, Homo sapiens
  misc_feature (20)..(20): n is a, c, g, or t
  misc_feature (41)..(41): n is a, c, g, or t
  misc_feature (46)..(46): n is a, c, g, or t
  misc_feature (73)..(73): n is a, c, g, or t
  misc_feature (83)..(83): n is a, c, g, or t
aaggaattaagggtttttangaccacacctaattaccttcngccantttatttagttggataaatcgggatcnaacacactcnaatggaaatgaatgcttagaaaactagacaaatactgatatttgctcctttctgagggagaaagcctccttggaactgtccaaggtgctgatgtgaactaacggaaacacttcattagttccgtctacccacctctttccaaaaagattgcttattcagagtatttttaatcacagtatttggctttgtaattcccacattctgcaatagttatgatatttggggccctgtccatgttttagtgaaatcctaactaacttgattttgtttacagctgcttattctgttcccatgattagccctaaatttatatttaaaaagttatgagccatgaatccatgtaaggttcaagaacatttcagcaaataagaacagcattttcattctgttaaa

SEQ ID NO: 497672 - DNA, 298 bp, Homo sapiens
ggtgcatgagttagccatctgcgattggagatctcgcttacaactactaggactctcactagcgtcacaatggcgtcaggatgaagcctcaggctcgctcagatgctacgatcatctccattcagatcaacagctcacacgaggtcaaggtgttcagctgatcatcatgcgagctacaatcatagatgatcacatgctgctcagccagctcatgatcagtcatcaagtcaggttgatcagctcagcgcttagtcagagctcagtcagtcagctcatcacatgtcgtcatcatcgtcaa

SEQ ID NO: 497673 - DNA, 195 bp, Homo sapiens
tatgtatgttggtaggtgggggtggtgttgtaatagtcgctatactgcttgtatgtattataccttcgataatcaggtccctcttctatagggctcctgcagtttgctgggggttcacttacaggccctattcatactgatattgaaccaattgcctggaagatgtcattcaaggagtgctggagacacagcaaa

SEQ ID NO: 497674 - DNA, 574 bp, Homo sapiens
gacatcctagaggatcccttatccgtgtcggggttgtacatgcatggcggtacggccatgtacgcagcgtggcggatcggctcacgcccatcagcacaaatgcaccaggatcttccctcctggctggctcagcgcccggtggatgaagtcgtcagccgtcttgaacacctggatgctcatgtcaaaggctggcgagtcgtgggcctcaacacccaggtagcggatgcccagcccctcataggcctcgggcgtgcctcgccaccggctgtgtgaggcattgaggacgtgcgtgatgcccaggcggcgaagctcccggcggttgttagccatgtcctggtctccgagatagaggcctggccagacctcgtcggcatggttacaggctgtcttgcctgtgtagaggagccgctccaactcgaagacattgaggaaaggatgttgaacggttggcatctcctccagggtccctcgagttcgaacaggagaccttgagctactccgggagaagcgggccataaaagtcatagaagcccaaagccagttaccaggacacatcttagaggtggagaaaccg

SEQ ID NO: 497675 - DNA, 118 bp, Homo sapiens
  misc_feature (52)..(52): n is a, c, g, or t
  misc_feature (68)..(68): n is a, c, g, or t
  misc_feature (104)..(104): n is a, c, g, or t
gacattacctaacagttccagtgctcagtaaatattcattatgattgacaangcaaggataagtgtanaagttctaagggttcaaaggagggattacaggcgtnagccaccatacctg

SEQ ID NO: 497676 - DNA, 542 bp, Homo sapiens
acaggttgagcttcggaggaatgttctgtatttcattttggaaacctacgttccttccactttcctgggggtgttgtcctgggtttcattttggatctctctcgattcagtccctgcaagaacctgcattggggacaacaaaggaagtagaagaagtcagtattactaatatcatcaacagctccatctccagctttaaacggaagatcagctttgccagcattgaaatttccagcgacaacggtgactacagggacttggcaatgaaaaccaccgacaaggtcaaggtggtcttccccgaaaaaaggggccggaatgggggattatttcacaatttaaaaaccccagcaaggggggtcacttattccaaaaaacggggccccttggatttttatggccccccacggatttttaacggggccaacaacaagtattttttgggggcgggggaaaaatttttgggcggcccaagggctttcccccggcacacaaaaaaaggtgtaaaatgggtttttttaggcgccggggggccccccccacca

SEQ ID NO: 497677 - DNA, 873 bp, Homo sapiens
ggggagcgacgtgccgggaaaggcaggagggccccagtgttgggggcgggggttgcgcgccgtggaggggcggcctcaggctgggagcctggcagatcgtctgactctgccctcggagccccatcccaggccgagccaggacccctctgatgcatcaggcgtctcaggagcccgtttctttcttgaatccggggcccagtgcggcttgaacctaaggcccccgacctcctcctcgccctctcagagtccgctgggtgtgggcgctgaaggagcccgggtcggagaggagccctccccttctctcctgcgtgatgccctgctggctccgtttctttttggggactggggtccggggccttctgcctgacccggggtgagagtgggagccctgcatcattgacgccggtgagagggcgctggagcccgggagcggcttgtgagccttgagcggcagccgggacgtcaggatggggtcaccttctgccccaggtcccccactgccagtgatctctgtcaccttctgggggtctgtcccctggggtcccacccccccggggctgctgtgcgtatctctcatctggacgtgtaaataccctcttatagtacggcttagcacagtattattcgccccatgcacccccctttttattccctttaataggtgtcttttgggctcggatcaattgggttttcctaacatgatgttgagcattttaacgaccctgtaagataggctgcatgggcacatcaatgaggggcgtccaaaccgggtatggtgtaaatctcaactatgtcaggttagtacgaaagatatgggacaatgcgtatggctcgacacaccaagacgtgagtcagttacgtgacaggtgtggt

SEQ ID NO: 497678 - DNA, 123 bp, Homo sapiens
gaacgtactcagaaaaagtaacatgcaaggtaattggaaatcagactttaaagcatgtttggaaaagatggcaagcatttccattagttgttcatagcgttttatataagtgactggactcca

SEQ ID NO: 497679 - DNA, 1133 bp, Homo sapiens
gatctatcgtagagcatttgatggggtgcgtggtgtcacagaagggtactcggaatctgcggtactatggcgtgccctcgtgaggagccatgctgtcgtgcatagacgtagtggctaaggcattcgtcgaggcaagtgatgaaaagaagcttcgcgctgaagagatcgaagccgattcctagagaccagagatcccagcattcgagcagtctcttgcacgggtgccatttacctgtggactcgtgattgaaatgcgaagactaccgataggcggagacatgctgcagtaatcgagacctggagcagtcccacaggctgtgacaacgacaggagcgtggctggcagggcttgtgcaccacttgtaagaagaacaccaccacatgcgtggttgtggcgcatttgtgcggctcacgtgtgaaaaccccatccgaggccctccgggactcttcaagcacttgtcatttgctgcagcaacatcaagtgattgaactgcaagaaggcagtttctcataacacgacatcgggcactaaaatcctaaggcacgcacaggccctttaaccaacgatacctgccaagcaccatggcacggcatgcagggcatgcgcaacgacagccacgctgggacagacacggactatcaagacagcaatgacaagacaagtacctggccaaagtacataccggtgtccatttgcccaacacccacagaatgacgccttgattccctcctgcggccacgaagcaaggccacaccctagatgggacgatcccaggatgaaccgggacggcactggttggccgagaaagctggacatgggcccgcgagacggctttgacgcagcagggtacctgtgaagaccaagtgttgaggcacggatgcggatgatccgacgtcatcggagatgaccaagggcaaaacggctaccaaggggtcacccagacgtagggaaacccaacgaaggctggccccgcaagacccaccgaggcctggcgccaggggggctggaatgggcgctggcacatcccggccgtgtaacttctctggggcacgcgctggcacaagggtacataacggagtgggtcaagaaaagattaaaactggcacgaaactatcaggacgaaagcgaacaaa

SEQ ID NO: 497680 - DNA, 657 bp, Homo sapiens
cctaattttatttttatttttaattttaatttttttgtttgagatggagtggcactctgtctcacgtagtctggagtgcagtggtgcaaacttggctcactgctctccagcctgggcgacagagtgagactctgtctcaaaaaaacaaaccaaatcaaaacaaaacaaacaaaaacaaacaagaaagaaatcatccttagagatcaaatgatattaatttatagtattccaaattaaataaattgttctcttttgaagggattcctattttggtattttaaattcttcatcataattatttactgctgataattcatattacaatgaaaatgcctgttatttatgcatttctttttcccttcctttccttttttctattttcccttttccttaactcctttcctcctccccggggggcccccccttttctcctttctccggtttttttggaccctccccttcccccttttttttcctcccttttccctttccccccctatttttccccggcccaaattctgaccccgggggatccctctattttaaacggccgccccccgggggagaccccccttttttctcctttatgaggggtatttcaccctggggaaaaagggcaaattgttcccttggaaaaatttctcccccccaatcccg

SEQ ID NO: 497681 - DNA, 603 bp, Homo sapiens
atagagggaaatgaacggaagacgagaatctcacagtagtatggttgacatataaccaaatgtattcatctcaaaataatgaagaactactcctaactattacacgtcctcatttctgcaactgtcactgtccctagctggatatagtgactatctttacatcttgctctcacagccatttcctttgggcctgggccggtggacgtgagcgtgggaaagaccagaacccgcggtgccccccaccgcactatcctcgggtctccagaggtgggatccactgggcaggggccttggctggatactaaaccggctctggggatacaagaacagctgcctttgagaaacagttcgggtctctatattccagacttcttagtaggactaaacccttaatttccacccgggaattcatggttctcctaaaaccctgcggtggaatgccttccttcaccgagcatatatggggcacctactaggtgctagggtggctctgggcgaagggctgcagactgtgcaaactccaggtccctttcctgtggatcccacctctgaggacccgagggggacgcagtgaggacaccatgggttctggtccctcccacg

SEQ ID NO: 497682 - DNA, 218 bp, Homo sapiens
gctcggtccatccagattatgtcggaatttcattgtaatactctcataactcttttcatttggtctacatttaaggggaatttttaaaggaaatgttttttctttatttttttggtattttcagagggggcaaggaagggacagaaaagtaacctcttctataagtaggaatattctaataaagctacctttgagaaagtagccagtgtaaattaatc

SEQ ID NO: 497683 - DNA, 376 bp, Homo sapiens
  misc_feature (29)..(29): n is a, c, g, or t
aaagaggttggtccagaaagcaacttctntgtccttcagcttctggcccgcttgggtgttggcaccaatctgcagatacccttctttctggttgtactgtgcacagtgggacaccccttccctattggggtttccattgcgacgcaaagtgtggcccagaaaaaatggggcccacaaagccgaagaagggctcatcgccgtgtgtctcctatcaccgtcttggtgtttcatgtctgatgagaagcttggacggtactgaaactcatcacatgtaggtgggtgctccagcatctctgtggttccgggccacactcacatatggcaccctaaacatcacatctgctatcgagtacaggcacaggtctctctttgtggc

SEQ ID NO: 497684 - DNA, 298 bp, Homo sapiens
tggacagtatacggtgagaagaacatcagttatacacaagatgatgccatgtataacgattccacagatcagtttatgtcagtatagtggtcaaagttatatgtgatatcaatgaagaaatttttgtagcatgtaatcggttatttctgttacttaaaaagtattgttagtgggctattaaacttggattttactttgttatgaatgcagtatgttctttttattcaagtatgaacttgtagagaaactatagtaatatgattgttaagagatttatgttctacttaaaatgtgaatt

SEQ ID NO: 497685 - DNA, 906 bp, Homo sapiens
  misc_feature (123)..(123): n is a, c, g, or t
  misc_feature (127)..(127): n is a, c, g, or t
  misc_feature (139)..(139): n is a, c, g, or t
  misc_feature (166)..(166): n is a, c, g, or t
  misc_feature (185)..(185): n is a, c, g, or t
  misc_feature (214)..(214): n is a, c, g, or t
  misc_feature (222)..(222): n is a, c, g, or t
  misc_feature (231)..(231): n is a, c, g, or t
  misc_feature (253)..(253): n is a, c, g, or t
  misc_feature (258)..(259): n is a, c, g, or t
  misc_feature (279)..(279): n is a, c, g, or t
  misc_feature (283)..(283): n is a, c, g, or t
  misc_feature (289)..(289): n is a, c, g, or t
  misc_feature (300)..(300): n is a, c, g, or t
  misc_feature (304)..(304): n is a, c, g, or t
  misc_feature (313)..(313): n is a, c, g, or t
  misc_feature (321)..(322): n is a, c, g, or t
  misc_feature (334)..(334): n is a, c, g, or t
  misc_feature (336)..(336): n is a, c, g, or t
  misc_feature (347)..(347): n is a, c, g, or t
  misc_feature (357)..(357): n is a, c, g, or t
  misc_feature (365)..(365): n is a, c, g, or t
  misc_feature (367)..(367): n is a, c, g, or t
  misc_feature (376)..(376): n is a, c, g, or t
  misc_feature (385)..(385): n is a, c, g, or t
  misc_feature (400)..(403): n is a, c, g, or t
  misc_feature (406)..(406): n is a, c, g, or t
  misc_feature (421)..(421): n is a, c, g, or t
  misc_feature (432)..(432): n is a, c, g, or t
  misc_feature (437)..(437): n is a, c, g, or t
  misc_feature (461)..(461): n is a, c, g, or t
  misc_feature (466)..(466): n is a, c, g, or t
  misc_feature (495)..(495): n is a, c, g, or t
  misc_feature (499)..(499): n is a, c, g, or t
  misc_feature (520)..(520): n is a, c, g, or t
  misc_feature (538)..(538): n is a, c, g, or t
  misc_feature (548)..(548): n is a, c, g, or t
  misc_feature (837)..(837): n is a, c, g, or t
  misc_feature (906)..(906): n is a, c, g, or t
ataagcttgtaccaagcataagcattgtaacaaaagtgcaacttttcagcaaatcctccccaaaagatattttaactcaaaatatcattagcacatattttctccctacaaaaatagcatgtnaganatcattaattgnatgtattaacaactatgtacataaganccaccttgtaggctaagantttaacgttgtttaaacacagcgtttgangcaaacantagcaacancagcagcaaatgcaccaaactnacgannagacccagatatatttcctnactnatagtnagactgttgtntctnaccccttanataacatnnaagtgagatttntnacagtgctacnttgggaacanactaaaantntgttggganggtcttggnttgggcgtttttatnnnnggnttttttgtggttttntggtttttggnttggncttcagaaaatttattgatttggngattngttggtttcataggtttttattttatatntttnttgcatttgttattttaattngtcagttaaatgtttttntttatttttnattttttatagaatataggttatattagtttggtcttgttttttgttgttgttgttttttgttttgttttgaagttcagtgcacttttttttacagtaagattacaaaaatttaggaacatgatggattaatgagagtgggaatagatgcacttgagatgtgtatgtatagatacctatctatggataaatagaaatctgtacagatagatatctatctatatatggacttagaagaaattaagatgagtccattaattcatggtcaatttctcaataaagtgttagcnaatgtactaggaatgattctggccttctcatccatctccttccctgacttagttctgacgatggcccan

SEQ ID NO: 497686 - DNA, 582 bp, Homo sapiens
gtatccctctcagtcttaactagacaactgtgtgcttttgtgtctggccctattgcatttactgtgctcatgctgaaaggaaagtaacagctttagaaactgttgaaaataaaataggaaaacaggctgggttgaattcctttgctgggaattgttttacagctcttcagtggtctttctagccagttattcctgtgaagaattggactttgaggagctaaagctttgaatgggggctgggtgcaggggcctgggagtggagagtctgctttcagatactttaacctcggagctgtgacctttgattgtagcaaacatcgatttcaaaagcttcttttgctttcagtcacaagcctgcgtaccttactgcgagactgccaatgcttcaaagatgtatgtttgaaaaagttctttcatagtttttatgaaatttgggaagttgtttacttaaacaaatgcacaagaaaataattcataaaaatactgaatatatatgtgcaaaatttttcttagctacaataaatgttcaacatttttctaataaagattttttttctgagtaaaaatatgcattttaaagac

SEQ ID NO: 497687 - DNA, 123 bp, Homo sapiens
agaaactactccacctctgtgctgtccacctcctctgtgctagtcacagcacagaggaggaccggtcttcggtcacgggtatacgagtagctgcgcccccctgtgatgtccacctcctctgtg

SEQ ID NO: 497688 - DNA, 701 bp, Homo sapiens
  misc_feature (171)..(171): n is a, c, g, or t
  misc_feature (198)..(198): n is a, c, g, or t
  misc_feature (204)..(204): n is a, c, g, or t
  misc_feature (437)..(437): n is a, c, g, or t
gggcgaagcctgtccaagagatattttaatatttcaaacaacatatgggagtcattgtccaaaaacggtcagaaaggctttcaaggctaattacaaatggttaaatgtgtaaagaatatggttgtttaactcaactatcatgacaaccctatttatctcatattaatccanagtctgattggcaattatatgtctctnataaanaatggaaggcattcagagagtcagagggtctgaaatagcttctaacttgttaactggtctctgcttctcctcttgtcccattctaatccagtctccgtgtggaggcagaaagatcttcaaaagctcaataggatccagctagtctctagcttaaaccccttcagtggcttcccattgccctgaaagaaaaccagctcttctccaggttctgaccctgcttttttcccagtctnatctagtttggctctttattgtgctcccacacactggtcatgttggtcttttacttcctagaaagcagctacatgaggttttctcccaatagggcctttgcagcaggtgttccttctgacagtgctttgccctcagccttgcctgtgcacttgctccctcattagtcttcaccgtttcagctgaactgatgcctaggaaagcagctaaatcggttttaggtttctcacctctgccttattatacgtccacggaccctgtttata

SEQ ID NO: 497689 - DNA, 1003 bp, Homo sapiens
  misc_feature (498)..(498): n is a, c, g, or t
gtctgtggtagcttttaggctgctcctaacccaccatttattgccttctgagaggtgggtgaggacaagcatgtgcctgtgtgtgtgtgtgtgtgtgtgtgtgtgtgtgtgtgtgtgtgtgtgtgtgtgcacgcacgtgcgtgtgtatagcccacctgagtggcggctcgcgcgagagagaactgacggcgtgactactctcggctcaaacctaggaatagagagcgtcgtctcgtcttgagagagagtacttttctccacgagccctctggacacgtgtgagagggaaacgacaagggttcccttggatatgtgaagggtccgttggctctcatctccatcatgtccccaccagaagcacttcaccaactagctggctggctgtccctggcgtgggcagctgctgctgctccctaccagaaagcggactaaaccagagacacagctgtaccaccagcacgtgctacctcctttctccctggaaaagttgaatagtantctccaagagggccttggaatagtcggcacaacagggtgactaagcggacgcagggctgctgtgcgtgcatcgtcgtcctcttgcaatagtgtactaaatataaggcgcctgttggttcccaaccccagatgtccagagaacaatagtgccacgacacgcttctccgccatgtggagagatgaagaaccccagctggggtcacgtaaaggaatcgcaggtcggaatgagaggaccagagggactcccatgttctaagcacctgttcctggacagggctctaggccaacgctctctaaagcatcatctctcctttcatctcccctctaaaaaaccagagtgcacgctggaaagtacatgttcttgtgctccgtgaccagagctcgaagagcgcagaagattgggcccagtgataacgccggcagactcgagcggccagccaatcgttgtcgcacagcccgtgttgggggctgccctttctggctccacgaccagttacaggactcc

SEQ ID NO: 497690 - DNA, 818 bp, Homo sapiens
ctatcaacaaaggagggggaatcaaaggctgggcgaagaggcaggcaggcgccggtgacgctgctgggcaagcgggctctgcagtagcatttgtggcgaccgtggcagtggctgtgactggaagcttctggaaatggcggcgatgaggacccccacatagggtattcacctgttatttttacacggggtgggtggacgagcgtgatccaactcaggcaaaatgacgctgcgaccgcagcccgaggactaggcgaagttcccccgctaagccggcggcggctgtctggccccgcaccaggccggagaagctgcacctacgcccagagcccgctggtcccccgtctcaggtggggccctgggccccgcccggaaagcgcggtagcgtgcacctgccctggcaccagggggtctagagcgcgtcccctcccagccacgccttccagtggcctttttaaagaggaattcagtgcaccctcccacacgtagtgttggggatttgagagggagctgctcaggtactaggaagggtgccggaggaaaattgaccgtcgcagcgtggcagcagcgtgtactcactcccttctgggcgcgttatttacgtagaggttaatctgcaacaacagcgtctgtttatgacttagtgcatgcagttacaagtttatgttacactgtcctttaacgtcttgatgaactgagggttcaggtgtgatcacagcagatgaagtgacattcagacctgacagggacggcgaggtcccatcaaattactatgtaaagcataaacctgcattaaagatcaggagtttttcctttaaaaa

SEQ ID NO: 497691 - DNA, 444 bp, Homo sapiens
gccagggtggggccaccactacagaacccctctgccctggccagctgtggggctgccgaaaaggggaggcttggcaatcccagatgctgcagaaaaacagatgtgtgggaagggcgtggaactcagcagtgccagcctcctgcaggcccctgaacactcctgtcccgggtgccagtgtggagcatttgcctttcagaggttgggtcccttagggttgaactccaatctgacggctgaaggacaggttccctactcccctggtgtctgtctgttaatccctgctgtgagctctgggcctgataggaaagtgtgaagttgtgtctgaggatttggtgtttgcagcctgtcattgtcggagcaatccagagctgtaccctccagcatgcagccgccagccatggtgatcatttattaattaattaaagtgaaatcaaggtaacaaaa

SEQ ID NO: 497692 - DNA, 279 bp, Homo sapiens
  misc_feature (73)..(73): n is a, c, g, or t
  misc_feature (78)..(79): n is a, c, g, or t
  misc_feature (102)..(102): n is a, c, g, or t
  misc_feature (108)..(108): n is a, c, g, or t
tcgcactaaaagaagaaataaagagatgcatggggttgcggatatttacctctgtgcccaaacgctgaccacnccctnnctgggtaggggggggggcttaanaccttnggtgaacttcactgagatcattcttccctaagcagtcaccaaaaaatttatatattttgcgcatatacatttccatattataattatagaagatgtgtaatctatttagatgtgaattaaaggagacaaacaggggggggaaaaaaaaaaaagaggggctcggtggcctca

SEQ ID NO: 497693 - DNA, 375 bp, Homo sapiens
  misc_feature (47)..(47): n is a, c, g, or t
ctgcccccagccccttacagataccccattggtaaggtccacccaantgggctgtttccccctcccatagattaagccccaaaggccaaaaagtaaaacccgctaccccaaacctgcctgtaactgtttgaccaaaggccagctgtcccaggatgcggttaaaacgttttctttgcccaaaagaactggcaagaaaaacatttccaggaagcggtcagacacatggcccaaagggcccccccccttttttttttccttccccctgatccagttttatgtcctataaaaccttgctttagcctataagtggggctgccttttttgcttttgtcaaaaggtagccaggcagggctggcaataaatcagcttgcctga

SEQ ID NO: 497694 - DNA, 211 bp, Homo sapiens
caacatttgcggagagacaggtctgctgtcttgccaggctggtcttgaactagctgaactaaagcagtcttcctgctttggctcccaaagtgctgggattattggaatattagaaataagggtcagggttgtttttttaagttattcctttaaatttgtttttgttatttgtcctgcaaaatgttgcggggtaccggagctccgaattcgt

SEQ ID NO: 497695 - DNA, 154 bp, Homo sapiens
ttccgaattattgaatcttcttctgtaacatcacaatcttcctggttttcagaataaacgctcttctcgctcgcctctctctgcactcactcccacctcactcactcactctataataaaatgtttgcactcaatttatatagtagtgtttgtc

SEQ ID NO: 497696 - DNA, 922 bp, Homo sapiens
gctgttttccagagcttggccaagtgcagcaaatttggagatgacctgtactccggctgtttggcagcagtccttggtaccaagctggaggtccagttctggcacaaaactgtaggcatcctgccctctaactgctcggatatctggcaggttctgaatgtgaaccagatagcggtttccctggaccagtcggcccaacgcttcaagcagctacagaggaccactccaaatgtgtgcgtgtccccgaaagggccctggacctgcgtgggtgacatgaatcggaagcaggagaggagcaacggggtgtgggcacacttgttgttgcccaggtgtcaagtcctctggtgaaaagccttccagccgctgtgacagaaactaccagcccgtgtaaatggcatggccaggaagccgagagagtgatagatctaacccttgatggcaggtgcatgtggctcagcgtattgtgattcccagcagttggggacgccaagggagggaggatcacttgatactcaggaattcgagaccagctggttacggtagtggagaccacattgtctactagaagcttaggaatacagttcggcaggaacggggataaattgctgtagtccccagccattggagccagaggatcgatgtggacctggtcgatcatggtcgcagtgaactatgatgacgcccactgggtcacgtagcaagactctgcttcaaaaacacggggggcgggacagctggtgccgggctacatcttgtaccccgatttgggggtggcctggcagaacttgggtcgggtggaaccctgcaatgggaactcatccttaaagttgaatacgactggggggtggggcaacccgagagagggaactcctcggcgtgtggtgccagcttgcgtgctgtgaaaaaagcgcgccaatgggta

SEQ ID NO: 497697 - DNA, 385 bp, Homo sapiens
tctccaggctgcactgcttatacatcaactatcccaaaaggcatgtcacattcgctgtcatcgtgcactatctatcacatggaaattatagaagaagaagctttcttggcttggaaagaagatataacccaagagttcccgggacaaggcaaggctttgttccaggtgaatcagtggctaacctggttagaaactgctgaagaagaagacatcagaggacgacacgctgactaaagaaccagccaaagccttaaattgtgcaaaacatactgttgctatgatgtaactgcatttgacctaaccactgcgacaattcattccgctgtaatgtttacacaatatttaaagcagaagcacgtcagttaggatttccttctgcataagg

SEQ ID NO: 497698 - DNA, 1041 bp, Homo sapiens
cccgaatagactcaagtctttctaatgcccacgatgtgaatgcccactgtgtactactaaacaatgcaggcaggccaggaagtagctccatttcagagaggaagacactgaggactgaaaacgtgaactggcttgacagaggcaagaccagaatccatgtggcctgatctgaatacaccgtggatgggcaggggagcactttgcctcttactaccaggtagagaccacctccagaaatcattactgcccaacggatgaagtaccatcgtcctgagaagctggagaattgacacaggctgcaaggaacatctccccttccacacttgcacaggactctacctctgaccaccacgacagttttcccactcgcttctgcagaatatggtgataaaattacaagaagaagtctggatggctggaagattgtagcccttgaagccagtaacactgtaaaggaagacactattcctgtgccttctcatatcgtggcttcttcagggcaatttccaccgaccacaactggtgaatatagcaccagccctcgagcaaagtatgaagcaaaggtccagcaaggctccctgcgctctctgcattgccctcacaaacagtgtcccaggcacgagaaacaggaacccgcataaacagctgggtacacgatcaacaccgaggatggcgtcagacaagctccgaatcccaacactcggcctgagaatacccgagaatgccacgacatccctcctacaccaaataataacaaactagggcgtgcacacaggaacggtgcatgccccgaaaaccaacggacaacaggctccacaacaggagaagcccacaacctggctgcgaacacaaagcagagctccacatctaaacgaaagacatccatcgaaagaaagacatcacagacgacccacagcgctccccgtcaaaggacacagcgagccacgacaacgcaggaagctacaccgggacggcgggcaagcaacaaacagcaagcatcgactaagcacacacaggcaagggcaaggacatccacgccaa

SEQ ID NO: 497699 - DNA, 759 bp, Homo sapiens
  misc_feature (517)..(517): n is a, c, g, or t
cagggccgatgtgggaatcctacttatcgctattactcaccgcgagcgccaccctcgtgaccttactgcattactgctgatgcctactaacccgacctgtgtgctgcccgatgtggggccagactaatctttctaaaggtgagacttgagcagaccataccccctgcctggcaccttgtgaggatccctgatggccgcattggagtcgaaaccctctaacatagccttcatgattgtaatgactgggccccttccaggccgacataatgctgctctgacattgttcagcgacacagagttactgtcaggaatgacaggtcctggaagtagctgatggctctgtcacgcgacattccgtggatatgaaatatgaagtggttaagagccacacctatgaggtcaaagctcagttccaccactactagctgtgtgaacatggactgcttacttagcctccgagaaccctatgccccattagcggagcttgatagcagcagaattttccacatggagttgncatgaggatcaactgagaatctcagagagagctctgagcacaggacttgagcaaaggatagttgagggatgaacaatgctcgacgtctgcgcccagtcgattctagactcgcgtaagcttaatcatgcggacgtatacagagctgcacttgggcaatacgtcttatagagagcctgggtacaattacactggccggtgtttctacaacgtaatgactgtggaaacccatgggggttcccctt

SEQ ID NO: 497700 - DNA, 130 bp, Homo sapiens
  misc_feature (1)..(1): n is a, c, g, or t
naggatcttcccagctactcaggaggctgcacatgagtaatcgcttgaacctgagatgatgtgttggagtgaaccgagatcgtgccattcctctccatcctgggtgatagagtgagaattcatctcaata

SEQ ID NO: 497701 - DNA, 381 bp, Homo sapiens
ataaaaaggggaaatttggacacagaggcaagcacacagggagagtgccaagtgaagatgaagaaaaagatcagagtgatacaaagaagtcaaagaacaccaaagattgccaacaaaccaccagaagctaggagaaaggcctgaaacatatccttcccgcatgccttcagagggagcgtgggcctgcagacactttgatctcagacttctaccctatggaactgtgcaaaaataaatgtctgttgtttaagccattcagtttgtgttacagcacaaatgtattctatttaggaatacatcattctaaataggaaatttttttaataattaagtattttcctctccttgggggcacttgggtaacttctaattctacttttc

SEQ ID NO: 497702 - DNA, 442 bp, Homo sapiens
taaaaacccaaccgggggccttttttaaaagagaaaagaatttttggggggtacacaattataacacaatccctcacgctttttacaaacgggtttttataaaggtccactttaaaaaaaaaaaacgctttttgggcccccccaaaaatcacttttttaaaaacaagttttttttttaaaggtccccgcccccccaaacacaaaaaattccacggtttttgcgcacacttttaaaaggcgcgggatttgtttcgccctttttatttttataccccatcccgcgcggttatattttaaaatcgggttttccacaaaattcacatttttgggcaactcttctgtgcccacaaagtgggggccctaacacgggttctctcacaatcttttatttatccccacaattttaaaattttttaagagttattttccaaatttttaccca

SEQ ID NO: 497703 - DNA, 201 bp, Homo sapiens
tcactacacgtatacgttgcgaaaacagttttattacaataggtaaaacgtgcagtcctatgtaatctgtcagaaggtaatcttaattatacgcttgggatgtgcttctaaactagcaaggctggcaggtggacgggcacgagttccgtctgcatttcagcgtttctccattatacttgttctgggagtctgtgacgctgc

SEQ ID NO: 497704 - DNA, 482 bp, Homo sapiens
aggggattgtggtggactgttggcacacagctggcttagctaggtagaagacaatgggaggtgtgcaagacttgtacgactcatttaatgaagattggagtgaaaggtagcgatagagagtgttgcagacagaaaagggattatatgctgtggttaaagcacaagtccagagggttgcagataagtgcagaagtctttaaaaacaattatatttatcccaacttccagggagactgaattgcttctgccagtcagtaacaccgtcacgctgggagttgccccttgacctctccagtctaagctcctgtccctgtaccaaaataccataacactggttagcttatagagtacagatgtgatttcttacagtacaggagtctggacttccaagatcatggtgccatcatggcctagttcagttgaggcccctctcctgtgatgcagcgcgcagttcctcatgttctcactgtggtgaaggggag

SEQ ID NO: 497705 - DNA, 341 bp, Homo sapiens
  misc_feature (33)..(33): n is a, c, g, or t
  misc_feature (62)..(62): n is a, c, g, or t
  misc_feature (66)..(66): n is a, c, g, or t
  misc_feature (78)..(78): n is a, c, g, or t
  misc_feature (90)..(90): n is a, c, g, or t
  misc_feature (105)..(106): n is a, c, g, or t
  misc_feature (115)..(116): n is a, c, g, or t
  misc_feature (132)..(132): n is a, c, g, or t
  misc_feature (150)..(150): n is a, c, g, or t
  misc_feature (156)..(156): n is a, c, g, or t
  misc_feature (160)..(160): n is a, c, g, or t
  misc_feature (220)..(220): n is a, c, g, or t
  misc_feature (237)..(239): n is a, c, g, or t
  misc_feature (242)..(242): n is a, c, g, or t
  misc_feature (245)..(245): n is a, c, g, or t
  misc_feature (251)..(251): n is a, c, g, or t
  misc_feature (278)..(278): n is a, c, g, or t
  misc_feature (288)..(288): n is a, c, g, or t
  misc_feature (303)..(303): n is a, c, g, or t
  misc_feature (315)..(315): n is a, c, g, or t
aatgcgcatttttggttttggtgaaaatttaanaaagtgtgaaattaattatttgtctttgnaaanaatgatgatgcnaaagcaagaacnataaagtactgatgnnaagtacttnnagaatgggctctgtanaccctgctctctgggtcnaaatcnagcncttaagttttaaataggaaaatatgaggtgagtaaactgagtttgaaaaatgtgcttatnagaaggtgtgggatgtnnnaanaanttcttnagagcaaaagaattactgttccttccnaaataatttnactaagggtctgaanaactaatatccnaaccattaaagaaaaaggagaattaa

SEQ ID NO: 497706 - DNA, 121 bp, Homo sapiens
gagaaacctggaggtccccgtaatgggtcctttagggtggggttgtgggagcctcacctccggctcccgacgtgttagagttcaccgaccatggtaggcagtggcttcgtgggcggcctct

SEQ ID NO: 497707 - DNA, 436 bp, Homo sapiens
  misc_feature (291)..(291): n is a, c, g, or t
  misc_feature (342)..(342): n is a, c, g, or t
  misc_feature (397)..(397): n is a, c, g, or t
gcaggaactgtatgccatgtggtttagagtcacacatcctcacacgtctgttagtgtgaagaagtgcaccagtacctctcaaactcttatatcaatgtgtcctcatggcagaaggcagcctttctcttaaatcagaatttatcagaaagaggacaacccaagcctcatttcagagagaggtctggtatactcttagaaacctatgtgactgtcatccctaagtacattcatgttttttctcttgatctcaagagaatcaagggaaactgatgcttcagaaagatgtcccanatttatcctgtggcactcaaagtacccaaggttgagataatatgaggaagnttcaaggtgtcaagttcagtttcccaagatctattccacagaagatgagcaaatntcacttcagagaccactgactgaaggagagtctggtcat

SEQ ID NO: 497708 - DNA, 258 bp, Homo sapiens
agcccttacctaacacattcctcaacccatctctctaaagaccggtcccagtcgttaggtacgtcatccctgactcaccccagaatacgttaaggactggctggtccatctctgaagcccacctgagcctagccagggcccttccctagggggtaagatctggtccaacccgaaccaccacttatattgggacatggaacactggcagcaatcagaattcctgtggtcccatccaaccagacctttctccttcctccc

SEQ ID NO: 497709 - DNA, 290 bp, Homo sapiens
acgggggatgaataacttaccaagggccttcccccttcttaaagctggggccttggggataaaccagagcctgggtgtcatcaagccacgcatgtgctctgggccaaagacaggagggccagctggctgctactgcttctgttaacacttcttggtggcagcagcagcacgcagagctctggtccccgccagagcctgcttcaatcctcagaagtcagccttgtatgtgggaacagcgttccatgcagtatactaacaaccagttgataaccacctgctccactgaagaa

SEQ ID NO: 497710 - DNA, 278 bp, Homo sapiens
  misc_feature (14)..(14): n is a, c, g, or t
  misc_feature (119)..(119): n is a, c, g, or t
  misc_feature (210)..(210): n is a, c, g, or t
  misc_feature (248)..(248): n is a, c, g, or t
atctgagagcacangagctttttttaaaagaggccagggcgggcggagggaggctgtggagagagcgcggagaactaacagacgcagcgcacggccacagacaccctgggcatccaccngagcgcagccggagccagcagagccggaaggcgcccccgggcagagaaagccgagcagagctgggtgcgtctccgggccgccgctccgggngccagcgccctccccatgtccctgctcccacgccgctncctccggtcagcatgaggctctggcggccc

SEQ ID NO: 497711 - DNA, 104 bp, Homo sapiens
cagagaaagcaggagagatctagaagcgacacctagcatcacgattaacagaactagagaagcaagaggaaaaaatcttaaaattacatagtgcagaggaaaat

SEQ ID NO: 497712 - DNA, 494 bp, Homo sapiens
  misc_feature (15)..(15): n is a, c, g, or t
  misc_feature (143)..(143): n is a, c, g, or t
  misc_feature (147)..(147): n is a, c, g, or t
  misc_feature (241)..(241): n is a, c, g, or t
  misc_feature (274)..(275): n is a, c, g, or t
  misc_feature (279)..(279): n is a, c, g, or t
  misc_feature (288)..(289): n is a, c, g, or t
  misc_feature (298)..(298): n is a, c, g, or t
  misc_feature (303)..(303): n is a, c, g, or t
  misc_feature (310)..(310): n is a, c, g, or t
  misc_feature (314)..(314): n is a, c, g, or t
  misc_feature (322)..(326): n is a, c, g, or t
  misc_feature (328)..(328): n is a, c, g, or t
  misc_feature (333)..(333): n is a, c, g, or t
  misc_feature (335)..(335): n is a, c, g, or t
  misc_feature (349)..(349): n is a, c, g, or t
  misc_feature (367)..(367): n is a, c, g, or t
  misc_feature (382)..(383): n is a, c, g, or t
  misc_feature (386)..(386): n is a, c, g, or t
  misc_feature (456)..(456): n is a, c, g, or t
gggaaaatgccaaanagccggcgatcgcacccagcccacctgtcgtggaggtcccttccttctcaggccacagaaataaacccgtgtactgcttattgttagcacaacatcaccagaaaacgataacgacagccaagcagganaganagttaagtagtacttccacactcccaaactcagggagccctataaccttaaggagggagcatttgctacacaaaagcactatccacagccaggnatgatgtagccacaaaaataaataaggagaaannaaancctaaaatnnaagtccctnaaacntaaaaanaaanaaccctgnnnnncnggttngnttaggatctagggngaatatgtacaccttgtngggagagatgggggnngcncaagaaagctcctcagggggggtgaagagggagcaagatgtggtgctgaggggagcttgcagttcattgntgcagtaggaagagggaatgttcttcagttcattgcgc

SEQ ID NO: 497713 - DNA, 226 bp, Homo sapiens
aagccagttctaatagggggacaagtgactaagtgcacatggtggatgccttggcgatatcaggcgatgaaggacgtagtagcttgcgataagctgcggggagtgagcaaacacacattgatccgcagatttccgaatggggaaacccggccgaaaggtcatcgtattctgaatacatagggatacgaagcgaacgtggcgaactgaaacatctaagtaactacag

SEQ ID NO: 497714 - DNA, 656 bp, Homo sapiens
ctagcacgatttacgcaagtggccaagcccagcccttgtcacagccagaaacgttggtcatgccatggggacacataaatgcatcggtcatgaatacgaggccatgctacaagtacattgtctcagatacggaccagggaaatgagatgctttaacgcgcttaagctaaactatagattacattctctgagaccgagtagttgtcaactacgaacacttatggcttagctaactctgaatgtgaggaatttgactcaatgtgggtataagtccaaatggaattttatcctattaggactatcataactgaacataatcggtcccaatatgattccaatcgggtataagacgtatggtcaatgtcgaccaactcagctatttccgttctttacaggctgattcatggtaatgacttcacaagataaattggacatagttgcctaaatgatccagtgactctactacaggaccaggtgtatctaaggatactagtggtatactctcgtagaaaccatgttaaacagcttgttaaataatcccctattggctcaatgctgacaattggagcagcccatcaccaaggttcattagtacaaattgtaaagtcttgaagggtttgggcattgaccggagtgaaacaggaggttaaatttgca

SEQ ID NO: 497715 - DNA, 861 bp, Homo sapiens
catcctgaaaagttccctgagctaccggctgcctcctgcttcccgcctgctccccggcccaccccaactctggcacccaagcgtgcctggccctcagacacagagatcattgtcaaccaggcctgtgggggggacatgcctgccttggaaggggcaccccataccccgccactgccacggcggccccgtaagggaagctcggagctgggctttccccgcgtggccccagaggatgaggtcattgtgaatcagtacgtgattcggcctggcccctcggcctcggcggcttcttcggcggcggcaggcgagcccctggagtgccccacctgtgggcactcctacaatgtcacccagcggaggccccgcgtgctgtcctgcctgcactctgtgtgtgagcagtgcctgcagattctctacgagtcctgccccaagtacaagttcatctcctgccccacctgccgccgtgagactgtgctcttcaccgactacggcctggccgcgctggctgtcaacacgtccatcctgagccgcctgccgcctgaggcgctgacggccccatccgggggtcagtggggggctgagcccgagggcagctgctaccagaccttccggcagtactgtggggccgcgtgcacctgccacgtgcggaacccactgtccgcctgctccatcatgtagtagcgcctgcctgcccgccactgcccgctgagcctcgctcgctgcttcttcagggacccggccctgccctgccgcccgctgacccttccttccccaccatggcttccggccccaccccgagtggcattgtcgctgcagccaactttgccattaaaactctttgccaaagttaaaaaaaaaaaa

SEQ ID NO: 497716 - DNA, 102 bp, Homo sapiens
ttcagtgcatttttgcaagcaacgcattctcggttctgcaacatttgtctcacagttggagccacttttggtgagtctctctctatgatctctcttaatttc

SEQ ID NO: 497717 - DNA, 1140 bp, Homo sapiens
gccatctgttttcaaccaactatttttgaggaattatcatgggaaaagaccaggcttttcccaggaatatcccaaacttcggaaacaagttattgggagtgaagagaataacttgtttccgaagtttgggatattcctgggaaacaagttattgggagtgaagagaataactaatgctaagaaatgctgaaaatcaaagtaaaaaattaaagcccataaggccagaaactccttttgctgtctttctctaaatatgattactttaaaataaaaaagtaacaaggtgtcttttccactcctatggaaaagggtcttcttggcagcttaacattgacttcttggtttggggagaaataaattttgtttcagaattttgtatattcgtaggaatcctttgagaatgtgattccttttgatggggagaaagggcaaattattttaatattttgtattttcaactttataaagataaaatatcctcaggggtggagaagtgtcgttttcataacttgctgaatttcaggcattttgttctacatgaggactcatatatttaagccttttgtgtaataagaaagtataaagtcacttccagtgttggctgtatgacagaatctccgtatttgggccaaggtgtttccatttctcaatcagtgcagtgatacatgtactccagaggggacagggtggacccccttgagtcaattggcagcaagacggaacggaggcagaactgatggcgaattccctctcacccgggaattctcccctttcaaggaaagtgaacctttaagtaagggctcaattcctttattggagttcaatcctcacactccaaggacgacgtatttatcacgccagttgggtggactacggcacgagagtagtatccctacgggaaaatagggcacctgagacatagggaacgaaaggctattggcccatgttaccaataacggttgcagaggacaagacgaacagcggacccaaagagagaaagaacaactcttagctgacgaatcacacactatagtctgtcagacaacaacgagggcgttccactgcaaaaacggaaacgcagagagaacgactgtgtcaaagaagcgtagtctcatttgtctgagtatatttcaggagagt

SEQ ID NO: 497718 - DNA, 715 bp, Homo sapiens
cttagtgtatatctatgtgcctttattgaggaagcaccatatataacaaacacgttatagtagatgggcgcacatgcactataatgatctaaagaagctacagatgtcatagtagtatgtcctgctggacaaagttgctccagatctggaatgccagtttgacctgggtcttctataatagttccgtataagcccctcgtttgaaatctctgtatattggattcgtagctaaaattgttctctgtaaagtattctgaatcctggtacttaagcagtccgaggggtataagctataacctcgaaggaaagagactagtaggtagaaaaagatatttggtggaataagcatgtgtttacggtagtaaggtacagtatcttgggtgaagacaccagactgaagtaaactagttggtgcatccaagttaataatagtttggtaggtaaccaatatgtaatcaaagcttctaggtgacttgagatggggaagctcgctatatcatcaatttagcagccgtttgctgacttgtaaccattgcagtgtattggtcttattatacccacttaatatcaactttattttttcaccaggtcacacaattttaattttctacaaaaataaacatttcttggaatccaacgcaccactggtattgctccagcacggggttgaacttcatgcaaccagtgtccatcaactggttccacgtcaaaaagg

SEQ ID NO: 497719 - DNA, 194 bp, Homo sapiens
tgctccctggcaggctgcattgggcaatggctgtgagcgcgaggcttaccggcagcaggatcgagaacggtactggtgttgtcacgattggggtatcgcgaggacccccatcgtgataatcccgccgagagccagcatgatggtgaccccagcgacgacgtcctgcccagaaccgtccggttcaacgaaggatt

SEQ ID NO: 497720 - DNA, 939 bp, Homo sapiens
  misc_feature (750)..(750): n is a, c, g, or t
  misc_feature (788)..(788): n is a, c, g, or t
  misc_feature (791)..(791): n is a, c, g, or t
  misc_feature (795)..(795): n is a, c, g, or t
  misc_feature (797)..(797): n is a, c, g, or t
  misc_feature (801)..(802): n is a, c, g, or t
  misc_feature (804)..(804): n is a, c, g, or t
  misc_feature (808)..(808): n is a, c, g, or t
  misc_feature (810)..(810): n is a, c, g, or t
  misc_feature (817)..(817): n is a, c, g, or t
  misc_feature (844)..(844): n is a, c, g, or t
  misc_feature (846)..(847): n is a, c, g, or t
  misc_feature (864)..(865): n is a, c, g, or t
  misc_feature (869)..(869): n is a, c, g, or t
  misc_feature (884)..(884): n is a, c, g, or t
  misc_feature (891)..(891): n is a, c, g, or t
  misc_feature (903)..(903): n is a, c, g, or t
ctgatctcaaactcctgaactcaagtgattcacccaccttagcctcccaaagtgctgggattacaggtgtgagtcaccatgcccggccatgtatatatataattttaaaaattaagatgaaattcacataaaataaaattagccattttaaagtgtacaatttagtggtgtgtggttcattcacaaagctgtacaaccaccaccatctagttccaaacattttctttttttctgagacggagtctcactctgtcacccaggctcgagttcagtggtcttgaactcctgatgtcaggtgattctcctagttccaaatgttttcattatctccccccaacaaaacccatacctatcaagctgtcactccccataccccattctctttttcatctcagcccctgtcaatctggttttgtccttatggacttaccaattctgaatatttcctataaacagaatcacacaatatttgattttttttttaaaactaagccttgctctgtctcccaggctggagtgctgtggcgtgatttggttcactgcaacctccgccttccaagttcaagagattctcctgcctcagcttccaagtagctgggattacaggcatgtggtaccacgcctggctaattttcttgtatttttagtagggacatgttggccaggctggttgtgagctcctggcctcaggtgatccacacgcctcagtgtcccagagtgctgatattacaggcgtaatatgtgatcttngtgtctggtcctttcacgtgaacgctatttgaggtcgngcntgtngnaccnncncacngntgtgttnccccatctcatccagtgctctctatgncnntataaaagctctgggcnngtcngacggggttgcgggntggccgnagtcccaccggnatacggaggccccggggaaaaaggggataccggggg

SEQ ID NO: 497721 - DNA, 895 bp, Homo sapiens
ctgatctcaaactcctgaactcaagtgattcacccaccttagcctcccaaagtgctgggattacaggtgtgagtcaccatgcccggccatgtatatatataattttaaaaattaagatgaaattcacataaaataaaattagccattttaaagtgtacaatttagtggtgtgtggttcattcacaaagctgtacaaccaccaccatctagttccaaacattttctttttttctgagacggagtctcactctgtcacccaggctcgagttcagtggtcttgaactcctgatgtcaggtgattctcctagttccaaatgttttcattatctccccccaacaaaacccatacctatcaagctgtcactccccataccccattctctttttcatctcagcccctgtcaatctggttttgtccttatggacttaccaattctgaatatttcctataaacagaatcacacaatatttgattttttttttaaaactaagccttgctctgtctcccaggctggagtgctgtggcgtgatttggttcactgcaacctccgccttccaagttcaagagattctcctgcctcagcttccaagtagctgggattacaggcatgtggtaccacgcctggctaattttcttgtatttttagtagggacatgttggccaggctggttgtgagctcctggcctcaggtgatccacacgcctcagtgtcccagagtgctgatattcacgggcatctaatagtggtgactctttggggctcgggctgcgcttccagtgtggaagtgcatattttgggaggtccggtgccgtgtgtgttagaccccacgagtcccacacacgtgcttgtagctcttccccccagtcctctcattccccagtgtgctctcctcct

SEQ ID NO: 497722 - DNA, 213 bp, Homo sapiens
caactgagcttatgttactgagatgatttttacaaagtccctagataaccacaggactggtggccaatgccagggaatcaaccctgtgctcgtagagttagaactcaaaaccccaccctcaacctccagggaaaggagaggggctgaaggttgcactgataaccaagggccaatgacttaatcaatcatgcttacctaatgaagcctccataa

SEQ ID NO: 497723 - DNA, 886 bp, Homo sapiens
  misc_feature (697)..(697): n is a, c, g, or t
  misc_feature (735)..(735): n is a, c, g, or t
  misc_feature (738)..(738): n is a, c, g, or t
  misc_feature (742)..(742): n is a, c, g, or t
  misc_feature (744)..(744): n is a, c, g, or t
  misc_feature (748)..(749): n is a, c, g, or t
  misc_feature (751)..(751): n is a, c, g, or t
  misc_feature (755)..(755): n is a, c, g, or t
  misc_feature (757)..(757): n is a, c, g, or t
  misc_feature (764)..(764): n is a, c, g, or t
  misc_feature (791)..(791): n is a, c, g, or t
  misc_feature (793)..(794): n is a, c, g, or t
  misc_feature (811)..(812): n is a, c, g, or t
  misc_feature (816)..(816): n is a, c, g, or t
  misc_feature (831)..(831): n is a, c, g, or t
  misc_feature (838)..(838): n is a, c, g, or t
  misc_feature (850)..(850): n is a, c, g, or t
ctgatctcaaactcctgaactcaagtgattcacccaccttagcctcccaaagtgctgggattacaggtgtgagtcaccatgcccggccatgtatatatataattttaaaaattaagatgaaattcacataaaataaaattagccattttaaagtgtacaatttagtggtgtgtggttcattcacaaagctgtacaaccaccaccatctagttccaaacattttctttttttctgagacggagtctcactctgtcacccaggctcgagttcagtggtcttgaactcctgatgtcaggtgattctcctagttccaaatgttttcattatctccccccaacaaaacccatacctatcaagctgtcactccccataccccattctctttttcatctcagcccctgtcaatctggttttgtccttatggacttaccaattctgaatatttcctataaacagaatcacacaatatttgatttttttttttcactgcaacctccgccttccaagttcaagagattctcctgcctcagcttccaagtagctgggattacaggcatgtggtaccacgcctggctaattttcttgtatttttagtagggacatgttggccaggctggttgtgagctcctggcctcaggtgatccacacgcctcagtgtcccagagtgctgatattacaggcgtaatatgtgatcttngtgtctggtcctttcacgtgaacgctatttgaggtcgngcntgtngnaccnncncacngntgtgttnccccatctcatccagtgctctctatgncnntataaaagctctgggcnngtcngacggggttgcgggntggccgnagtcccaccggnatacggaggccccggggaaaaaggggataccggggg

SEQ ID NO: 497724 - DNA, 348 bp, Homo sapiens
gagccatcttagaccgctcttatgacccacagacccaagtcgaccatcctgcggcctgcctttccacaagctccacctccgcgtgcctggcccctgacataccaccctcaggccccgccacctgtaagccccgccaaggggcgtgccactcactgcactcctcctcatcgctgccatcgctgcagtccaagtccctgtcgcagcgccaggtgaggggccgcataagccactggtgcggcactggaccttggtgggtgggccgagcctgcgctggggcctgcgagcatggatgcacatgacgcctgggaagctgcaggctgcaccttactccacgagcacagtagtcac

SEQ ID NO: 497725 - DNA, 942 bp, Homo sapiens
  misc_feature (1)..(1): n is a, c, g, or t
  misc_feature (76)..(78): n is a, c, g, or t
  misc_feature (87)..(87): n is a, c, g, or t
  misc_feature (92)..(92): n is a, c, g, or t
  misc_feature (103)..(103): n is a, c, g, or t
  misc_feature (106)..(106): n is a, c, g, or t
  misc_feature (110)..(110): n is a, c, g, or t
  misc_feature (114)..(114): n is a, c, g, or t
  misc_feature (116)..(116): n is a, c, g, or t
  misc_feature (130)..(130): n is a, c, g, or t
  misc_feature (154)..(154): n is a, c, g, or t
  misc_feature (156)..(156): n is a, c, g, or t
  misc_feature (159)..(159): n is a, c, g, or t
  misc_feature (161)..(161): n is a, c, g, or t
  misc_feature (191)..(191): n is a, c, g, or t
  misc_feature (200)..(200): n is a, c, g, or t
  misc_feature (203)..(203): n is a, c, g, or t
  misc_feature (205)..(205): n is a, c, g, or t
  misc_feature (209)..(209): n is a, c, g, or t
  misc_feature (211)..(211): n is a, c, g, or t
  misc_feature (215)..(215): n is a, c, g, or t
  misc_feature (220)..(220): n is a, c, g, or t
  misc_feature (228)..(228): n is a, c, g, or t
  misc_feature (239)..(239): n is a, c, g, or t
  misc_feature (243)..(243): n is a, c, g, or t
  misc_feature (252)..(252): n is a, c, g, or t
  misc_feature (282)..(282): n is a, c, g, or t
  misc_feature (285)..(285): n is a, c, g, or t
  misc_feature (308)..(308): n is a, c, g, or t
  misc_feature (311)..(311): n is a, c, g, or t
  misc_feature (318)..(318): n is a, c, g, or t
  misc_feature (320)..(320): n is a, c, g, or t
  misc_feature (322)..(322): n is a, c, g, or t
  misc_feature (328)..(328): n is a, c, g, or t
  misc_feature (349)..(349): n is a, c, g, or t
  misc_feature (355)..(355): n is a, c, g, or t
  misc_feature (358)..(358): n is a, c, g, or t
  misc_feature (379)..(379): n is a, c, g, or t
  misc_feature (385)..(385): n is a, c, g, or t
  misc_feature (402)..(402): n is a, c, g, or t
  misc_feature (452)..(452): n is a, c, g, or t
  misc_feature (464)..(464): n is a, c, g, or t
  misc_feature (477)..(477): n is a, c, g, or t
  misc_feature (493)..(493): n is a, c, g, or t
  misc_feature (499)..(499): n is a, c, g, or t
  misc_feature (505)..(505): n is a, c, g, or t
  misc_feature (516)..(516): n is a, c, g, or t
  misc_feature (522)..(522): n is a, c, g, or t
  misc_feature (524)..(524): n is a, c, g, or t
  misc_feature (531)..(531): n is a, c, g, or t
  misc_feature (575)..(575): n is a, c, g, or t
  misc_feature (649)..(649): n is a, c, g, or t
  misc_feature (675)..(675): n is a, c, g, or t
  misc_feature (677)..(677): n is a, c, g, or t
  misc_feature (681)..(683): n is a, c, g, or t
  misc_feature (689)..(689): n is a, c, g, or t
  misc_feature (692)..(693): n is a, c, g, or t
  misc_feature (803)..(803): n is a, c, g, or t
naaattcaaaataagcgtgaaattccagagctattaggaagaaaggagtctgtgtaatacagaaaaaatctgaaannnatgaaaatnaaaanagggtaagaanaanaaantaananatttgaagtaaaanagagaaaaaattgtggaactgtgnanaananaaaatgacactgatgaggaactccaggganattaagggnaanantgcnanaaanaaaanaagggtanaattagaaaanctgnatctttaanaaagtgagatttgtatgcatacactcgggnggnttcattttgcagcccattaaatnggnttaaaancnanaaaggngctcatgcatgtaattaatantggagnaangaatggagtgtaagtggacgngtgtgntgtgcactttgaaaggnagtagttttagaagaatgagaagaaaattacttcctgggcattcattaanaattcaggtganatcctgtacctcnatttataaaaaaatanaaaaanaaaaanacgtacaaaanaacatnanaaataanataaatgagaagttttcaagtatttcaatgggccttgaaaagtntcaaacagtaattctcacaattggttagacaatcatttttttttcttttcttttcctctcatttagtctcagancctaaaatgaaatgcctccagtctcngngagnnngggggnttnngatgaaattaacaagattctaccttaaaagagaaaacttatgtgggcttttcaaattgtgaaaatttgttccctcttataaaatataatctttcccctgctgctggtttntaaatatgggcatatagcccagagccattataaagaaaaaacaaccaaccacaataaactaaggagcctcatctgatggctaaggttctcaggaaaaaatgagaagagcaccttgatcaggaaaggaaaaaaggataga

SEQ ID NO: 497726 - DNA, 350 bp, Homo sapiens
  misc_feature (34)..(35): n is a, c, g, or t
  misc_feature (55)..(55): n is a, c, g, or t
cacacaacaacaaaaagactatttgggaacacgnnagctataagattaaacaaanatgttataatcttttcttgttggggatcatctgttctttaatttcaaactagagtctaagatgatgtagaaaatatgttagctatttcttaaagtgaacttattaaaaatgaggaattgtagtataattccaagattgaagggtgatgaagtatctgttgtttgtgatcttttcccctcactcaaaatcatatgattaagaatgggtgtgaaattacaagcaattaatatttatattatttttgagactgttacagagttagatttgtgattaacaagacaaaattctatcaaaa

SEQ ID NO: 497727 - DNA, 258 bp, Homo sapiens
ccaaggctgcaccaaaatgacaattgccttattcgcattccacctgataatgccatgcttcataatctgggttacctgaatatgtcatcgagtaacctcataagtttaccagcattgctatgaaacatagggtctctcagggaattgcatttaaataacaatctgttacgggttttgccctatgaacttggtcgactcatccagctacaccctctaggtttgcaaggcaatccgttatcacacgatattctcaggtta

SEQ ID NO: 497728 - DNA, 589 bp, Homo sapiens
atcagtgctccagttgccttggcttccagtgttgatgggtctcagagagtcttattctcccttggctgctggcttgcaggaactcaggatgtactaagtcacgatgtgcagatggtagctcctcagggagagcagagcttacacacaggcgtcataagcttcccgcaggccagcatctgcttttgacaggacaaactcacggactgaggggagttagactctaatgagcacaggacgttcctgtggagcgtgatggcatatatcttctcatgtcctggaggacctgagcagcatgtcctccagacagcagtctgctggatgcccagcaggacgtcatagctctgaaagaggctggttgggcctgtagtgggctctgctaattcctttgggtcttcccagaactcttcatacaccagagcgtctgatagctgggggtagccgtttcgcagccagacaaatatatgcgaagaacactggaagattgcgttcggtttcacatgatcgtgcggatgggacgcagagatggcgagtcttcgtcccattagtgatgccccagcaggcatggaaccgacatggttaatatatgtgg

SEQ ID NO: 497729 - DNA, 866 bp, Homo sapiens
cggactgcaggcacatgccaagagctgttcctcacgggctgtgagacaagagcatcttggatgtaggacaatggaagagttacatcccttattggaggaactggagacgctccatccttcaggaccgagtgatgtagagtattccaacccagctcctcttccgcctggatcagcattccagaaaggagactaaccttgatgagacttcggagatcctttctagttcaggataacacaagtcccttgccggcgcagctcgtgtatactaccaatatccaggagctcaattgtctacagtgaagcccaagagccaaaggaatcaccaccgacttctaaaacgtcagcagctgctcagttggatgaaggcttccatgggttaacttggacggccgatgcaggccaaggtggcagtgagagcagatgctggcaagaagcacttacacagagcaagcaggatcacaaggcctccctggactcaaagacttgggggtctcgagcaggaattgcaggaccttggaattgccacagagcccaagggccatcgtgcatccttgccagaaaccgatagctgggaaggtgatccatgctcatagggcaatcatggaatcctgagcatgtagtctgtactcattgcaaagaagagattggactccagatcccatactgtgaaccggagaggcatggcctactgcccaccgacataccacaaataacacatcccacgcagctgcataaggcaccagcacccatcccgggataaagctgcagcacagcaacagacaacagaccatggaaccccaaaagcaaacatacagacccaacaggcgcaccagcgagaaaggagcccaaagcaaccaggagaacga

SEQ ID NO: 497730 - DNA, 259 bp, Homo sapiens
gccaggctggtctcgaacgcctgaccctcgtgatctggccactatggcttccatagtgcagggataacagacattagagccactacgcccggccatatatttgcttataaattcctaatcagatgggtagtttgcaaatgttttctccctttctgtgggctgtcccttcactttattgtttcctttgctgtgcagaacctttatgacttgatgtgatcctcctgtttgtccattttaaatttggttgcctgtgcaaggt

SEQ ID NO: 497731 - DNA, 338 bp, Homo sapiens
  misc_feature (133)..(133): n is a, c, g, or t
tggggaggaaagagggaaaaaggaaaggaaagaagatgattctgagggctccagactttaaagagagaaaagggtcctatctcttttctcttaatgttaaatgttattttgtttgtggaatgttccactcttntaatatatatgttgattaagtataccattatgcatgatttgcaatattgattgacctgtggagtgccttgagcctgtgtgtccaagactctgagtgctgagtgagtgggaagtactaaggagaattgctttcttggaaactccatgtagttcgtggcttttgtgattgaaatagcaacagtaaaagtctggcattgtggaaaaac

SEQ ID NO: 497732 - DNA, 457 bp, Homo sapiens
aacgagatggggagagcgaggaaacctcagagaaaaatatacaatatgcagaaagacgaaatagatgcgaagaaaaagtaaaaggtatcggaaaaaggggaaggaattgtgagtgtaaaatgaaaaagaatgaaatgaatgggaagaagacgataaaatggtggaggaagggaagttacgaagacaggtaagtagcctaaagggtgaaggcaaagagaattgaaatgtaaggggaaaaggagtaatacagggaagaaggatagagtgagggaaatgtgaaaaaaaagaagaacggaagaaatcaaaaataaaaagataagtgcgaaaaatagagaaaccaaggggagaaaattaaaaaagaatgataacaagaaggaaaacgatgaaaaacagtaataaaaagggaagacgagtgagaatttaagaaatggaaaggaatgcaaagatgaagggtcga

SEQ ID NO: 497733 - DNA, 723 bp, Homo sapiens
gactaagttctagatcgcgagcggcgcccttgtgttgtttatcttaaaaggaaaataaccggaaatagcccttctgatcttatccaggtctctttatatgtgctaggtaggcaaatgtgcttgcacaccaagacataagcatgtgtcgtgaggagaagcaggaaggtatctcgagagccgtaaagaaccagtgtgtaatacgtttcttggactcataaacactcggtgggtgtctgtccaccacattatccaggcctgaggggggcagggtggctgggtgataagagcgagggcagaaaactcaggcctaggcgatatcccttaccatgtgtctgtccagtggaagtgtgtttcaaggggcctcttcaaggccccaattcagtctggtgtaagccaagttgtctcagccgtggggaaacacaggtactacattaagtgatggtgaggtttaccattaagtagctgagtgctggaataatccatgtttcattaagtataagttgggtaagatacaacagatggaacgagggacaacagtagctcatttagcagaagggacagtgaacccatgtggggtcatatacatttcgcttacagaatgggatatcatatgagagtccacaccccgttggagttatgctttgaagggcatactatctcatcatcttccggattcaggataagtcggtcagggccatgggagactctcttccctaggaattg

SEQ ID NO: 497734 - DNA, 333 bp, Homo sapiens
ctgatagaatgagtgatgttccacaagtgatcaagagactcctagctgggtgcggtggctgacgcctgtaatcccagcactttgggaggccaaggtgggcagatcacctgaggtcgggagtttgagaccagcctgaccaacatggagaaaccctgtctctactaaaaatacaaaattagccaggcttggtggcgcatgcctgtaatcccagctaatcgggaggctgaggcaggagaatcgcttgaacccagaaggcggaggttgcagtgagctgagattgtgctattgcactccagcctgggtgataagagtgaaactctgtctcataaaaaa

SEQ ID NO: 497735 - DNA, 109 bp, Homo sapiens
aatcatatattggttgctgcttgtacctgccccacaagtggtggctgctctgcagatctctgggaaggctggagggggaaggggacgattagttcttgtgcgtgcgctg

SEQ ID NO: 497736 - DNA, 1018 bp, Homo sapiens
caggccttacacccgcagtcaaccatgttcaagggaacgtgcagttggtatgatcttggaaccacctacgtcttgtgtgggtgttgtatccagcacggaaaagtcgagataattgccaatgatcaggaaagcgaaccactccaagctatgtcaggctattacggacactgaacggttggatcggtgatgccgctaaagaatcaagtcgcaatgaaacccaccaacacagtcttggatgccaaacgtctgattgggacgcagatttgatgatgctgtggtccagtctgatatgaaagcgattggccgctttatgggtggtgaatgatgctgggcaggccgcaaggtgccaagtagaatacaagggagagaccaaaagcttgtatccagaggaggtgtctatctatggttctgacaagagatgaaggaaatcgcggagagccatacgcttggcgaaagactgttaccaagtgctgtggtcacagctgccagactgtactttaaatgcactctaacaggcgtcagggtaccaaagatgctggaccgtatctgctgggtctcaatgtacttagaagtctattaatgaggcaactgctgcatgcgtattgctataggggtgtagagcaagagaaggttggagcacgagacgaaaggtggctcatctttgacctgggaggtggcactgaggatgtgtcagtcctgactattgaggcatgggaatcgtttgaggtcgaagtctacaagcttggagaacgacccacttgagcgtggcagaaagactttggaccaaccgccatggtccaccgagtttgattggccggagctctaaaggcgccacagcatacagaacgcgcggcatcagtggacaaaccagggagcacgcggcaggaacggcgctccgcaacgggtcgatagacggtgctaaaccgtacccctcgtactgccaaggccaaggccgacgcactggagaccccgagcacccccatctccacacggcaccgccgacactacccccgaagac

SEQ ID NO: 497737 - DNA, 895 bp, Homo sapiens
cgccacatggttcattccccctttgatccagtgggtgatgggctcccgcgcgcagttgatgtctctgggttgaaggaacccacgagaagagtcgctctgtggttgggcgacctcttcccccaagatgtcatggtacctgctggggttgtccccgtcaaatacctcgggcggggtttcccccacgccctccgtagttgcttcctcccgctaatagatcatcgaggttttcctcgcgcgcttgtctcgccccgctatattcatagtcgcgcgcatatagcgcagctctttattggctcccgaacatctatttaccgctcgcacgcgcgctggcctcctggaccggggttgttgctcagggcactcactctctgtttcatgtggcccaccatgcagagcgcagtggtgactcccctctccgtgggtcgtccccgcgcaccaccccctagggttgtccactcgctttcctgccccccgcaaagccccgcctgtatcaaaatacatgctgtggcacctctctcgcgatccctggccgttcggtgcgcccggcctgtttcatctcgctctggcagctgcgcccgcacttacgttctgttagatagaccctcgtggtgtctaggaccaccgcgctactagagggagagtctatgaggactctacgtgcctcctcctccgttgggcgttcgtcgtttgctaccggattcttatttggctcgccactgcccgcacctgtgaggccatttggtggccagcccaaactcgctgaaagatccttgtcgcgcggtattttgtccgttgcgggagttgggagagatgtcgaccgcccctcacggaagtgggctgtgttacccattactattcacgccctaggtcttacaatctcaaaccaacaaaacgc

SEQ ID NO: 497738 - DNA, 258 bp, Homo sapiens
agtgtcgtttaagacaggcaaacagtagatttcaagcccagctagcactcagagaaaaataggctgctgtaaacgggaggatgagaacaataggtaccaggttgcatcggaaaacctacaagatgaatatgtaagaacacttgaagagacgaggaaagaaaagaccattgtcgaatagtcagtcagaaatggaccgaatgaacagttgaaccagaaaggaagaaagccattaccactcaagaaaccctaaaagaaacg

SEQ ID NO: 497739 - DNA, 701 bp, Homo sapiens
tggagacaggttcttgcggtgttgcccaggctggagtgcaggggccgggtcatggcatcaagggctcactgcagccgggacctccgggttcaagtgatcctctgtgtctcagtccccgtgagaacaatcccccagcgcccagctacatatttttgggtgggatacaggggtctcattctggtggcctaggcttgtctgggaactccggggctcaaggggatctggtagccttagcctcctaaagtgctggggataataggcatgagtcactggtacccggcctgctctaccgctttataaggacgcttatgatcacatggcgcctacccagagaacccaggtcgtctttctattttcaggtcagctgattagccaccttagttccatctgcaactttagttcccactgggctgtgtaacctaacatagtcacaggctcgggggactggtcacgtggacatcttggggaggccgtaattctggcccaccgcaccctcggttcatccctgtgccctgccggggcacctcgctctaccccaggaaattggtgagctcgtttcctgctcggatatgtgctccccctaagggtctgctcctccctgggcctgaaaagttcctttctccagctgagaaggggggcccttcgatctcaggcatgactcagcccgggttgatgctctgcagtgctgagccaggataggg

SEQ ID NO: 497740 - DNA, 749 bp, Homo sapiens
  misc_feature (31)..(31): n is a, c, g, or t
  misc_feature (34)..(35): n is a, c, g, or t
  misc_feature (217)..(217): n is a, c, g, or t
  misc_feature (662)..(662): n is a, c, g, or t
  misc_feature (668)..(668): n is a, c, g, or t
aaacatcgggtggccgaagggctttcatacncannctgaaaaagccaacaagccctttgcaacccccgggattttacccgccttctagggttttttaaaaactttccccccttaaaaaatggggcaaaaattttcccttgtataaatatggggggggaaccccccccttttttttttttgcaaaaaagtgttgaaaaaaccccccccacaccccccncaaaaaaaaatttttctcccccttttttaaaagaggccgccccccggggaaaaaatttttttttttttaaaaaagggataacccccccccccaccaaaaaaaaaaaaaaaaaaaaggtttttctcctctccccccccccccctctttgtggttgtaagtttggttccaaaaaaaaatttttaaaaaaagggggggggggttttttttttttttccccccaaaaaaaaaaaacccttttttttatttaggggggggggggggtttaataaaacacattttttttttaaaaaaaaaaaaaagagtggtgttttaaaaacaccgtcttttcttttttttttttttttataaaaaaaaaaaaaaaaaaaaatttctctctccccccccccctttcttttcaaaaaaaaaaaaaaaaattttctcccctccccccccccccccccccccncccccnaaaaacaaaaaacttcctccccttttcctttttttttttttttaaaaggggcccccccccccccccccccccggggggggg

SEQ ID NO: 497741 - DNA, 228 bp, Homo sapiens
taaattagtttaccatccttaaaaaatcagggaatcacagaaaaatcggggtttcgggcatggctgggaacatcagagctcacagctctggggcccactttccggccgggccactctgggtgggagggggaagagccggcctctctggggggcagggcagatgcggtccggtcagccccagcctcagccccgcccagtggcactcatttatggtgcttaggggcccgg

SEQ ID NO: 497742 - DNA, 284 bp, Homo sapiens
ggggccccccttttccttccccccccccggggtgggggttcccggttttccccctttttgggaacccctgggggcatttggccctttttatgtttaagggggggccgggggttccccttccctttccctaggggtaaggaaaagcctctttttttgggggggttggcccctttaaaagcccccttggggaaaagtttgtttgggtcctttgtttttcccccccggttaaccaacccagttttacccccgggggcccggaattaaaccccggttttccgggggga

SEQ ID NO: 497743 - DNA, 470 bp, Homo sapiens
tagggagacacatacatgtaaccatactgctcaaatgccagaaaagtaatatccaacagccggattctgacccaccctgccagcttaacctataacggctaattattcctggaggaaagatcaccccagttcttcacgcttccacttacaatcacatgacgcccacccaacttcttaggaaattgataacaccactttgcattgttaagtactcaactgctggtgttatacacatgatcttgagcaggatttctcagcctacaacactgctgaccattttgggccagagaattctccagcgtggggggctgtcctgtgcaaccgtacgacgtttagcggcgtccctggcctctacccactaggtaccggcagcaactccctgacaccatcgtgaccatccaaactatgtccagagatcgccacatgtctcctggggaactacattgccccctgcttaacgaaccactcat

SEQ ID NO: 497744 - DNA, 241 bp, Homo sapiens
gggggacggattatccgggcgaactaggaatactctgggaacgagttgatcctagtgggaagccttctccgagtagtcttcacactcttggtaaatctccaggcctctctcttgccctgagttatcagcctgtgtggtgttgactaccttagaaggtacaagctaagaaatgtaacagtatcaaccctcccagttgcttaattatacccataggtaatacaaaacgcaaagaccccaaaag

SEQ ID NO: 497745 - DNA, 144 bp, Homo sapiens
taccagtccatcgaggacaggtcaggccgcgttccccaagtgagccagaagttagtgaatcgccatctcctgtgactacaaacactccagcgcagtttgctacagtgtccccatgcggtttcctgaattcttgtaaaactcctc

SEQ ID NO: 497746 - DNA, 223 bp, Homo sapiens
tcttctcaagctacgaaggatatccaatagagcggagccagctccatcacgatacatcaaaatcgatggggcaaccgcacgtcaagtcaataacacgaaggttggaacagagcgccgagaacacctcttggctatttaatgcctgccagagtttatttgcggcaatctgagcaccgaatcatgcgggtacgcgaggagtacccgagcctctaattctgtgatc

SEQ ID NO: 497747 - DNA, 546 bp, Homo sapiens
  misc_feature (4)..(4): n is a, c, g, or t
  misc_feature (26)..(26): n is a, c, g, or t
  misc_feature (73)..(73): n is a, c, g, or t
  misc_feature (202)..(202): n is a, c, g, or t
atgnccaaaattccgaagttgctccnagggtgaccattgcctaccagttatggttccccataaggggaaaagngaaactcacttccccctgtggtccatgagtgtgaacactggggcctttgtacgcaaatgttgtactgtgtgtgggagagctatacagtaagctcacataagactggaacagataggatgtgtgtagctnaaaatgcatggcagacgtgtttataaagagcatgtatgtgtccaatatactagttatattttaagaccactggagaattccaagtctagaataaatgcagactggaggattctgctctttgatttctcttctcctgtgacccagcctaagtattatcctaccccaagcagtacatttcacccatgggcaataatgggagctgtaccgtttggatttctgctgacctgctgcatttcttttatataaatgtgacttttttttcccagaagttgatattaaacactattccagtctagtccttctaaactgttaattttaattaaaatgaagtactaatgactctt

SEQ ID NO: 497748 - DNA, 176 bp, Homo sapiens
  misc_feature (28)..(28): n is a, c, g, or t
  misc_feature (61)..(61): n is a, c, g, or t
ccttttttttttttccagtgaagaagcnatctcgtctctgtctccactctcacggacaaanctcgcgcgcgcacgcgtgggcgcccaggccacgcactcatctgtccacgaaggcccctccacatgtgtgacgcacatgcgcgcagagaaagcacatcatatctgctgtgtctttt

SEQ ID NO: 497749 - DNA, 170 bp, Homo sapiens
  misc_feature (17)..(17): n is a, c, g, or t
  misc_feature (33)..(33): n is a, c, g, or t
  misc_feature (50)..(50): n is a, c, g, or t
  misc_feature (92)..(92): n is a, c, g, or t
  misc_feature (127)..(127): n is a, c, g, or t
  misc_feature (154)..(154): n is a, c, g, or t
  misc_feature (158)..(158): n is a, c, g, or t
tgtgagtgataatggcngatgaaactactcacnagcgcttactgtgtgcngggagccgtccttagaggagagcgtgaataaagtcagagaancttcccagcaaccctgggatgtagaacctctgganccattgcccaaatcaagggaatgaggnaggncccgggctctgg

SEQ ID NO: 497750 - DNA, 680 bp, Homo sapiens
tgctttcagaaacagagaatataatattctcactaaggccttgaatggatttttttctcataaaatagtctgataagctaatttttaaaaagaaatgccattaactgtgtggtatcgtggtttaaaacttactaacaagttgtgggaaacgaaacaatacatattggatttggaactcttaacatgtttttaaaaatttagacttgaactgggcacaaagtataacatatttggtttctttaatggaggacatgtggcaaggagttggagggttggggatgggagaagtatttggcagagttatcaatgtccaaataatttaaaaacaaaaaatcaagggtattcaagcagcaaaaaaaaaaaaaaaaaaaaaaaaaatctgttgttgggggcgatatgggccttggaaaaaggtttttaagaacacttcggtgggggggcgggggggccaatattggctacacgtgcacacggtggcaaacggcgtgtcccaaagagaaaccgtgggcccaggacacacacgggcggggcgattctctccccaattataaaaaaaagcgccgggggggcaacccggggcgctccgcgaaccaaccccagaaggggaacacggaggcccacagggggccacaccacgggggcccacaggagccagaataaacgcggcccggggggggagc

SEQ ID NO: 497751 - DNA, 147 bp, Homo sapiens
aaaccatgacattggcttccatatgagatgaacacatacaagtagaacgctttgagaaagtgttcagctctgaaagactgttttcttggaaaggcattaactttgtgatggtcaacagcgtggcctgaacgggatgctgtggcatct

SEQ ID NO: 497752 - DNA, 476 bp, Homo sapiens
  misc_feature (25)..(25): n is a, c, g, or t
  misc_feature (85)..(85): n is a, c, g, or t
ccaccccaaaaaggaatccggcctnacccccagcttcctaccggcttcatggcccttggttccatcaaatgtcctttacctcaanaagaccttcaccctataagtcctattttcctgtaattctgttaacaatttattgtctcctcatttatagctcacatcccaaacttccctatgatagagaattcaaccctggtcaagaagtcacaaggctgggcatggtggttcacacctgtaatcccagcactttgggaggccaaggcaggtagattgcttgagctcaagagttcaaaaccagccgtggcaacatggcaaaaccctgtctctacaaaaaaatacaagaattagccagccgtagtggtgtacacatgtaattccagctacttggggggctgaggcaggaggatcacttgagcccaggaggtcaaggctgcatgagccgtgttcacaccactgcactccagcctgggtgacaa

SEQ ID NO: 497753 - DNA, 105 bp, Homo sapiens
catactatgtaaaggcttatagttcctcaacgctttatactctcaacgctataatacttcctcaacgcttaatactatcctacaacgcttgaatacttacctaca

SEQ ID NO: 497754 - DNA, 738 bp, Homo sapiens
atcttgagtacgtggaccattgctgtgcatgttaacttttggtactggttttgttttgtttagtgttgcatttttaactccagatatcctaaagctcaattgttggtctctggttgttcatccttagagaagccatgggagaacagacttgaaaagtttaggaaatcataatgtggcagaggtggtgggaagaagacagttgatgctttttccccttgagaaacttctgcatttagttctctatctttccacggcaaaacaaatgggtattcttttcatacaaccatttgcaaatgaaccttagcaaaagtcttaacatctaaggtatttttatgcacagaatacacttagattgataggaacagaactcgtaatggagtttgagtaagagaaaatgactgatgtactaatacccagtaaaactgttgataaatgttacaaggtcagcctgttctaattgggaatctagatctagcttagatttcctattgggcttagagtattgcgctataaacaaatgaagtgcaactgacaattatattttcctactcggtcatactggactggcttccgtactcttacatatactcagtaagtgactcaaggcctctgggtatttaacataccctagttgccggttttgcaacttgccatgagccaatacttcttggatacattgatccatttattttcattggctgcctttcatttctatctcttttgctgctaccatcttgg

SEQ ID NO: 497755 - DNA, 496 bp, Homo sapiens
  misc_feature (496)..(496): n is a, c, g, or t
ctcttaagagcataccaatggaggcacaacagaaagagtcataatgactagagaaatgatggttgatatagaggtggttatctttacaccaacgaaaaaaaaagacacatgaataagctgtggagaatgattttatgttcttatactaacagtaggctgagaatctggtaaatgagatgttctaagcctaaggcagattgacttgcataaacaagtgatttaccctgctcggcaaagcaggcttgcatattgtcagacttgcaggacttttttacaaatgctgtgaaagcatacataacaactttcagttgctcttttgttgccatgggctagagtgtcacaagctcaacaagtgccagttgaatctagaaggggatctacatgtgagaaagtgcgcatatatatgcatggaaggagaatgattcagattaaactctatgagaacgtatgtttcatcgacttccagagctgataaacatgtgcgcctgttcaccan

SEQ ID NO: 497756 - DNA, 329 bp, Homo sapiens
tggaaacaaagcctggctctggtggcccaggggggagtgcaaaagcaaaatctcggttccttgaaacctccggggtccaagtgatggtccggcctcagcctcccaagtatctgggaataacgggcttgtgccatcacgcgcagttaattgggtataatctgggtatatcaagaagagatgggggtccgccatgtggcgccaggcggtctcaaactcgtgggcctcaagtgatcggcgggcctcagcctcccaagggggtgagcctcgggaccgggtcacccattctatataaggggcaatctttctggtcatctcgggaccggccagcc

SEQ ID NO: 497757 - DNA, 295 bp, Homo sapiens
gatagagtgtgcggagtcccgccctacctaggtactgtgcaaaggccaagcaccttcatgtctatgagatcctctcagcaactctgtaatctggtcccgaccagaatattacctttcagcagctgagaaaacaacttagcacagagcaggatgaattaaaagcttggtcgtaacatgctgtggcgcagcgtggtcacgacctggtgatgcccagacacttcagggaatgatcgagtgcaggatcggaatcagcaaggttcaaggaggatcagaagacgcatcactgggcccaagc

SEQ ID NO: 497758 - DNA, 150 bp, Homo sapiens
aggatatgcaagcgcttctttatcctgctgtacctgttcctgaaacggaactacgacaagattgacgttgtgttcatccgccatcacaccagcgcgcgagaggtggacgaagaggagtttttctactctgcggcgaaactggacggcacc

SEQ ID NO: 497759 - DNA, 484 bp, Homo sapiens
tatgctctatttaactgatttctgtatagaactctagtgtcgtctaatataagtatagttactccatgatctttttaggttactatttgcatggaatatcttcttccatccctttatttcataaagacacacacctttattacttctttatttcttctataaagacacacatagacaatgtaaatggtttcttgtaggcaacagatcattgggtctatcttttttaaaccatttagccactccatgtcttttggtcgaagagtttagttcatttacattccatgttatcattgataagtaaggacttactcctgcactttgtgatttgatttctggttgttttgtggtcttttctttcttcttttcttccttcctgtcttccttttagtgaaagcaattttctctggtggtatgtcttaatttcttgctttttattttttgtatatctattatatgtttgtcgatttgaggttccagaggtttg

SEQ ID NO: 497760 - DNA, 234 bp, Homo sapiens
caaagtttttgctttttttccggttttcccccccaattggtaaaaaaccgggttttttttcttttttggtttttccggtttggggggttttttttgccccttttggggaaataagggtttccttttttccttttcccttcccccccctttgggttccccctttttttttcccccaggggttttagctgttttgggggtgcttttaaaaaaacccccccgggggggttttttcca

SEQ ID NO: 497761 - DNA, 229 bp, Homo sapiens
acggcgtatgtaatttctctcgtttcagcctcaggtgcacacatccataaaaggatcataataccatctgtctctgatcattctcggtaaacattagaacctctgggataaccaagcctttacagcaaattcagaaatgaacactgcttactcacggggtcccacagaccacccatagggcttagtgactttgctacggacagactcacagcgactcagctacacagtt

SEQ ID NO: 497762 - DNA, 308 bp, Homo sapiens
gtcaaccctagccggaccctagctgctattggagggctgcttgatgtggattgttctgaggaagagattaaacacttaatcatggcagtgagaggacaggtctctactgatgagttggcggctgaagtaaaaaaaagaaataggctcaagctgatgcttccctggctggaggcgcacattcaggaaggctgagaggagcctgccactaacaatgcactggctaagatctacatcaacagcaacaacaggcccgagtgcttcctgagagagaatgcctactatgacagcagcgcggcgggccgctactg

SEQ ID NO: 497763 - DNA, 429 bp, Homo sapiens
aattttaaaggttttatttggggaacctataaatgtccaaggaacacctcaccaacccaggttctccggcaaggcttcagccagtcaacgtgtttggggcccgtgactccctgcaacaatgccctgcaggaaaggttttttttttatacccagtttttacaggaggaattatttcccaatatttcatagtttatgaggctgaatccttcttgaatttataaatgcttacctcacacactctgtgatgatcatggtttctttactgataaaactcaatacctagaaactgcacctagctcatgatggtacctaataaatacttcaatgaaatgatgtggtgatgcatgcctatagttttagctacttgggagggtgacctgagcccaggggttctagaccagcttaggcaacatagcaagaccccatctc

SEQ ID NO: 497764 - DNA, 1392 bp, Homo sapiens
  misc_feature (1)..(2): n is a, c, g, or t
  misc_feature (170)..(170): n is a, c, g, or t
  misc_feature (990)..(990): n is a, c, g, or t
nntgttcgcgatcgctactgcagtgaatcggactggtcgttgatgttctcattagttctttgtgagtggtgtcttgtagtggctgcgcgtcctctcttgctctctcgtggttttagtgtttgagttgtatgcggtacgtggtgagctgttcttgtttcgttgtttttctnctgttgttgacttgtttgtctctgttgtgtcttgctgcgttggtgattctgatgctgtgctgctgtgtattgtgctctgtctggttttgtgcgttttcttgctcgtggttgttgttacttcgggctgactgttttgttggtttttttttgattctttatctggctgctgtggtttgtgtgtttctcctcccataggctgtcgtgagcaggaggacctcgtcaaattttataccaacaagccccatgtgtggggtgccgagaccaaccacgacccggattttttagggggcacccacattattaggggacctttctgggaggggtctcccacccaagaggtgtggttcgacccacaagagagaacgcccgggccgtttgtttgatatacacgccgcgcgtctccacgtttatcttattttacccgggtcctctttaaagggtttgcccgaggcgcccttggggtgggccgcgaatatttctcggccccccgagaggggctcttctttgtataggaagtagtagagtctccgccctccttctctttgtgaccgagcccccccgtgtgatctttatgtccccgcccctattgggaaagttttctcttggggcctccccccggcttatctttttccagagggggagacaccccacatggggtcccctttgagatgttccccgtcaccccccgcgggagaagggcgaccacagctgcccttattagaccacagagaatattgtgggagaaaataactatgcgccccacacaatgcttcccacgactcacacacccgcgagatgttacactatgttttgttatatnttgggagatatcacgagaacatcacattttggggtggtgggccaggaacacaactggctttcgggcactgagtatttatgagttgtccctcgggagtttatgcccacaagagaaaataggaacccccgcacactgaggagcttgccaacgaccactcggctcgtgattgaagagaaggaaaaagagcctcccacgggaaagccccacccaaaaaggaacgcccacagaaccacgagattgaaggaaataatccgggggggctcccaagagcccatagttggtggctggcccaaaaacccaaggagggattaagaagtgctcccatagatgtttagactgtggcccccgtgggttttttcccccaagcaaccacttttattaactttaaacttcccaaaaaaa

SEQ ID NO: 497765 - DNA, 637 bp, Homo sapiens
aactgtaaaccaagagagtgcccaatggggccccctccccatgcgcgacgcaatacgctgcgggccccccaccctggcggggagaaacccacgtgcgacacacccgcgactcagcggtaccgacccgaaattatcctaccgtcacccaccacatgtaacgcgccccgcacactgtccctcaggcgcccgcccctgcctctctggatatcgcccggacagtggttgccccccgctggagtaaaaatcccgcagtgtaagagccccccctgttgcgctcaatcaaatgtaacactccacccaagcctttagttgcacctcgcgcagggacgagtgacccccacgttagtgcgtttaacagcccacggaactcgcttcccccgcggcactttctatcgcccatgaccacctctgacgcactcgcttacctaccagcgggaggtatatactcgcggacaacaatatgtcttaaaaatctccattggcagcacaactcaccccacttcgtgcctaacgcacatctactgcctaatgaaggttgagtttcctccctgaaaaagtcttgatgaaacatgcggggccctccactttgtgcccacgtagcgctccccctttacccccttttaacccccacaaaaca

SEQ ID NO: 497766 - DNA, 667 bp, Homo sapiens
  misc_feature (3)..(3): n is a, c, g, or t
  misc_feature (71)..(71): n is a, c, g, or t
  misc_feature (77)..(77): n is a, c, g, or t
  misc_feature (114)..(120): n is a, c, g, or t
  misc_feature (123)..(124): n is a, c, g, or t
  misc_feature (126)..(126): n is a, c, g, or t
  misc_feature (131)..(131): n is a, c, g, or t
  misc_feature (133)..(133): n is a, c, g, or t
  misc_feature (140)..(140): n is a, c, g, or t
  misc_feature (142)..(142): n is a, c, g, or t
  misc_feature (144)..(144): n is a, c, g, or t
  misc_feature (147)..(147): n is a, c, g, or t
  misc_feature (149)..(149): n is a, c, g, or t
  misc_feature (158)..(158): n is a, c, g, or t
  misc_feature (160)..(160): n is a, c, g, or t
  misc_feature (163)..(163): n is a, c, g, or t
  misc_feature (168)..(168): n is a, c, g, or t
  misc_feature (170)..(170): n is a, c, g, or t
  misc_feature (247)..(247): n is a, c, g, or t
  misc_feature (249)..(249): n is a, c, g, or t
  misc_feature (287)..(287): n is a, c, g, or t
  misc_feature (359)..(359): n is a, c, g, or t
  misc_feature (483)..(484): n is a, c, g, or t
  misc_feature (495)..(495): n is a, c, g, or t
  misc_feature (500)..(501): n is a, c, g, or t
  misc_feature (503)..(503): n is a, c, g, or t
  misc_feature (507)..(507): n is a, c, g, or t
  misc_feature (509)..(509): n is a, c, g, or t
  misc_feature (518)..(518): n is a, c, g, or t
  misc_feature (532)..(532): n is a, c, g, or t
  misc_feature (592)..(593): n is a, c, g, or t
  misc_feature (655)..(655): n is a, c, g, or t
ctnttaaaaactatgacacaacttacacagctttttaattttcaataatacattatcacgcagcaaattanaaacanaaaagcgcacactaaactacaagtctcctataatttnnnnnnnccnngnagggnanaactaantnantcntntccaatctnancanctgantntttacaggacatcacctgccatcttaaggcttaatatttacaaatgcctagttttaaggtaacaaagcagctgattntntctacaacatgctattctatgacaccacatcaaaagcnttaaaaagaaagctcatctctattttcttagtagcatctaacagatatccaaataccaagaatcttaacttntgaatggtggtgttatccaatgcacaaaagcaatctgataaattaatatcagaacagaattaagcgtccaagaaaagaaaaaccactcctcaaaatcaattcacaaactaagttttccattttnnagaaccctttnttttnntntttncnagttaaatntgggcattttaaanttttttttttcattttttttttttttttctctttttttttttttttggttttttgtctcnntgaagaatcagaaaccccaaaaaaacacacattttcatgctgaaaataacagtgtaacaaantccaaaacaagc

SEQ ID NO: 497767 - DNA, 260 bp, Homo sapiens
cgcataaactataacagcataaactattacaccataaactattacagcataaactatttaataatcttagagttcatttaatctcagcacagggaagggtttcacaatgaagatgtgtagcaggcgttatcccatggttatcactgggcagaacaaagaccagtgagtagacactataagaaggcacattggctggtcacagtggctcacacctgtaatcccagcagaatagttagctgtaatagtttatgctgtaatag

SEQ ID NO: 497768 - DNA, 446 bp, Homo sapiens
agtgcaatggctcacaggcagggtgattctctctaagcggaacacctgcatttgaatccgcctgcctggtagtagcaccctggggagttgtctaacccctatgagcccaacctttcacatttgggaaaagtggaaccagcagttcgatgcctggctgggtgtctgtaggaaacatgaggccccggaagtgcaagggcctcacacggcacaggatcctcacatggctgccagcctctcctccactcctggagtctgcagagccctcccctcccacacacttcctctgggaaaagctgcccaggctgctgtagggaacaggaaccctggagaaggcagaaagtctggtggcacacgccaaccctcagcttggctgggcaccttttggcagacagtttcaccccactgtttccctgcctccaactaggcagccggcaggtcagtcagtt

SEQ ID NO: 497769 - DNA, 955 bp, Homo sapiens
gtgttgaatacaatttattaagtacctatcacaggtttgtttccttataatggcagcatctgagctgttggcactattggatgaggatcagatggcttgcgctttaatttttattatgcacgaaaatagcctttctctgcactatgagatccgaatgaaccttatgatgtgtatattgagatgtactcagtgtgatttcaaaccaaattgtctatcctgtagtcacaatatatactgtagcctttaacagcaagtcttgcttcccaaacagaaagccattctgaaatcctacagtatcacaggtgcgaaaaggtggttatattaccccaagacaacagactagtaatcccacttaataagagcttatttaatgggatgtcagcctcttaacatgctaagccactttgtgggtctcagccgtcttcataaacagaacttccgtatcccaatacaaagtctgctatgagactttacagcatatgatcttttttccataaacttgtacagtgcaaagacacttttgaatacccatgatcgatgatgtccatgctcgaggaaatccaaacacttccgcctctcttgcaaattccattcctcatgactgaccaatccttcacgatggcatgcgcacgccaagcccttcccttactccaagcccgagaactcttccaaaacaagatgatgaagccatgggaaaacggaagccaagtcaacgggagtcctcactctgaatgcggggaaaaactgacagctggggctacaagtagagccatcggcggtgaaaactcttgaaagaggaccctcacgagcctccactgaggtcggacacaaatctgacgtctccgcgagggacgtcagacacggacaccgccagatgagtaggcacaaaagcatcacggacgctccagagggacaaggcgacaaaacgcacacgcagatgacaatgacacaacac

SEQ ID NO: 497770 - DNA, 372 bp, Homo sapiens
  misc_feature (14)..(14): n is a, c, g, or t
  misc_feature (22)..(22): n is a, c, g, or t
  misc_feature (24)..(24): n is a, c, g, or t
  misc_feature (26)..(26): n is a, c, g, or t
  misc_feature (32)..(32): n is a, c, g, or t
  misc_feature (36)..(36): n is a, c, g, or t
  misc_feature (82)..(82): n is a, c, g, or t
ggggggttattcanctctccananancttccncctntttttttttgaacccgggggcctggggccccttggggttgcccatngggggggcttcccggttgaggccccccttggtttttttttttcttccccaggggttttgccctcttgggggggcccccccttggggtttaaaacagggggtatttcggggggttttaacccacccccttttcccggtacccggcgggggggtttctcggggccttgtttttaattttggggggccacccccggtttttggcccctgggcctgggtttttttccccttaaattttttggattgggggcgggtttttccctttgggcccccctttccccccttttgggccca

SEQ ID NO: 497771 - DNA, 509 bp, Homo sapiens
  misc_feature (34)..(34): n is a, c, g, or t
  misc_feature (199)..(200): n is a, c, g, or t
  misc_feature (311)..(311): n is a, c, g, or t
ggggtggggggggggccccaaagggccccccccnccccggaattcggggccttaatttggtggggggaacacccccccgcggtgtttaggccggtttttccctattttaaagaggcgccagggggtttttttttacccccttggggggggccctctcccatttgggggaaaaaggtggttgtgttggctcccccccccnnaaaaacaccccccctttttttttgccttttgggggggtttcccccccccaagagggggggggtcaagggccccccccggggggggggggttccccttttccccaaaaaaanttttttggggggcggggggggagaaaccccccccccctggggggccccccccgggggtttttttttgggggcctttgggaaaaaaaaccccctttttttttccccccccccctttttgggggggggggggttttaatttaaaaaattaccccccccggggggggaaagtttttttttaccccccctttccctttttta

SEQ ID NO: 497772 - DNA, 1062 bp, Homo sapiens
tgtaaacatctgtcagtccactgcaagaacagcagaaactcgtagctgacctccatttggcctactcactgaattaagtgatgttactcattcgctttgtaaaagcaaactgagtgaggccccaggctcattgaagactctgtgggttacccagaagcccaactttccagattcaatattttttctatttcttagctgtgttaccttgggcaagttaattaacctctctgtgcctgcatgttgcatctgtaaatgagactaatactagtacccaccttctaaagtgattatgagcattaaatgaattagtacgtttaaaggcttagaacagtgttttatgatacgataaacactcaaataatgttagctattgatattggtgtgcccagaaggcttgttactactagttgatttatgtgcttgccaaaagttgttgtgttggtaattaagtacgacataaactaatgaaaattgagtttataaagagttgttttatgaaaagtttagtactttggatagaatggataatattgatttgctaaaaaaaaattgtcaccaaataacttaaaggcaaaacagctgtaaaaaattgtaaaaccatagtttgtattccatatgctttacaggtgattaactttggcactgctttaaagaaactgaaaccaggaattgtagatgttgacttgtgagtgtgtattttgcatggaagatgatttgcatctctagtcagcgtgccaaaaaaagatcctaccctttgattggttaataaatatgcaactataataaaatatttaagtgttggtccttaatgattgcctacattttcaatgaaatgacagtggcagaactgaggaacaggggtttttctctccaaggcagatcagctgccagaaattgcacgttttgtaccagctgcagggtttcctggaatcagcaaaggcctgtgagaggctgcatgaaccacacacgcttactgacacctcctgtgtgccgagcgctgagtagtgctgaggatatagcaaatggggaagcaccaccaatacagggagcaccaccaataca

SEQ ID NO: 497773 - DNA, 427 bp, Homo sapiens
atccaagttaatgaagatttagcctatgttttcttccaggagctttataatttttaggtctttgatctattttgagttaatttttgtatatggcatgaattaagggttcaactccattctctggtatgtggttatccaattatcccagtactatttgttaaaagatgaacttttctcactttaattttctgtgtcaacaatcaattgactataaatatgtgggtttatttctggactctcaattgcatcccattgatctatatgtctatcgttatgccaataccacactgttttgattagttgtttataggaagttttgaaatcaggaagtgagtcctttaactttgttctttttcaatattattttagctattcttgttcccttgcaattccatatgaattttggatcagcttgtccatttctgca

SEQ ID NO: 497774 - DNA, 906 bp, Homo sapiens
tttataacaattgccaagataagaagacgatatattatagagactgaagaataatgtgtcatccaagaatatagaaatctgtacaacatttgccacaatcaatatacatgaactgttcaattttacgccagttcataatcttaccaaataaaagatgactaacaaagtgcactaaaatagatggtggtttgtggaaaagactgtttacccaaattaatgtacacggaaaggttacaaagccagacctccacttatctaacataccataagaagtttactcagatcttagaaaacgtacaagctagcaatatgtacagagagctggctggatgctaatgcaccagcaggttgagacagtggtctgtatgtaaaggggtcttttttaaaggcctgttgccatggctgatgtctgggtcactagctacctttcaaggccaaaaacacgagatacaaggtctgaccattgtgccccgaggtcatgcttactgagtatgtctacatgtacgtttatacgatatataagtgcttaggtaaaaggtcttgttaaattttccagtactaccatgtgtaaaacgttgtaactttcctattaaaagctgccgaaaaggttgacaataagaactttcaaggtgtaatagtgcaagattcccctgcgaagattccacctgcagagacaagatgcttttgaaaatactgatcgctttccgaaggatcgatggtccacacttgcatgtatgtactgggaggaaactgagagccaccctaggaacttcctacctagcaactacgtgaccatttacctgggactccaaagctattcaccattaatccttgaaaagtctcggcacacgtatggcccgctctgaaatgtgtaagataaacgattatatgagggccaattacacg

SEQ ID NO: 497775 - DNA, 255 bp, Homo sapiens
aaaggtggactcgaccgcttcacatccgcgagcgtacacggcaacgagcaagtgcacgtcggcaatggcgcagcgtttgcatatttcccacactggtcacagtactattcctacaaatgccaatcctcttcacttgcgcaatgttctctatgttccacacatcaccaaaaatttactttccgctcacaaacttactcaagacaatgaagtttttattgaaattcatccaaaccactttattgtcaaggatcaggt

SEQ ID NO: 497776 - DNA, 666 bp, Homo sapiens
  misc_feature (448)..(448): n is a, c, g, or t
tagtctaggtagaggctggtttaattcggccgaggctgggcggagcctggcgtccctcccgcgtcggccgcgcccgtcctcctggctgcagagagactaccggccaccgccgccgccgccgccgcgagctgtccctgcggcgcgtctgccttgtgcggagcctgacctgctagtgctgctcagtgctgtcctggtgctgtccctcagcctcctgcccctgtgctgctgtgggtgctgactggtactctgctgctgtgcgcatgcgcctgtgaggtggctgctggtgcttggtgaccgcccttagtcccatgctgctgtagctggcctagatctgatgcgtgcagtgtgctgattgtgtgttgtggcgtgcctgtgtgctgcctgtgtgcggccaagtgccatgttgattgtgtgcctttccctgctgcttgcttgtgcccacacattntagtgatgtgacgggctctcgtggtgtgaccagtgcaggtgacgcacctgtgtgtcttgcccctgctgcggggttgcggtgacccaattagtgcgtgtatccctttgtgcccggtgtgcccgggctgccttgcctttgcggaccttggggcctaggcttctgcacggcccaggcacccttttgcccaatgctctccaactaaacggtatcgggtggcg

SEQ ID NO: 497777 - DNA, 545 bp, Homo sapiens
ccgactctagaggacccttcgattggtgggcacttacaatttctcaattatgatgaattaatataatgtacagagtatactaccgcagttaggatgatcaattgatgaactatgttgaaataataaaatgacatttaataatgggtagtagttgaaaagataagacagactataataataatggtttacacttagaggaaaaaaccttggggaaatgtggcttaatctttgagtaaataatttggcacaaactcatacacccaatgtactacatttttataaggaaaaaatgaccaggagatcaaactgataaaaagtaatttcttcacataaccaaattgtcagaaaagcttatagaatcagtactaattcattccaataaccccactgtagaacacagtaactattctaatgatgatcctgagtcaccaagaaaaatttaactcctgaattttcggtgaggtcatcctttctctacaattggggccatactaatatattagtgctatatactcatatagctccctcactcagtaagttctggc

SEQ ID NO: 497778 - DNA, 502 bp, Homo sapiens
  misc_feature (2)..(2): n is a, c, g, or t
  misc_feature (10)..(10): n is a, c, g, or t
  misc_feature (27)..(27): n is a, c, g, or t
  misc_feature (47)..(47): n is a, c, g, or t
  misc_feature (66)..(66): n is a, c, g, or t
  misc_feature (82)..(82): n is a, c, g, or t
  misc_feature (95)..(95): n is a, c, g, or t
  misc_feature (139)..(139): n is a, c, g, or t
  misc_feature (142)..(142): n is a, c, g, or t
  misc_feature (154)..(154): n is a, c, g, or t
tnttcctgtnaaacccatgagattccncttaaagggtatttaagtcncttgattgttcccccaaanccataagtttcttggncaggttaagaagncctgtgttgctttcattgcaccatcagtgcactgtctttctgtnatnccttattcttcncaaagcatccctcaacacacatttcacaccagcctgttgcgcgggggctcattaaaaatagtcagggccgccgggcgcggtggctcacgcctgtaatcccagcactttgggaggccaaggagggtggatcacgaggtcaggagttcgagaccagtctggccaacatagtgaaaccccgtctctactaaaaatacaaaaaattagccgggtgtggtgttgtgcatctgtaatcccagctactcgggaggctgacgcaggagaatcgcttgaacccaggaggcagaggttgcagtgaaccaaaatagtgacactgcattccagcctgggcaacagaacaagactccatct

SEQ ID NO: 497779 - DNA, 712 bp, Homo sapiens
tgggagcaaaactttactggtcagcaggctctgcggggccacgggttcttcagaaacaccgggctcgcccggcctcctctaaggctttcaataattattagtatattaaatagcaacgctctatcccccaaccggatattgtccaacagaggtccctattggtgcctatgtggtcccaaggggtctgggtcccatgaaggtctgggtactcaagaggcagagggggctccctgtatgcacgaaggtgttaaggccacaaaggaaacggagaagggatggggtgtctgggggacagtctgacgctgggtccatcacttccaggattctgggtctcagccctcggggtcgactgatgtcgcagggcttgcctatgtccccagtctctgcggtgcccggagggcgcggctgggggccccgaggctgtgggggatactgtagagggttacacgggcactggcgctggtgttgtccatcacagaccccagtgcccaggtccatcagaggggttcagtggcaaagccaggggggcctccacaggggcatactaaggggccccccaatgccagggcaggggctgcctttaactcggaggacctggaaacgggcttgggctacaggggcccaggaagcccattgggccagcccggccaaagtccccaaggttgtggccaacatttgccacccaggacgcatgagggacaaaaaggaggac

SEQ ID NO: 497780 - DNA, 81 bp, Homo sapiens
ctagaagattcagcaaagtacttttgtgctcttggggaacgacttcctcctgtactgggggatactccagcacaactcttc

SEQ ID NO: 497781 - DNA, 177 bp, Homo sapiens
ttctgtaactattgtcgcacagattaccataaccgggcaagtctgtggagaggagctatgcacggcggtattcacactgcccgttttcccatgggatgcctttcttctgttccaggacccagcattgcattccgatcctgtctctttaggctccttccttctgcgacccgggatgtg

SEQ ID NO: 497782 - DNA, 284 bp, Homo sapiens
ctctgctgtgggtaggcagaaggcgttatcaggtagactgaccggaacgccagaagtccgagtgttcctcacaagattattcctctgagttgccggtctcacggttatgatgaggttacggctataagcaatcatcatgtctgttacttgatcaaggctcttccctgtagacttctatgccattcacttctaaaacttcatcatgaacagctaatagtcctgtggtgtgagccagacctcctgggacaagcctggagtatcaagatcccgggaaccttttctag

SEQ ID NO: 497783 - DNA, 108 bp, Homo sapiens
tatgacgcgcagttccgagacgccgccggtcaggtttcggtgtcgccggggttgccgtcgacaaagcgggcatgggccagaatgcgagcggtccgtgatgtccttcag

SEQ ID NO: 497784 - DNA, 206 bp, Homo sapiens
  misc_feature (6)..(6): n is a, c, g, or t
  misc_feature (22)..(22): n is a, c, g, or t
  misc_feature (33)..(33): n is a, c, g, or t
  misc_feature (176)..(176): n is a, c, g, or t
gaggcntgagccgttggggacntcgagcaacgntgactcggcctccccggacctgggtccccggggtcctggactggcggttctgcaggcggagcgggaagtggacatcctgaaccacgtgttcgacgacgtagagagctttgtatcgaggctgcagaagtcggcggaggcggccnatgggctggagcaccgggagacgcggtcgc

SEQ ID NO: 497785 - DNA, 298 bp, Homo sapiens
ttccaaaaagaggaaggtataatgaggtatgtctgaccccccattcccatcatggcctgagctagtgtttcaggtttactttagaatgctcttggccaagtggaagggtcgattcagttggttgtgggcttagaattttatttttgacttacatagactatcagctgcttcatgtcacatctcatgcttttcttatgttgcccagttttttcagggcttccggcggcatgtttttgtactatatgaaaagccttctttttagaagactaccaattaaatatttctttagacaaatgta

SEQ ID NO: 497786 - DNA, 382 bp, Homo sapiens
  misc_feature (374)..(374): n is a, c, g, or t
cgaaatagggtactgtccttttaattgcatcctgagaatttttttcctgatttccctacgtctttaactataacttctccatctctctctctcactttctttctctttctcttcatccttgcccattcaatattgggtttcccaaagtttgcccctggaccttcttttcattttattctctatgcactgtatgaaaggaatctgtctactcccatattctcaacaaacccctgtatgtttgtatcttcagacctgacaatttcttagactttcaatctaggattaactactgtctagcaatcatcatgacatatggcaaacttactgttctataggaatctcataatcaacatgaatcaaactgatttcattgntctgccta

SEQ ID NO: 497787 - DNA, 429 bp, Homo sapiens
cagctggtgagtagcttggatttacaggtgcctgcatacgtccagctaatttttggtatttttagtagagacggggtttcaccatgttggcctggctggtctcgaactcctgacctcaggtaatccacctgccttgcgctcccaaagtgctgggattacaggtgtgagccaccaagcccagcccagttttgttttgttttgtttttaaagacagggtctagctctgtctctcaggctggagtgcagtggcgcaatcttggctcactgcaacctccacttcctgggcccaagtgatccccccacctcagcctcccaagtagctgtgactacgggtgcacaccaccacacccagctaattttttttttttttttggagacagagtctcactctttcgcccagattggagtgcatgggcacgatctcagctc

SEQ ID NO: 497788 - DNA, 404 bp, Homo sapiens
ttttcatttcattccatctttaaaattttttatctttggtggagaatattaaaaactattttaagaaagataaattctctttaaaaagatctctagggggtgtgaataaagctccagatgcctttaaaagccgcatgtacaaaggaagccacgtctatcccgtctgtttaaatttgcttttcctgttttgtaacctctttggactttgttcatggtgacttgtaagctaaggggaaggggggcctaaaagcctttgtatctttccatgtcacgcggtcctgggccagccggcctcccttcctctccttgtatgtaaaacctttttttcccctttttagcaaggactttcaaaagaactctggacattttaacataaaaaataaattatgttgagcccttttgga

SEQ ID NO: 497789 - DNA, 237 bp, Homo sapiens
tcggccggtccgcgaatcacagaggtgaactcggggctttagtatacctatcaccgaatagtgaacatgtgcccaatagttaatgtctcaacccccaccgccccaccaccatccatcctcctaccttatggagtccccagtgtctattactgccctgaataaaaattattttaagagaaatttatttaaacagacaggacagcttattgttcagactcctgatacaatctcaacaga

SEQ ID NO: 497790 - DNA, 172 bp, Homo sapiens
tttacatttctctaatagtgattttaaacatcttttcatgtacctattagccgtggtgtatcttctttggaacatgtatatttaggaattctgttgggtcacctctgtgttgtagagtctgttagtggcctcacaagattcagtaccatgctgtgagtacccatcgcgtgtg

SEQ ID NO: 497791 - DNA, 103 bp, Homo sapiens
  misc_feature (33)..(33): n is a, c, g, or t
  misc_feature (69)..(70): n is a, c, g, or t
tgatccccccccccccccgatatttagggcttncgccctctctcccttgcctttagtgtgaaaagaggnntttatttcaatgcttgacagcagggacagcggc

SEQ ID NO: 497792 - DNA, 117 bp, Homo sapiens
ggggatcccttctcccccacatcccttagatggagcgagctttattcaaccccccttccacattggtcaaccggccccacttatatacacttaaatatacacgtttttcctttttca

SEQ ID NO: 497793 - DNA, 196 bp, Homo sapiens
cacgtagtacgtgtcgtgcagtacggtatctagtgatgagtttgctaatacaatgccagtcaggcgacccccggggttatataaagatgaatggtagggctcagagcactgcagcagatcatttcatattgcttccgtgggagtgtggcgagtcagctaaatactttgacgccggtgggatagcgatgattatggt

SEQ ID NO: 497794 - DNA, 442 bp, Homo sapiens
tatttatttattatattaagtatatagtaaatttatttttaaaaatacataaaaaatctttaaaaataattttttgcaaatttcataacttagcaaggcatattgttttatttcaaaatgtatttctttactagcaaagttgactacttaaaatatatctgtattgaagcaccagaactgctgactattacaagtttgtagggtccataaagtcaagcatatctttatactaatgtgtagaaaacctctttcatttgaaactttatgaaaatcaaaatgattcattaataaaaaatgattcttaaaaatgtattatttacagtttttaagatataatgctattactacttaatagactacagtatagtgtaaacataacactaaactgtattattgtacaataaccaaggaaatctactcaaaataaactttaaaattggga

SEQ ID NO: 497795 - DNA, 365 bp, Homo sapiens
aggacccgaaacctaataacgctagcacccaaacgtgagcaatattaatactctgcaaaatatatccatagattttaaagtgaaactggtttaccttcagagcttggtgttaaatacaccattcactggattccataagtgtataatcactgctatgagatttggtatctgtttctgaaatataacaacatatacctttactttatagggcatcacataatacatcttccttagaagggagcggtagagggcagggaggtaaataacagtcatgcactcataaattatggcttactttcaagctgcgaaagatcagtatagatgaattctgtctcgtatatgacttggttcccgtaattagggtt

SEQ ID NO: 497796 - DNA, 249 bp, Homo sapiens
  misc_feature (69)..(69): n is a, c, g, or t
  misc_feature (78)..(78): n is a, c, g, or t
ctggacctgtgcttgggcatcagcaatgagtatgccttctattgtgctttgtttttgctgacttttctngcaccctgntttcctttggatattcagttctctcaacgctcaagattgagacggtggtgggtatgcttcttccaactttccattattgaacctttcaatggcctgtgttctctgtggacaattattcaacattgctacgaggtcatccttcacactacttgtaagccaagcaaatgatac

SEQ ID NO: 497797 - DNA, 396 bp, Homo sapiens
gtcccatcaataggaacggtatttgccatcataggagggttcattccatgatttcccctattttcagggtacaccctaggccaaacctcgcgcaaaatccatttcccttttaattttatggggggaaatttaacttttttcccccaaccctttttgggccaatccggaatgccccgaggttactggggttaccccgatgcatacaccccatgaaacatcctatcatctgtagggtcattcatttctctaacagcagtaaaattaaaaattttcatgatttgaaaagccttcgctttgaagcgaaaagtcctaatagtaaaagaaccctccataaacctggagtggctatatggatgcccccccccctaccccacatttgaagaacccgtatacata

SEQ ID NO: 497798 - DNA, 953 bp, Homo sapiens
tttttttgggttgagcacaggttacttaattgatggtacatgacaaggtgcggctccctaggcccctcccctcttcaaggtggtctacttggcaactgagttgtggcagggactccccagcagtgaggtgtctctcttcttcctcttgtgctcttgctggggctggtgtgcccaggggtcttactccttggaggccatgtgggccatgagtgtccaccacccttttgcttgtacccaaattctgtggtcataccatggaaatgagtcttgacaaatgtggctcgttagagggcaatgccagccccagggtcaaatggtggaggatgtgggttgctccgcttgtttgaaagttcagaaggaagaacccacctgtgtggtgcctcaggtgttaccccaaggaatgcccctttgaagggtggccccctcctgaacgccgtggctttcacacaacctttcttgtgaaatgttccactcaatatattgtgggcaagagttttttctcttagaacgggcgaggtctcagaggtctcccaccacacgtggaacacacgtttttgcgcacggttggtggcaccacgtgaaaagcgcccagttgcccagttacagcttttccccgtttcaagctctcgagggggaatgaaacttttgcccccaaagagcctttttgggcaaagcgcccgagttagaaggcgccagggatataaagtgttcgtgggagaagccccccgtaggtccaaatcaaaggccaagaagttttcccccgggaaggggggggccccatcaccacaaggttctccctatgggggtgggaccagttgcatgggctaatgggacctgttgggtccaataagtctccttcccccacgaattcccccaatgctttctctggtggggggagacaccttattcttttcccgggtgaccttcttaagccaccttgtgctgtgcttctc

SEQ ID NO: 497799 - DNA, 179 bp, Homo sapiens
ccaagacctgcttctaacctccctgttcttatgaattcgaacagtcatacccccgtattccgctacgatccaactcatacacctcctatgaaaataacttcctaccactcaccctagcattacttatatgacatgtctccatacccattacaatctccagcattcccgctgcaaaacca

SEQ ID NO: 497800 - DNA, 1242 bp, Homo sapiens
tgcaatgcccgaccgtcaggtggcacagaggtagatttccctgcgccccctacgtgggtttttgtctgtcaaacactgtatgctgtgggtggttgctgaacaaaacacatcatggactaacatagggtcgtgtggggaataaggggggtccttgaatagtatgatccataaatagattgttgcgccggggttgtctctttgatacacgcccacctttgtgtgaacttattcaccggcgggggatatatgttggcgcttttttcttaagaatacgttggctcagacaggaagccacccctggtttggtggcccggcccctgttgttttttttcctgtcccccaccacacaccgccctatatttctttgtggggggacactaaaagatgcggcgcgaatgaagggggggaagagtgggcaactactttttcttcttgaatagagaactagctggaagtaagtgtccccccccctccgaaggggcccaaaaagacttctagctgaaggggggcctctctgttgttgggtttttttttctcctggagcgcgttttttgtgacacgtgagcctactcgctgcgaacaccacactaaatggcgagaggtctcataaaccccccgggggggaaaacatcccgtgtaggccaccaggcagatcgtggggaatgaaacacctgttgggcgtgtctccagacttggggcgctctggcacaaacaggaggtatatagtgagaggtgatagactggaatgttcttgtttttgttgtgcgcatatggaggatattctcacatgggttccagatgttccctttctcgccttaggtaacaatatcccccgccctgggtataggaaccggaccatggataatagcttatgccagcctgcgacattttacccttttaaaaatggatcccctgtttgtgctgggtgtgatggccccacagtcttataatccccgcccatatgggaggcccaggaacacaggccagattttaccggaggtctaggagtcccgagacccagccgtgaccaagccatggtgaacaccccatcttcttacctaagataattaataccaatttcgcgcgggcgtggtggcgcaccgccctgtgatccccagttttactcaagaggctgaggccaggagaattgcttgaaccccgggaggcgcgaggttccagatgagactgagattacaagactgcacattcagccctggccacagagcgagagtccgtttccca

SEQ ID NO: 497801 - DNA, 1006 bp, Homo sapiens
  misc_feature (242)..(242): n is a, c, g, or t
tttccagtctcagctctgcacagtctctgagacgctcctggaaacttgtataggttgttgacctggtggtactgggaaaaacgaccttcgctgagaagccgtcattttgactggtgacaattatgagacagaatgctatgtagccgaccgtttggcggtgttcgaggtttcatcgccctaactggttccactacacaactggtaggaccttaattaagcttcatatgatatggttgacacangcctggccaggagtacaacttcggttggactgaaagtactggctacttagtatccatagctccagctgttgcctgtcataatgctctgatgtatacattcgaggatgttacttacaagaatttgtgccttatagctcggtaatagtagatcgtaggtactgacgtgtgtgaatacaacattcactcatgttgtgtgttgtagtggctaactaagatgtcggatgattttatgtgacaaggaagaagtagacaagtggctgagaatccaatttggcttccactctgatcatgaacgaatcttcacgtactatcggacatttcttgccagataagtaacctacagagcgttttgaataacgcgcctttccgtcttggcgtttgacttatgggaacgcttcatttcggcacgacccttaaatcttggacacttatgttcgcgcgattgcctgtatactgcagatccacaacggagaaagttggtgccataggaacactcaagttatattgagcatgcgcacagtgatttgagcaacgggaagtgaaagaaggttcgctaacaccacattaccgtgcattcttcccctgggaattgatcgggatgaattggacccactcgtagaagacatgtgaacattcatgggaagcccctaggtggggtccggaaaagttctatggtttaaaataaggcgatgtcttgtccctaggacaatggttcaagcgtgtgagaggagtgaggttgccagcctccaataaattaatcctag

SEQ ID NO: 497802 - DNA, 599 bp, Homo sapiens
gtctggggaaaactttgcaagtgatctctttcatcgacgtcctcttccgccacacgccagccaaaacagtccttgccattgtgccggttaatactcttcagaattggctggcagagttcaacatgtggcttccacctcctgaagccctcccggctgacaacaagcctgaagaagtccagcctcggttctttaaagttcacatcttgaatgatgagcacaagacgatggcatctcgtgctaaagtgatggctgattgggtgtcagagggtggcgtgctgctgatggggtacgagatgtacagactcctcactctgaacgaaatcatttgccacaggtagaccgaagaaaaccaagaagcgttctcacccagtcatcattgatctagatgaggaagatcggcagcaggagtttcggagagcagttcgagaaggctttatgccgccctggccctgatgtagtaatctgtcgatgagggacaccgaatcaaaaactgccaggccagcacctcacaggctctgaacaatatccgatctcgccgacggatggtgctgactgggtaccctctgcacaacaactcattgagtactggtgcatggctg

SEQ ID NO: 497803 - DNA, 416 bp, Homo sapiens
aatgttgtcatggatacctctgcatttctaaatggtgaaaagcttctatgacacatgatggaaaaaaaaagccccatcgtgattttcccactgcacatctattagaatgactaaaagtaacaccaaacccaaacacccagacaatgcgaaatgctggcacagatgtggagcaactggaacccccatacgttactgatgggaatgcaaaatgatacagccactttggaaaagagtttggctgtttctatttttgtatttttagtagagatggagtgttgctctgtcgcccaggctggagtgtagtggacctatctcggctcactgtaaccttcacctccctggttcaaacaattctcctgcctcagcctcctgagtagctgggattacaggcgtgccaccatgaggctagtgggctg

SEQ ID NO: 497804 - DNA, 877 bp, Homo sapiens
gacgcgctcggaagcaacttccttggcctgtcaccgccagcgtaggtgctaccaccgctgccgtcgccgcccgccattttgatgggcagggaagagtccgggttcctggacagcgtgagacagtgtgtggtgactgaaataaattaccaaaggaaagctatttggcgaactatcttctccagcgaggatatggccaagtgtgccttgtgtaacagagccagagtgttttcctattctcccaggattgggctcttatagtaaaaggggtgtgtcattcccaaaagccttttcgattgcaggatcatcaggtcccggataagtctcatgtggtgttgaacctccagatatatggctctcgaaccagtgtgcctgatgaaacctatggaaccccttttgcacctcagatcagaggtcccagcttcctggaaccatagggttttgatttgtcacctcaatggactgcttcacagaagaaacacgctggtccataaaatttgtgcctgatgtctagcagaccttatcacgtgaaacgccctgcgtttgtgatgcccattatgtgatgacttccaggtacatgttgccgctgtgggacccaacgaaattcaacatgtgcagacactttacttgtgacagtgccacgagtacgagtgtgccatgcaacatgtcccagaatggtgggaacacggttctgacatcctgttccacgaagtagctaatggcatctattgttctggtgggaccaaaactagaatgttgctggtcggtgaccatcaatggagacgaggcttctaaatctacagggcgagaatgttacctcgaacggggatggcgctttgcccactgtggctgtgccaaaacacttgtgtgggccctatcg

SEQ ID NO: 497805 - DNA, 1671 bp, Homo sapiens
  misc_feature (512)..(512): n is a, c, g, or t
  misc_feature (987)..(987): n is a, c, g, or t
cacaaaaaaattagctgggcgtggtggcgcatgcctcattcacgtacatgggagagtctacaaagtcacacgtattcataggttaagccacatgctgacaaatgtcataagaagaccctacacttttaccttggccgatccctcccctcagtgcaagctctgtgcaagagtgaacttgaacttcactcagtgcaagagtgaacacacactttgtgccggctttaaagaacccagcacaaagccagtctgcatggcctacagacatattttgctggacaatgattacttgcttttctttttgtttttcttgtatttgcctgtttgattggctcctgacataccagaaaatcactgtcaaaacattagcttaacatttgttaaggaaacaaaaagacttcggtgaccacaccttataaaccaaacagttttgtaaatcactttggaaaatttcactaaaaaaaaaaatccttaacaatataataagtaaagaaaatttaaaaccacaaaacatnactgtgtttgtagggggaggtctgatttacagagtaaccacatagtaattataattattagaatgtccagttttcaaaaaacgttacaaggcatacaaagaatgggaaagtgtggctcattcaaaggaacaaaataaagtgacagaaaatatccctaaagaaacccagacatcaaacttaccagacaaagactttaaaacaactgtcttcattatactcaaatgtcaaaaggaaaacataaacaaagaaataaaggaatcagaaaaaatattaaaaagtaggaatatcagcaaagagataacaaattctggagtggaaaactacaatgataaaaatttaaaaatcaccagagggatttaagagtatatttgcacacacagaggaagccatgaacttgaagagaagaaaatggaaaatactgtctctgagaaacagaaagaataaaaaataaacaatgagcagagactaatgaatntgtgggacatcatcaaatagaccaacattcatattctagaaggataaattatgttgttaaaaagtttaccattctttcttttcacctttcttccttcttccttccccctcctcctttttacttttcttcctcttcctttctcttcttctttctctccttcattatccctttcgctgtttctctttctccctttctcttttttcttttctttcaattttctcaattactaagagatgtttaagtacccttagcatgttagtagatacggttatttctccctttagttctcttttgagatttatagtcactcaaataaagagataacccaaacataagcgtcacaaacaggctttcataccattcttaatttggtcctgtaattcttcattgctgtattaattttctgatgcttttaaggatgttttataacaaattgtgtagctttttccaatggaatgtttattctgaattatctaattcatattgtaagtatagagggagtttaatataaaattattaaactaatatttgtgaaagaatgtatttgtgcatttaacaaatatgttaatcctcagactgttattgggcagctgagcatacaggaataaaaataacacaatttttatgtgtacaatatttatggaatacgttactggacccaataaataatttagttaataacaa

SEQ ID NO: 497806 - DNA, 877 bp, Homo sapiens
agcgtggagggggccgaggccccgcccccggtcctctgccccgcccgccgcgattatagccgatgactcagggcggagctccgcatccaaccccgggacgcggacatgttctctggactggaccagaagtttctagccgggccagttgctacctcccgtttagtctcctccttcccctctggcagcgaggaggctatttccagacacattcgcaccgcctctctgtgccacggtcaccccacgagctttaattcataagatggtgcccaggcgccggtttccctggacaacgtcggcggcggagacggggcccactggcgagtggcccggccagagacgtcggcgcccggagccagtgcctccggacaccgcgcccctagtcgggcagaaccctaagcacaggcagtgagcgtccgccattccatgtcgccccatgatgcgaggtggacgtccggcaagcggtgaccgtgaccctgttgtcacccccggatgggagatcaagatcgacccgcagaacggctgagcccttcttcgtggaccagaacaggcgaaccattacgtggaacggaccagagcgttgccctctgatggccccgaagggagactccatcctctgccaatggcccttcccgggagagctctaggctgccgcatgctacggaaggcaccctgtgtaccccctaggtctgaaccagtgctacattgccccattcctggtgcttcctatgacggcggctgaagaagccgcgcagtgtgcaacccttttcccatggttttatccccaagcctggggattgcatccgattccgaaaatgtccggcgggcaacagcgggtccctccgcaagtcccaatcaacccctgccgggggctttcaca

SEQ ID NO: 497807 - DNA, 666 bp, Homo sapiens
ttgaggacttacctttccacgaaatttgctcgcgaacacctaattcctgagggagtgcttaacttcctcgaggcccggaggagggagcccacacgcgtgaacccgggccaaagtatctttcacattcgagaatgaagtttttttgagggaatcacgcacctgccacgtggaagaatgggcgtcacactaactgctaccctcatattcacctgcgctgtggacactgaggacatccgcccgtgtgttcaacgactgccgtgacatacatatcagcgcatagcacctttgtcagtacgaggactgcttcttaagaaaggggaccccccaatatttaatataaagaccttaagcgacaattgaattaaaagtgagaacagtaattgtgacaagccagtgttatcacccaccatagggcatgattaaccaagcgaacctttcccttcccccgagtgattttgcagaaacaccccttttccccttcagcttgcttagatgttcccaaatttagaaagcttaaggcggcgctacaggaaaagggaaaaaggccaccaaagttccctttcactttcagttaaaattaattaaacagcagcagcaaacaaattaaatgaaattaaagaaaccaatgaaataaatattgtgttgtgcagcatttaaaaaaatcca

SEQ ID NO: 497808 - DNA, 109 bp, Homo sapiens
atctcctccttaagtctctcatctgcatctccaggtcagcgttggcctcctccaggacgcgcaccttctccaggtaggaagccaggcggtcgttgagatcaggcatgta

SEQ ID NO: 497809 - DNA, 1951 bp, Homo sapiens
  misc_feature (512)..(512): n is a, c, g, or t
  misc_feature (987)..(987): n is a, c, g, or t
cacaaaaaaattagctgggcgtggtggcgcatgcctcattcacgtacatgggagagtctacaaagtcacacgtattcataggttaagccacatgctgacaaatgtcataagaagaccctacacttttaccttggccgatccctcccctcagtgcaagctctgtgcaagagtgaacttgaacttcactcagtgcaagagtgaacacacactttgtgccggctttaaagaacccagcacaaagccagtctgcatggcctacagacatattttgctggacaatgattacttgcttttctttttgtttttcttgtatttgcctgtttgattggctcctgacataccagaaaatcactgtcaaaacattagcttaacatttgttaaggaaacaaaaagacttcggtgaccacaccttataaaccaaacagttttgtaaatcactttggaaaatttcactaaaaaaaaaaatccttaacaatataataagtaaagaaaatttaaaaccacaaaacatnactgtgtttgtagggggaggtctgatttacagagtaaccacatagtaattataattattagaatgtccagttttcaaaaaacgttacaaggcatacaaagaatgggaaagtgtggctcattcaaaggaacaaaataaagtgacagaaaatatccctaaagaaacccagacatcaaacttaccagacaaagactttaaaacaactgtcttcattatactcaaatgtcaaaaggaaaacataaacaaagaaataaaggaatcagaaaaaatattaaaaagtaggaatatcagcaaagagataacaaattctggagtggaaaactacaatgataaaaatttaaaaatcaccagagggatttaagagtatatttgcacacacagaggaagccatgaacttgaagagaagaaaatggaaaatactgtctctgagaaacagaaagaataaaaaataaacaatgagcagagactaatgaatntgtgggacatcatcaaatagaccaacattcatattctagaaggataaattatgttgttaaaaagtttaccattctttcttttcacctttcttccttcttccttccccctcctcctttttacttttcttcctcttcctttctcttcttctttctctccttcattatccctttcgctgtttctctttctccctttctcttttttcttttctttcaattttctcaattactaagagatgtttaagtacccttagcatgttagtagatacggttatttctccctttagttctcttttgagatttatagtcactcaaataaagagataacccaaacataagcgtcacaaacaggctttcataccattcttaatttggtcctgtaattcttcattgctgtattaattttctgatgcttttaaggatgttttataacaaattgtgtagctttttccaatggaatgtttattctgaattatctaattcatattgtaagtatagagggagtttaatataaaattattaaactaatatttgtgaaaaaaaaaaaaaaaaaaaaaaaaaaaaaaaaaaaaaaaaaaaaaaaaaaaaaaaaaaaaaaaaaaaaaaaaaaaaaaaaaaaaaaaaataaaaaaaagcaaaaaaaaaaagaaaaaaaaaaaaaaaaagaaggggggggccagctattaaaatcttatatccggggggaacacaaataacgacaaccacaacgacgtgtattgtagaaaaaggagtcgcaacaaaaaaatagataaaataaaaaaaagagagcggcgcgagtcccaacaaacaaccgaggcgaaatacaaacatgcagacggacattatagagaacacacccctacggtggtagcaataaggcaccaaccacacaagagataagccaggaaaatacacgcggcagtggtggcaacaccaacgtggcgggagaacgtccggatatacacag

SEQ ID NO: 497810 - DNA, 892 bp, Homo sapiens
  misc_feature (208)..(208): n is a, c, g, or t
accataaccaatactaccaatcaatactcatcattaataatcataatggcgagtgactatgataaaaatttaaaaatcaccagagggatttaagagtatatttgcacacacagaggaagccatgaacttgaagagaagaaaatggaaaatactgtctctgagaaacagaaagaataaaaaataaacaatgagcagagactaatgaatntgtgggacatcatcaaatagaccaacattcatattctagaaggataaattatgttgttaaaaagtttaccattctttcttttcacctttcttccttcttccttccccctcctcctttttacttttcttcctcttcctttctcttcttctttctctccttcattatccctttcgctgtttctctttctccctttctcttttttcttttctttcaattttctcaattactaagagatgtttaagtacccttagcatgttagtagatacggttatttctccctttagttctcttttgagatttatagtcactcaaataaagagataacccaaacataagcgtcacaaacaggctttcataccattcttaatttggtcctgtaattcttcattgctgtattaattttctgatgcttttaaggatgttttataacaaattgtgtagctttttccaatggaatgtttattctgaattatctaattcatattgtaagtatagagggagtttaatataaaattattaaactaatatttgtgaaagaatgtatttgtgcatttaacaaatatgttaatcctcagactgttattgggcagctgagcatacaggaataaaaataacacaatttttatgtgtacaatatttatggaatacgttactggacccaataaataatttagttaataacaa

SEQ ID NO: 497811 - DNA, 305 bp, Homo sapiens
tgatcagtgcattgtggggatacttgtggatagcggagaaattccaatcgaactcggagatagctggttcttcccgaaatagctttagggctagcgttatcttagtttaccggagttaaagcactgaatgggctaggggccgataaggttactgaaccctatcaaactctgaatgccggataaatgatggatagcagtcagacagtgtgagataagtttcattgtcaaaagggacacagcccagacccacagctaaggtcccaaatgtgcgctaagtggaaaacgatgtggagttgcgaaaacaa

SEQ ID NO: 497812 - DNA, 1189 bp, Homo sapiens
gtgattcggtcgtgctgttactccggtggctggttgcgtgtgagctgatcgtctagaggtgagtgacagtggggtgagaaaagggtctcgtggatcaccgcagcgcagtatccgctcagacgacgacctctgttcgtgctagtgcctctcgggaaaaatactgaggcgataagtcaaagggagtacacgtgacgtactacagaacctgagagaatcgcgtgtggatatagagacttgtgttgctataggaatcacatcgagaataaattaatgtgagcctaggtcgagagattgaaaatgttgctgagtgcatgtgagaataatccatgtgtacaatcgcttgtgttcaatgcactggtacgaaaggaagatagggtcagtaggataaccttgcaacgctagatctcggtgagggcatcgggtggtttgggtgaatgggcgcgaatgcggaagagtatgaggaattgatgcgcaatggaaacaagttatggtaggagtattggaaattctcggtcattcacttgttttttaaagattaatgttaactttggcattcgaagaacaacacttatattacacggattaacggagaattcgaaaggatacgtgacaaaacgacggttttgtgggcgcagttctggcgtgcggcaggacttccttagtggagcaatgcacgaagattaaagttcagccgcagtacagttatcttgcgtacaagcaggggggaccttaaccgagagaggagaccaacgatcaaaacctgatgtctgaaaaagagggtggacaaccaacgcaagtgtatcccaatagaaaggacgcttgatactcgcacaccgtaagtggcagaacaccctagttcgagtccattaccaacccaattgcagccaggggcagccacagcagttggcacaggaattccacagcacacagcggcaatacacgacacacgctaggaccaggtgtgacagcagccacaggaaaagaggtggagaccgccaggacacaaaacaagaccaacgaaagaaagaggggcaggttagacccagtggcgggagcctattggggaagtaggggagcatctacacgaaggcaaagaacgagcgcgaaaagaccgacaacgcaagggaaactccacgctatacgactcgggaagcgtcacagtcgcacgcgccgcagacacgaggagagc

SEQ ID NO: 497813 - DNA, 729 bp, Homo sapiens
atggtgtcaaccctagatagttacacgaacatctgaagattgaaagtagttaaaaaaaaaaaagggaaggaaataaatatcaccaaggaaaaaaggataaatggtagcttaaatataaaacaaaatcaccagtaaataaaactatacggatctaatacaaaccaaaaccagcctgaaagacccaacctaaaaaaatgctaaaaaatagggcttaaatcctagcttaatattggagttttattatccattctctcttaaccctctattatgtatacattacctgatctgcctctaaggggctaacaagaaaacgttacccggatcccgtatacaatttgacctcaaatgtcctgagcaaagtatcagaaaaactagcagaggatacttaggaggcaaagcttaagacatcataatatcaacaaatacagtattatggatcgtagcgccaaatctaaatccttccactggtccttctggaagaaattaaaccttttacagtgccttgctagcccagtataatgtctttaaaaaagaaaacccaggcaaaatctatggcttaaggaggtccttatttttaaacaaacagataactttgaaatttacaaccttgggagaaccgtcataagactcctatctaccgtgagaaaaatacaaactgtctgacactgttattctcccgatcataggcattgagacttttatcgaatattagtccaccagacgagctag

SEQ ID NO: 497814 - DNA, 179 bp, Homo sapiens
ggttgggcttttctcccgggggtggggcgggggcattgggggcccgggtttggggaatggggcatcaaaaacctgtaagggtaaaaaagggccctgggttgggtcaggttaaaatgggtccgtttccccagcccttggttttgtcatcatgggagtaacaaaataataatgtcccccca

SEQ ID NO: 497815 - DNA, 120 bp, Homo sapiens
gtacctcagtttgattcttgccagtcttctctatcttgaccagacacattgacccaaattctttctttcttttatttttattgagtcttgcactgttacccaagctggaggggccgcgcg

SEQ ID NO: 497816 - DNA, 102 bp, Homo sapiens
ggccggtcctacgccatggggtgaactatattgtttatatgttgtatagagagaacacacaaaagatacgaatataggaattactcactgccgtggttaaga

SEQ ID NO: 497817 - DNA, 746 bp, Homo sapiens
  misc_feature (360)..(360): n is a, c, g, or t
gagactcgagggaccggtagctagcgcctcaactcagtcttcagacttccctgctgtgttgcagcccagccgctccatcatgtccttcagtcgctgaccacgattgctgaattcaatggaggcatttctcctgtttgacagaacaggtgagttccaagatcaccttaagccagcgtcggtgactgtccttcgacgcgtctgggcacaaatctccaccaattgcagaggtcaggaaagttcgtgggaaaccccagcaagtgaagagctgaatgccaaggaaaatcgagtttgaagcaatttctgcctatgatgcaggccatttccaacagagcaaggaccaggtccagcctatgaagactntatgagggtctgcgtgtctttgacaaggaaggcaatggcagcagtcatgggtgctgaactccgccatgttgctagccaccctgtggtgcaaagatgaaatgaggagacgaagtggaagccctgatggcaggtcatcgaagactccacatggctgcatcaactacgaagctttggtccaggcaacgtcagtgtctatctgaactggagctctcaagatgcaagcattgtttacggaacgactggctggaaacttattttaatgcacacccatgaatgaactctccagatctgtttaccatcagttcaggaaaacaaagcaatctggaggtcaagactgagcaggtcccgaatttatgccgtctccaggttccctgaatgattcctac

SEQ ID NO: 497818 - DNA, 200 bp, Homo sapiens
catcaatcctctaccatacatcctgtagaattcactataaatcgcgctgatagcaattctatcttgagagctagagccagttcgtaatacatacagttcatgactgtaattaactctgagaagaaacataatcctaggatgttgtgaggtcaaagtgggctgatcacttgatcccaggagtttgagatcagcctgagcaa

SEQ ID NO: 497819 - DNA, 864 bp, Homo sapiens
  misc_feature (864)..(864): n is a, c, g, or t
gcggctgcagcggggtgagcggcggcgagcggtcggggatcctggagccatggggcgcgcgcgcgacgccatcctggatgcgctggagaacctgaccgccgaggagctcaatgaagttcaagctgaagctgctgtcggtgccgttgcgcgagggctacgggcgcgtcccgcggggcgcgctgctgtccatggacgccttggacctcatccgacgaagtcgtggtcgagcttctacctggagaccgtatggtgcctgagcttctaccgctaacgtgctgctgcgacatggtgcctgtgaggagatgggcgggacaagactgcatggcgtgtcaacgcaccgagggctctggagaccgcagccagcttgggatccagggccccgtcctcagtctggcagcgcaagccaggcctgcacgttatatacgatccatgcacctgggctgcagcttatcgcgagggtcgacaaacgttgagtggctgctggatgctctgtacgggaaggtcctgacggatgagcagtaccaggcagtgcgggccgagcccaccaaaccaagcgaggatgcggaagctcttcagtttcacactcaggctggaactggacctgcaagggacttgctccttctagggcctaagggagtcccagttgctacctggtggaggacctggagcggagactgaggtctccttacccagtcaagcactccggtcagcccctggtcaatcgcaccgaatgatcttgaatctgatcttgtgatagcagaatataggaataagccagcttggaaagtaatcgggagagggaagatagaacaaggttactctggtgagggttgaaggaagaatgacaaaattggggggaagtgn

SEQ ID NO: 497820 - DNA, 519 bp, Homo sapiens
tcggtggagtgaggcagtgacggccggtgagattggaagtggctggcgtgcgtgcatgtgcgtgcacgagtgggagtccgagtgttatgcgtctcaatgatccctgcggaaactgctacgtgggtctaatgaacacgtgatcagtgggtgtctaccgtgggtctctcaagagacacagggtcctgtcccctgttcaacttgcttggcagtatgcatgcgatgctgacatctgccccctcttgtcgactgctgctagctggtcgatacgtgagctgcttggccagggaaacatagctccctggggcagttgtagtctggacgagtgtagagaagcctcatcatggtccatgtggattaacatgtttcggacagacagagtcagcccagaactctggacatgcaacgactcccacacctgaacgcgcgaacgagtacatcaggcacagagaatcgagtaggtgcacagctacctcatgtcccggcaggcgcagacataccacctatgggaaatgaagatca

SEQ ID NO: 497821 - DNA, 171 bp, Homo sapiens
cacgaggcctgccgtgaaggctgtgtctgcgatgctggcttcctgctcagtggcgacacctgtgtacctgtgggccagtgtggctgcctccacgatgtccgcttccacccactgggccataccttctaccctggccctgggtgtgactccctttgccgttgccggaaggtg

SEQ ID NO: 497822 - DNA, 273 bp, Homo sapiens
  misc_feature (15)..(15): n is a, c, g, or t
  misc_feature (74)..(74): n is a, c, g, or t
cagctgtgttgagcnagagagtataaccgccgggaaaggtcgtattggactggaaattgtattgatttcttggnattgcttaacccaatcttaagtctcttcccaccccatgccactgtcctccctacactagttcctcctcatgcatgggccagggggccctgctacattctaggcaactgggcttggagatgtgagattctaaggtcactgagctgctgaaagggggagctgaactcagcacttaagaacttctttaccccctctctcgct

SEQ ID NO: 497823 - DNA, 84 bp, Homo sapiens
attttggttttcttacaaaggtttgacattttccataacaggttgtaagagtgttgaaaaaaaaattcaaatttacttggggga

SEQ ID NO: 497824 - DNA, 1232 bp, Homo sapiens
  misc_feature (1035)..(1035): n is a, c, g, or t
cccacgcgtccggctcgcactgatttattacctgagtagggctagaaataacatactagtctttcattccagtgtctaaccaaaagacaataaagccctcggtatccacagaagtcgtgccatcaaggtatttcctcacgcgagcaaccgcactccagtatatccgtgtctaagtaggctagtccctcgttcagacacagtatactcctccgagacacatgagaccattagagccaactacctacgcaatcagatactcactcgattaattacatcactaattcggctatatgcaattacacaactgaggaactatgcgcgccgctgttcgacgttctaggagtcccaggacggtgatacccgaagggcacacccatacctgtacgaatccggtctctgtcctattctatcttacgacgaatggacgagaaaatactgacgcgccgcgcagtcttcgaggatcatgatgacacgaagagtgctcgtctcctcaacgtgaaagcgttgaagcccattctccgtcagcgtctcatcaagtcatttatcgcagtcagtaggccagtgcaggtctggaggctggaattaaaaccgaaaaaccgcagcgtacgccaagaagtccttaggcaatacctccgttcaaaggttagccccaacattaaggggaaatggaagtaacagtaaaggcaaagggtatgcgtaacgccggtttaaccgagaacccccgttgaaacgagttaaacaccagattgtcgtataagatcttgtaaaagcctacttcttgactacttgtagttccctaagacttaactaacccggcagtttccctaacgtaactccaaaccggttacaaacattcccaaggcagccaatcgaacccctaactacataatctcggcacctggaaaccaaaggctaaacatggacctggaacacccctttaagttccattccaaccttccttctaccgcttagggaaggggcatgtgtccccccggggtataaccggggtatattgggcccacaatgggggccctntattcggcacagaaaattctcacaaaataaaacacaattagggcgtacaatacatgcaccccaaccatcaattagtgcacaacaattaagccatctccttaataaccgtccatatacttctaacactcataagcgctcttatatcatacattccctcacccttcttaaatgatcaacaaagaatctacacccactat

SEQ ID NO: 497825 - DNA, 553 bp, Homo sapiens
  misc_feature (74)..(74): n is a, c, g, or t
  misc_feature (90)..(90): n is a, c, g, or t
ttactgtgggtgtagccactgcataaggctgcttactgtgtgaacagtgccaacagggaactctggaactggantggaaggtaactgttncactgcactttggggtctttcaaacacaagtggcttatttttcatctaacaagtatttttcctggggtatctgccaaagcaggtgctgtctggccactagatgtttctggagcaaggaaggctgggaaagattagaaagtcttgggactctagggagacaaagctccacactctgaaagcacacagggcctacccattggtagaaccactggcataaattgtactcatttttttccccttcaaataggatctcacagtaaaaccctgagtggcttgagacttgatataagatatactcatctcaaactcagagaccctcctgcctctgcctcccaggtgctaaaattataggcaagtgctaccacacctggcctcatttctaaagcttaagttctttaacaagcctaaaggtatttcacaatcttctcctttgttttttgagataaaatactaattagccctg

SEQ ID NO: 497826 - DNA, 168 bp, Homo sapiens
ctcgtgccgacaaatcactcattttgctgctgttggatatgtagccaagggtatatagatctttgaagtagaattgctggatcttatgggtaattctatttctaacttattccttcaagacagactctgaggcccaggcatggagttcaagggcacaatctcagctca

SEQ ID NO: 497827 - DNA, 538 bp, Homo sapiens
  misc_feature (103)..(103): n is a, c, g, or t
  misc_feature (407)..(407): n is a, c, g, or t
  misc_feature (516)..(516): n is a, c, g, or t
atgactttctgggagtccagagtatatgccatactctttctgatagtctgacttatcagaaagagtccagattttgggattcagtgagttgtgtttcaaatcncaggtcttccattcatgagtatgccatcttgaataagtaaattttccaaaacctcagtttctgtgtctgtaaaacgggggtaatcataagaccacaacagaactattgaagtaaacattgaatgaattggcagttggcattatcaattttacatggataaaattgggtcatattaactgggtcaagaggctggagatgagataaattggtgaaaatctcctttcatttatatgggaagaagagttagaggactgatggaacatcttggccagaaagatggcttggaactttgaggcagcagcanatgactggctcttcaccatctctcctgccttttgctatgacagtgtggagaaagataaatggcagaggcacttcctgtgaggcaacaagttccaggataaaccttaccncctcaggcttctgaaaaaaaaa

SEQ ID NO: 497828 - DNA, 341 bp, Homo sapiens
agggagggacagagaaggtgcctgcgaggccggggaggcggggagccttacatggtcctttgcagaagagtccggagacagcacagcttttaggacttcgtcctaggggcacagaaaaagctctcggttaacataggtggacacctgttggtcaccagatgaccctggtgagacagcttacaatggggagcgtgtgtaaagagcagcctgtgacagctttgccttgggggactagtgcaacctagtgcttgaaaaatgggaggacagcgttggattgtgagcttgctggcccatgtccttgtgaccgccacggcatgcctgcccttccccatgtagcaggc

SEQ ID NO: 497829 - DNA, 319 bp, Homo sapiens
  misc_feature (9)..(9): n is a, c, g, or t
  misc_feature (26)..(26): n is a, c, g, or t
  misc_feature (79)..(79): n is a, c, g, or t
  misc_feature (120)..(120): n is a, c, g, or t
  misc_feature (129)..(130): n is a, c, g, or t
  misc_feature (168)..(168): n is a, c, g, or t
  misc_feature (221)..(221): n is a, c, g, or t
  misc_feature (230)..(230): n is a, c, g, or t
  misc_feature (242)..(242): n is a, c, g, or t
  misc_feature (248)..(251): n is a, c, g, or t
  misc_feature (254)..(255): n is a, c, g, or t
  misc_feature (261)..(261): n is a, c, g, or t
  misc_feature (270)..(270): n is a, c, g, or t
  misc_feature (314)..(314): n is a, c, g, or t
cgagtacantacaccgatccattccngcatctcttacacaaagtagaaccagtaacaacacaccatcacccggcgctanatgtcaccgacactggtatctgctacgttctttaatgtacnccatcacanncaccgactaattaacggtctatatacaccctatgctgnccgcctcatcgaacgctcactctatatcgcacccggaagcgtggttggccccncccctaccncccgctcgtcgnacgacnnnnagnnatcgtnccataggancgaaacttacaagccaagcgactaaagcctgtgttctgtccccnaaccc

SEQ ID NO: 497830 - DNA, 308 bp, Homo sapiens
tgaggacagaaaagaggtatgagagggtgaaccgagaaggactagatcttaatagctctgtagcagaggaggcagcggtggtgagataaaagaacagggactggacgaggagtcagaaggcccaagtccaagccctaaccttaccttagtataccagctatgtgatctagagcaaaaatcccttcactgtctgtggatttgcatatcctggtcggtacgatagatcatttcaatgagatcaggtctgggattccttcacatgccgaaatccgattctgtcctcatgtacgtgccggggtaccgagctc

SEQ ID NO: 497831 - DNA, 278 bp, Homo sapiens
tttgaggctgcagtgagctatttttgtgccattgcactccagcttggccaacagagcaagacctggtctcaaaaataaacaattgaaattaaaaaagcggccaggctttgtggctcatgcctgtaatcccagcactctggaaggccgaggcaggccgatcacgaggtcaggagttcaagaccagcctggccaacatggtgaaaccccaatctcaattaaaaatacaaaaaataagccgtgcctggccggacgcgatggatcacgcctgtaaattccag

SEQ ID NO: 497832 - DNA, 276 bp, Homo sapiens
  misc_feature (9)..(9): n is a, c, g, or t
  misc_feature (47)..(47): n is a, c, g, or t
  misc_feature (63)..(63): n is a, c, g, or t
  misc_feature (86)..(86): n is a, c, g, or t
  misc_feature (104)..(104): n is a, c, g, or t
  misc_feature (115)..(115): n is a, c, g, or t
  misc_feature (266)..(267): n is a, c, g, or t
tgctcctantctccgtaactgtagtgttgccttttcgagaatagcanataaataatcatgtantatgtaacattctgagacaggcntcttgcacccagcataangcctttgagantcatccagatcgttgtgtgtatcagtagtttgtttttattactgggttatagttcattgtatggatataccacagtttctttagccattcacccactgaaagtcatttgggttgtttctaggctttggtgattatgaataaagctgctatnnacatccaaa

SEQ ID NO: 497833 - DNA, 1082 bp, Homo sapiens
  misc_feature (37)..(37): n is a, c, g, or t
  misc_feature (158)..(158): n is a, c, g, or t
  misc_feature (216)..(216): n is a, c, g, or t
  misc_feature (243)..(243): n is a, c, g, or t
  misc_feature (251)..(251): n is a, c, g, or t
  misc_feature (272)..(272): n is a, c, g, or t
  misc_feature (299)..(299): n is a, c, g, or t
  misc_feature (387)..(387): n is a, c, g, or t
  misc_feature (448)..(448): n is a, c, g, or t
  misc_feature (479)..(480): n is a, c, g, or t
  misc_feature (564)..(564): n is a, c, g, or t
  misc_feature (594)..(594): n is a, c, g, or t
  misc_feature (610)..(610): n is a, c, g, or t
  misc_feature (668)..(668): n is a, c, g, or t
  misc_feature (681)..(681): n is a, c, g, or t
  misc_feature (739)..(739): n is a, c, g, or t
  misc_feature (801)..(801): n is a, c, g, or t
  misc_feature (826)..(826): n is a, c, g, or t
  misc_feature (833)..(833): n is a, c, g, or t
  misc_feature (867)..(867): n is a, c, g, or t
  misc_feature (888)..(888): n is a, c, g, or t
  misc_feature (892)..(892): n is a, c, g, or t
  misc_feature (908)..(908): n is a, c, g, or t
  misc_feature (911)..(911): n is a, c, g, or t
  misc_feature (927)..(927): n is a, c, g, or t
  misc_feature (941)..(941): n is a, c, g, or t
  misc_feature (946)..(947): n is a, c, g, or t
  misc_feature (949)..(949): n is a, c, g, or t
  misc_feature (955)..(955): n is a, c, g, or t
  misc_feature (964)..(964): n is a, c, g, or t
  misc_feature (975)..(975): n is a, c, g, or t
  misc_feature (981)..(981): n is a, c, g, or t
  misc_feature (988)..(989): n is a, c, g, or t
  misc_feature (999)..(999): n is a, c, g, or t
  misc_feature (1001)..(1001): n is a, c, g, or t
  misc_feature (1004)..(1004): n is a, c, g, or t
  misc_feature (1075)..(1075): n is a, c, g, or t
acctatggagaggtcaatctcaggccaagtacatganaggagggagcactggctcaccctgtcctagtcctgagggcccccaggtttatgctgacactcactcattgggcatgacctgggggtgacgccaccacaacgtcctttctgtgaaagaggcnccatgattcgaggacccattcctgctgggaaaaagctcagccaccactcataaagagngttgtcctgtctggaggctcacttttncctcaccnttttcatgaaggaaacctccnctccacctccggatgccgtagtctcgnagcttctttctcgtcttctcgtgcagctcctctctctctgcagaggtcaccacccgtacgctcctccacacgctacgaccacgctgantgttcttaatgccccccctcacgctcctcctctcacctgcacgctatctctggatcccctncttcaggtccaggactgtggcactctgcacnncaaccacgggcattacttctccatccatcttgcacactcggaccgtcattgcctggccgtattctagggctatttgggagtggncttcttccagagtaacctggatcggcagancgcagagcagcgggtnctgcaccaccatagccagaccctcctggaacacgtccatggcctcggagtgcggcacncctctacttcgtnctcatcttcctcttgcgcctcgggcccacccgcggcctccgtctcctccagggccgcncctctcagccgggctctgccgcactgccagcccgcactagggaggccaagcgcgcacgcagngaactggggcccgccccagcgaggncgcccanccactggcgcgccgggggggatggggcggctgcngtcaccaatgacaagtgcganacancctgcagcagggccgngancgcagaatcgccctgnctattggttggttngtgtnncnggaagntgccaggancaatgtgagcncgaggngggcggnnatcggccctnancgncagttggagctgcgggagtgggagctgcggactcgagacatgcggtgtgctgcccggctgcggaacggctnatcgtga

SEQ ID NO: 497834 - DNA, 420 bp, Homo sapiens
  misc_feature (10)..(10): n is a, c, g, or t
  misc_feature (30)..(30): n is a, c, g, or t
  misc_feature (44)..(44): n is a, c, g, or t
  misc_feature (406)..(406): n is a, c, g, or t
aaccccaaanatcctagaaaatccacatgnaaatggaatttatnctgtgacctttttcaaaatagccttcattatttttataaaagggatgtatgcctcaatgaatgaaaagaaagtcagttaataaaagtataaacaagctgggcatagtggctcacacctctaatcccagcactttgggaagccaaggcaggcagatcacctgaggtcacgagttcgagaccagcctggccaacatgacaaaactccgtttctacaaaaatacaaaaattagccaggcatgatggcacatgcctgtggtcctacctgctctggaggctgaggcaagagaatcgcctgaacccaggaggcagagtttgtagtgaggtgatgtaacgccactgcgctccagccttggcaatagagncgagacaacgtctc

SEQ ID NO: 497835 - DNA, 473 bp, Homo sapiens
  misc_feature (101)..(101): n is a, c, g, or t
  misc_feature (204)..(204): n is a, c, g, or t
  misc_feature (206)..(206): n is a, c, g, or t
  misc_feature (341)..(341): n is a, c, g, or t
  misc_feature (343)..(343): n is a, c, g, or t
  misc_feature (345)..(345): n is a, c, g, or t
  misc_feature (370)..(370): n is a, c, g, or t
  misc_feature (411)..(411): n is a, c, g, or t
  misc_feature (430)..(430): n is a, c, g, or t
ccacgctctgactccaggtgcggatggaggagacgcgtcaggcctcccgagcgtagatggaaggagcagatatgacataaatcccttgagggtctacattnttcagggcgattccaatctacggacgagcttcggaccatccccggaaccctcctgcgtccttaggttgttgagtgcatccgggagtgcgtggactgacggctncngggtcccagccagcaagcgagacccagcatcctgggagtggccacggcggcgcacgtggaccagcaagagcgcagcgccgccacgccgcggccacgagcagtcccagaccggaggcaaaaggtagcgctgagggntncngccttgagcccgcgggccgcgggcnaaggcgttgcgccgtcggggtgcactgggaactcacaccgngctcccatgtagccgggtncaagcgcagacgaggccggagaagtgggcgtagcagcggtcgc

SEQ ID NO: 497836 - DNA, 236 bp, Homo sapiens
  misc_feature (226)..(226): n is a, c, g, or t
ggtcatgtttgacagcttctctgcttttctgacggatggcttcctgttgttcacaattttcttactgtaaggctttcagaggtggtgaggctttagattgctgtttatagacaagttttcaaggtctattttcccctcattctaggctgggggtgtcatagaaagtttaccaatttactagagagtgacactttgagtacactagaccacttagtgctcttcactntctttgtcca

SEQ ID NO: 497837 - DNA, 273 bp, Homo sapiens
gtcggaatgaaaagatatgcagtggagagaggtgtatacttcaaagaaatggcagaagtgatgatgcgatctcagcatagaaggtggtcgtttcccctaacaaaaatgggttggagttgccacaccagccaagaaagcatggtatcactccaggcaaaaaggcagcagcaacacctgccaagaagacagttacaccagccaaagcagttaccacacctggcaagaagggagccacaccaggcaaagcattggtagcaactcctggtaagaagg

SEQ ID NO: 497838 - DNA, 169 bp, Homo sapiens
tatctaaacatgaatctgaatgagcctgaaccaaaacatattctccgaagagattaaataaaagtgttcttctatcacttatgtgtctattttagaaccttccaaattctaaagttttcaaaaatactggcatgttctttaaaagtatggccagttccttaattcctgg

SEQ ID NO: 497839 - DNA, 309 bp, Homo sapiens
  misc_feature (38)..(40): n is a, c, g, or t
  misc_feature (156)..(156): n is a, c, g, or t
ggtggggtgggggtctgtggtggtggggaggagggtcnnncccttaggagaagcagaacactcttacacggggaggcagagatggcacagcaagaggcatgcccccagaatgccaccaatgggcagggggggcccacccatggaaccattttatcnggataacctgggaggatggggtggaatctgaggggtgagccttcttccccaggctggaagtgggcgacacgagactggcacctctacatctgattgtcccccaaacccatcatttatgtgggggggggagaaagaaatcatgttacttcttcc

SEQ ID NO: 497840 - DNA, 372 bp, Homo sapiens
aaaaaaaaaaaaaaaaaaaaaaaaaaaaaaaaaaaaaaaaaacgtgtgtgggcgggcgcgcgcgcgcgggccccgcgagaaaaagcttttaaaacacaacctgcgggggggcggcgcgggggccccaaagagaggagaaagagagagaaaagggggaaaagaggggtttctcttgagggaaaccggggggcaaagaaaaaggagggggggttttctcaccaataaaaaaagcgcgggggggacaacagagggaggtgttttgagaaacaaaccccagagagggggttcgtgggggtctctatgggggggttttttaaaggggggccccaagggggccccgagaaaaaaaattaacccccggtgggggggggt

SEQ ID NO: 497841 - DNA, 465 bp, Homo sapiens
  misc_feature (420)..(420): n is a, c, g, or t
tatagagaaaataattaatagagaaacaatgaatgatactcttcaactcagcctcctgcagggaggacagacagctcttgcccaagaaagcataagtggaatcataaaaagtaataaaggttcttttggacctgtaaaaaaaaaaaaaaaaaaaaaaaaaaaaaaaaaaaaaaaaaaaaaactcgtcggcggcactactatgttgcgggtgggggcaaacaagagggtatcatagaacgctgctgcacgttgtgctccatctcggggttcttctcctctaacccccatcttctttgtggacaccaaggggtgtaaataatctgcgcggcggcccccaataaaggagggggcggcgatataaaatagtagtaaacacacggtgtacccctgctttaatataatcgatagcgagaaaaaaangcgcaatcacacccgcccacggcaggagaaatgtagaccacgact

SEQ ID NO: 497842 - DNA, 364 bp, Homo sapiens
ggcacggattgagagtgacacggtattttcaagatggataaacatatgaatcttaaattaccatattcttttattttttattttttgtgagacagaggttttcctcttgctgcccaggctggagtgcaacagcatcatctccactcactgcaacctccgcctcccaagttcaagcaattctcctgcctcagcctcctgaatagctgggactacaggcgtgtgccaccatgcccagctaatttttgtatattttttagtcgagatggggtttcaccatgttggccaggatggtcttgatcccctgacctcatgatccgcccacctcggcctcccaaagtgctgggattacaggcgtgagccacca

SEQ ID NO: 497843 - DNA, 238 bp, Homo sapiens
tgggacagggtggaactgggtttcctgggctttgtggctggaggtgtctctattgcggtccctggcttcccactagagctgcgggctaatggctgctgcgcctgaggtggatggctggggcacgtgaagcgaggttccctagctaagctgctgcgctttcccccatggtgatccagcagaggctggcatgaccaatcaacaacatcagcctgatgaaaaggcggctccaaggaagtac

SEQ ID NO: 497844 - DNA, 283 bp, Homo sapiens
cagcccccccgggggtccttcttttttgttcccccaggttatggggaggggggggtccaggtcacctttccaagggggttgtttttgtggccccccccctcctccccccccaggggggttttggttgttttagccccatgggggccccccccccttgtccctcctcagccaccaagggcccagggcaagggacagggggacaggggttttcctttcccccaaaaccccacccccgggtttcccccctggggccggggtttttaaaaaaaaattttttttgtta

SEQ ID NO: 497845 - DNA, 376 bp, Homo sapiens
tcgctgcatgtctgtaaacatcagaaattaaagaagcatatccatcaaatatgtacatcgcatgacatattacgcattatacacttgacaaccaaaccacataaaaagaggacacgaaccccatcctacatgataggaatcaggtgttcaccggtcccgtatctggcgactgtacactggatcaaagggcagccgaggcaacaggcaattacttcagaggacactgaccagtatgatctggaagcactgtatgatgtaacccaatgtcatgtaccacactccttactccaaggtggtctcatattactagaatggccggtccagctgttacacaatgcagacagacaacataacatttactctgtgtcgatcgtgg

SEQ ID NO: 497846 - DNA, 241 bp, Homo sapiens
acgagggtaggttccaccacagagcaccccgtgtgggtggaaacagtggcatcatagacctaactactctttgaagactggggagtaaattcttcggtctatagtgactatagcagaggtcactgtggtcaagactctcatcaagtgaatgcagacaaaattagtctatcccgtgtgagttacaggataaataatccgcgagggtgtgtgtgtgtgtgtagtgtgtgtgtagtgtgtgtgt

SEQ ID NO: 497847 - DNA, 221 bp, Homo sapiens
acactttcgtccgtgatcaccatccggagaggtcaactgtcatacatcatctttactatctgtaggcgccacaccctgtagatgtcttccacatcggcagggaccatatatgcccaaagcgtattcatattcactcctggcaggctggccttatccttttcgtaagacttgatgtgattataccaacgtagggcatgacacaagtcgtcttgcgggggctg

SEQ ID NO: 497848 - DNA, 1279 bp, Homo sapiens
tctcagtcgcacagagtgcttggctcttattccacaaagggggggagggggcgcttttgtctcctcttatcacttccctggtcccactctttctcgcttctggtgatattgtatcgcaaccaccgccgtgttccctgtttgtgtaacaagtggtccccttcttagagcccgcaaattgtgtggtgtctgccccgcctcgccgttgtttggcaccgcgcacgggttgttatataaaaaggggaatacgaggggtatctcatcagataggtttctcttcttggcgcctcatatctatggacggacgtgtggagtatgaccacccctctggggggtttgtataatatctcttgggggccgaagccacataaccttgtggggcacacttcccgcctgctggggtgccccacgacttatgtttctgcgcagcctctgtctgtagatgattaatgggttcacgtgtactctgctctttccccagtgtatgaccctcacgcggcgctctttttccaccgactctctcgttgattagaagggtttctcttttggtaactcctgtgttttttttggcggggaccatttcgggggaagcttcatgggccttcttaaaccacatcctccctctccccgcttatggttaggccctgttaatccccagccccccccggttgttgtcagtcgttgtcacccaggggcgcattttgcccacttttaaggcgcgccccccctgggggcgtcgggtcccagacaccactgggcgtgctgtcgcactttatctcgtgagatagggggcgcttatatagcgacatgtggtggcttcgcccccctctccccccgccgcgttgtttaacatgagaacctgtgcaataaatagtacctttgtagtccctcggccaggactgttgagtactcgagcccctatgctcgtgcccctgcccagccctccagaattgtctcggagccttttgtggagaagaaacatttgtgtggcggcgctaggagccaccaccactggcgactcacctggtttttcgtgtccccgtggcgcccgcggttttgggcacgtcaagcggctgccaggcgcccaccctgaatttccacctttgggctcagccaacgacgggtaatttatatgggcgcccttgccggcgactgtggcccaccatgccgcgtcatcattcctcgtttttttattttttttgtaactcccccttgtccctatccctgtggtttcccccccccttcccatgtgtttgaaaaaaaaaaggtggggaaaccccca

SEQ ID NO: 497849 - DNA, 198 bp, Homo sapiens
gggcagcgtgctatgatgctagctactcaggaggctggggcaggaggatcagttgaacctgggaggtcaaggttacagtgagccatgattgtgccactatactccagcctgggcaacagagtgagaccctgtctgaaaaaaaaaaaattaaccggtgtacggcccgatgcaaataaaaacttagattaccgattcctg

SEQ ID NO: 497850 - DNA, 546 bp, Homo sapiens
  misc_feature (111)..(111): n is a, c, g, or t
  misc_feature (114)..(114): n is a, c, g, or t
  misc_feature (116)..(116): n is a, c, g, or t
  misc_feature (118)..(118): n is a, c, g, or t
  misc_feature (124)..(124): n is a, c, g, or t
  misc_feature (127)..(127): n is a, c, g, or t
  misc_feature (377)..(377): n is a, c, g, or t
  misc_feature (471)..(471): n is a, c, g, or t
  misc_feature (474)..(474): n is a, c, g, or t
aatttcactttccttctcaggtctcacctcagccccccccttctccctgatttctcggcctctctctctgtgtgaaggggcctctccctaatgtctcctccttcccccctnttntntntcctgnggnccagcctccctctccctcctccattcctctctccctgcccttttcctgcctgaagagcagaggtgaggacctgggaccccttaggggcaggccaggaggagctcgggcgcaggccaggcccccttggtgaaacagaggctgaaggaaaggggtttgggtcttgtccctaggaattctcctccctcaggaaattgggggttgggggaggcaacgggtgatggcttttaaactgaagctgaacccagggctntgaagctgaacccagggcctggctgtggtttttttggtcttgctgccccctgtgacccaaaggcatgggatggacaaaaatgcctgcccccgtnaanctggttggggagggcagttccccagcatccataaagtaataaagtccctgtgtgtagacccggaaaaaaaaa

SEQ ID NO: 497851 - DNA, 234 bp, Homo sapiens
ttagtattatcctataaacttaccataaggatcccaaatgctcgccaagaatcagataacatacacacaaaaatatattcctgcagcactgttaagtagtaagaacaaaagagaaaccaactcaagaatccatcaagagaggaccagttaaacttgtggtacaatccacagacctagagattctactgcacgctactcaaaaagcaatgagatatctgtacatgctgactatga

SEQ ID NO: 497852 - DNA, 520 bp, Homo sapiens
  misc_feature (111)..(111): n is a, c, g, or t
  misc_feature (114)..(114): n is a, c, g, or t
  misc_feature (116)..(116): n is a, c, g, or t
  misc_feature (118)..(118): n is a, c, g, or t
  misc_feature (124)..(124): n is a, c, g, or t
  misc_feature (127)..(127): n is a, c, g, or t
  misc_feature (445)..(445): n is a, c, g, or t
  misc_feature (448)..(448): n is a, c, g, or t
aatttcactttccttctcaggtctcacctcagccccccccttctccctgatttctcggcctctctctctgtgtgaaggggcctctccctaatgtctcctccttcccccctnttntntntcctgnggnccagcctccctctccctcctccattcctctctccctgcccttttcctgcctgaagagcagaggtgaggacctgggaccccttaggggcaggccaggaggagctcgggcgcaggccaggcccccttggtgaaacagaggctgaaggaaaggggtttgggtcttgtccctaggaattctcctccctcaggaaattgggggttgggggaggcaacgggtgatggcttttaaactgaacccagggcctggctgtggtttttttggtcttgctgccccctgtgacccaaaggcatgggatggacaaaaatgcctgcccccgtnaanctggttggggagggcagttccccagcatccataaagtaataaagtccctgtgtgtagacccggaaaaaaaaa

SEQ ID NO: 497853 - DNA, 1343 bp, Homo sapiens
  misc_feature (252)..(252): n is a, c, g, or t
  misc_feature (718)..(718): n is a, c, g, or t
gcctcgctcgtccgtggctcctcgtaggagtgccattgcttcaaaatgatgcttatcatctccttcaccgagccgactgtgtaggaccacagagactcagatacggagagtggaactggattgaagatcgcaacattatcgccatctttctatatataccaatgctgttatggcacactatcatcgcttgcatagcttgacatctgctgggttagcaagacatcgtggatcaggggttcatgtgcgtccatnacatccaagtgtatcggcgaatgttacaataacaacgggctactcccccctagtgagtattggcatgaggttgttcctatggaacccatctaggttaccgttgagagtcactgcgcctgacataccgtagagcgtaaacgcgtgggcagtttcccgtcgtctaacgacaacccgaggggaaagacctcgtggggcgcattcctgagactcgacggagcagagatccatgatggcgccgtgtttgtagtgcatacggtaggggaaatggtcgagaaaatccttgtgagtttcgttcgctcttccacacgcattagcgatggtaattgacgctttgagaacaccacacaaagggctagccagggacacggaggtactgacaattagctcgtcgtaggacgcctagagaagcatggggactcaatctttgatcacgagtgagccctgcttcgaaaagcgtttccctgtntgggttggccctcccgagaacagttagttccgttaggcgaggaacatagctccggagcacacgcccagtttttaatacgataacgctctgttgcctttccttggatatacgccaaggcgcacttgtgagatgtcgtctcaggtccccaggcacgtaattgactttggggttccatgcacaaaggtggcctgcgttgttacattatttcaacacgtgaaacgcgttgagaggatatgaaatcgccatgagcagaggacccgatattagtgcaacccaccaggaggaaggtttacctgggagcggaattgcttgtgatttcaagcagtcccgaaacagtttcgttccaacgttggcggagagtgtattctaagaatgggggccagaggtccggtaatttctgcaatcctttgaaaaagaaactgtcggaaggtaggttaggccaaaagggaacacagagagtgacgagttgaaagcaaagggtctttgcgaggaaactcaattgccttaacaaacttttgttgtgggggccctagagaggaaaattgtaacgcggaaggggcctaacaaatcggacgaaaaggggtgtcgcaggggaatgcgacgtattgtgggacggagattgatg

SEQ ID NO: 497854 - DNA, 736 bp, Homo sapiens
gcagtctcacaatcttctttcatttttttctgtctctgtcccttttaggcccacgtggaagtgtttctgatggtagaacattctcaaaaatctgtgggtcttctacgtatgtcacatgattcacacattcagaaaagagggtcctcacagatttttcctgaacaacccatctctattctggcttctgtgaaacagtcaaataaatccacaaggttaatgccgtaacctcttcagcactagccaaaggttgtcaagacacaccctgggcttatctacagagcacacttttctaacagtgaatctcctaattttagcatctcttttttttagtttaacaatcattcagatggggaattcaggctcaagaattatacccagtcatcagatacggattcctttggtccacttatatagttcatgtactctttaaaacaaacattttttgtgaaggtatcagagatgaggtctcactctgtcacccaggctgacagagtagtggtgcacacaatagctcacttgtaaccatcaaactccacaggacctcaagggataactccggcatcagccattccaagtagctgggtctacaggtgcaatgaacaacaagccgggcataattaaaaggcataaactagaagagactagactatgcaaagacgtccaggaatgatctccaactcatagacacaagcaatcacaaccataaggcactcactaaagtgcggataccggtgca

SEQ ID NO: 497855 - DNA, 5215 bp, Homo sapiens
atggggtgccagcttcacttctttgataaccacctctgagaccccgtcacacagtactcccagcttcacttcttcaatcagcaccactgagaccacatcccacagtactcccagcttcacttcttcgatcaccaccactgagaccacctcacacagtactcccagcttcacttcttcgatcaccaccaccgagaccacctcacacagtactcccagcttcacttcttcgatcaccaccaccgagaccacctcacacagtactcccagcttcacttcttcgatcaccaccaccgagaccacatcccacagtactcccagcttcacttcttcgatcaccaccaccgagaccccctcaagcagtactcccagcttcacttcttcgatcaccaccaccgactcgatcgtcaccaccgagaccacatcccacagtactcccagcttcacttcttcaatcagcaccactgagaccacatcccacagtactcccagcttcacttcttcgatcaccatcactgagaccacctcacacagtactcccagctacactacctcaatcaccaccaccgagaccccctcaagcagtactcccagcttcacttcttcgatcaccaccaccgagaccacatcccacagtactcccagcttcacttcttcaatcagcaccactgagaccacatcccacagtactcccagcttcacttcttcgatcaccaccactgagaccacctcacacggtactcccagcttcacttcttcaatcaccaccactgagaccccctcacacagtactcccagcttcacttctttgatcaccaccaccgagaccacctcacacagtactcccagcttcacttcttcgatcaccaccaccgagaccacctcacacagtactcccagcttcacttctttgatcaccaccactgagaccccgtcacacagtactcccagcttcacttcttcgatcaccaccaccgagaccacctcacacagtactaccagcttcacttcttcgatcaccaccaccgagaccacctcacacagtactcccagcttcagttcttcaatcaccaccactgagacccccttacacagtactcctggcctaccttcgtgggtcaccaccaccaagaccacctcacacattactcctggcctcacttcttcaatcaccaccactgagactacctcacacagtactcccggcttcacttcttcaatcaccaccactggaccacctcacacagtactcccagcctcagttcttcaaccatctactccacagtcagcacatccacaactgccatcacctcacattttactacctcagagactgcggtgactcccacacctgtaaccccatcttctctgagtacagacatcccgaccacatccctaagaactctcaccccattatctttgaacaccagcacttcattgactacaaccacagactttccctctatacccactgatatcagtaccttaccaactcgaacacacatcatttcatcttctccctccatccaaagtacagaaacctcatcccttgtgggcaccacctctcccaccatgtccactgtgagaatgaccctcagaattactgagaacaccccaatcagttcctttagcacaagtattgttgttatacctgaaacccaacaacacagacccctcctgtactgacgtcagccactgggacccaaacatctcctgcacctactactgtcacctttggaagtacggattcctccacgtccactcttcatactcttactccatcaacagccttgagcacgatcgtgtcaacatcacaggttcctattcctagcacacattcctccacccttcaaacaactccttctactccctcattgcaaacttcactcacatctacaagtgagttcactacagaatctttcactaggggaagtacgtctacaaatgcaatcttgacttcttttagtaccatcatctggtcctcaacacccactattatcatgtcctcttctccatcttctgccagcataactccagtgttctccactaccattcattctgttccttcttcaccatacattttcagtacagaaaatgtgggctccgcttctatcacaggctttcctagtctctcttcctctgcaactaccagcacttcttcaaccagctcctctctgaccacagctctcactgaaataacccccttttcttatatttcccttccctccaccacaccctgtccaggaactataacaattaccatagtccctgcctctcccactgatccatgtgttgaaatggatcccagcactgaagctacttctcctcccaccaccccattaacagtctttccctttactaccgaaatggtcacctgtcctacctccatcagtatccaaactactcttactacatatatggacacttcttccatgatgccagaaagtgagtccagcatctcacccaatgcttccagttccactggcactgggactgtacccacaaacacagttttcacaagtactcgactgcccaccagtgagacctggctgagcaacagttctgtgatccccctacctcttcctggcgtctctaccatcccgctcaccatgaaaccaagcagtagcctcccgaccatcctgaggacttcaagcaagtcaacacacccatccccacccaccactaggacttcagagacaccagtggccactacccagactcctaccacccttacatcacgcaggacaactcgcatcacttctcagatgaccacacagtccacgttgaccaccactgcaggcacctgtgacaatggtggcacctgggaacagggccagtgtgcttgccttccggggttttctggggaccgctgtcagctccagaccagatgccagaatgggggtcagtgggatggcctcaaatgccagtgccccagcaccttctatggttccagttgtgagtttgctgtggaacaggtggatctagatgtagtggagaccgaggtgggcatggaagtgtctgtggatcagcagttctcgccggacctcaatgacaacacttcccaggcctacagggatttcaacaagaccttctggaatcagatgcagaagatttttgcagacatgcagggcttcaccttcaagggtgtggagatcctgtccctgaggaatggcagcatcgtggtggactacctggtcctgctggagatgcccttcagcccccagctggagagcgagtatgagcaggtgaagaccacgctgaaggaggggctgcagaacgccagccaggatgtgaacagctgccaggactcccagaccctgtgttttaagcctgactccatcaaggtgaacaacaacagcaagacagagctgaccccggcagccatctgccgccgcgccgctcccacgggctatgaagagttctacttccccttggtggaggccacccggctccgctgtgtcaccaaatgcacgtcgggggtggacaacgccatcgactgtcaccagggccagtgcgttctggagacgagcggtcccacgtgtcgctgctactccaccgacacgcactggttctctggcccgcgctgcgaggtggccgtccactggagggcgctggtcgggggcctgacggccggcgccgcgctgctggtgctgctgctgctggcgctgggcgtccgggcggtgcgctccggatggtggggcggccagcgccgaggccggtcctgggaccaggacaggaaatggttcgagacctgggatgaggaagtcgtgggcactttttcaaactggggtttcgaggacgacggaacagacaaggatacaaatttctatgtggccttggagaacgtggacaccactatgaaggtgcacatcaagagacccgagatgacctcgtcctcagtgtgagccctgcggggccccttcaccaccccctccgccctgccccggacacaagggtctgcattgcgtccatttcaagaggtggccccaggacgcgggcagcccaggctcctgctgttcttgggcaagatgagactgttcccccaaatcccatccttctccttccaacttggctgaaacccacctggagacgcagttcacgtccaggctcttccactgtggaatcttgggcaagtcagtaacgagcctcagtttcctcacctgcaaaacgggtacagcattcctgtatgatagctcacgccgttgttgtgaaaaccacatagacttggtcaattctcggtcctactctgccctcccgtctcagccctcgtgttgccattgcctctctcggatcctccaatcctcacgtccttcacctggtctctggccctggttcttattttctctcaattccctactgcctgtttcttactttgaacctggaggcagcctgcagccccatcccatctcctgccctctcctgatctaactccctgctgcatctcttgctctcattccttagacgtcctccccttttgaccccgttccttcatccatcctgcaccccagtcccccagccctaaatcctccctcctctcctcacatcctggtccctagcaaggtatagatagcctctgtgtcttaggataccccgggtgctgttccctcggtcaccctgttgcccagttccccgtttctcttgctctcattccttgtatcctttccccttttgagcccgtccattcatcggttctgcccccgactcccccagccctaaataccccagctgctgttccccccatcaccctgctgcccaattccccgtttctcttgctctcattccttgtatcttctccccttctgagcctgtccattcatcggtggttctgcccctactcccccagccctaaataccccagctgctgttcctccccatcaccccgctactggattctccatttttattctccacccctttctctcacccctggagccctgcgggtgggggcagggcatgagttccccagtccccaaggaaaggcagccccctcagtctccctcctcctcattcccttccatctccctcccctctgccttttaaacccatcccctccgattcccctcctcccccctctctccctggtgtcaactcgattcctgcggtaactctgagccctgaaatcctcagtctccttggcggggaagattggctttggggacaggaagtcggcacatctccaggtctccatgtgcacaatatagagtttattgtaaaaagc

SEQ ID NO: 497856 - DNA, 4842 bp, Homo sapiens
  misc_feature (423)..(423): n is a, c, g, or t
  misc_feature (460)..(460): n is a, c, g, or t
  misc_feature (462)..(462): n is a, c, g, or t
  misc_feature (466)..(466): n is a, c, g, or t
  misc_feature (468)..(468): n is a, c, g, or t
  misc_feature (473)..(474): n is a, c, g, or t
  misc_feature (477)..(478): n is a, c, g, or t
atggggtgccagcttcacttctttgataaccacctctgagaccccgtcacacagtactcccagcttcacttcttcaatcagcaccactgagaccacatcccacagtactcccagcttcacttcttcgatcaccaccactgagaccacctcacacagtactcccagcttcacttcttcgatcaccaccaccgagaccacctcacacagtactcccagcttcacttcttcgatcaccaccaccgagaccacctcacacagtactcccagcttcacttcttcgatcaccaccaccgagaccacatcccacagtactcccagcttcacttcttcgatcaggaccactgagaccacctctcatagtactcccagcttcacttcttcgatcatcgccaccgaaaccacctcacacagtactcccagctncacttctttgatccactgccaccgagaccgcctcacncngtantnccacnncannctcgatcgtcaccaccgagaccacatcccacagtactcccagcttcacttcttcaatcagcaccactgagaccacatcccacagtactcccagcttcacttcttcgatcaccatcactgagaccacctcacacagtactcccagccagcttcacttcttcgatcaccaccaccgagaccacctcacacagtactcccagcttcagttcttcaatcaccaccactgagacccccttacacagtactcctggcctaccttcgtgggtcaccaccaccaagaccacctcacacattactcctggcctcacttcttcaatcaccaccactgagactacctcacacagtactcccggcttcacttcttcaatcaccaccactggaccacctcacacagtactcccagcctcagttcttcaaccatctactccacagtcagcacatccacaactgccatcacctcacattttactacctcagagactgcggtgactcccacacctgtaaccccatcttctctgagtacagacatcccgaccacatccctaagaactctcaccccattatctttgaacaccagcacttcattgactacaaccacagactttccctctatacccactgatatcagtaccttaccaactcgaacacacatcatttcatcttctccctccatccaaagtacagaaacctcatcccttgtgggcaccacctctcccaccatgtccactgtgagaatgaccctcagaattactgagaacaccccaatcagttcctttagcacaagtattgttgttatacctgaaacccaacaacacagacccctcctgtactgacgtcagccactgggacccaaacatctcctgcacctactactgtcacctttggaagtacggattcctccacgtccactcttcatactcttactccatcaacagccttgagcacgatcgtgtcaacatcacaggttcctattcctagcacacattcctccacccttcaaacaactccttctactccctcattgcaaacttcactcacatctacaagtgagttcactacagaatctttcactaggggaagtacgtctacaaatgcaatcttgacttcttttagtaccatcatctggtcctcaacacccactattatcatgtcctcttctccatcttctgccagcataactccagtgttctccactaccattcattctgttccttcttcaccatacattttcagtacagaaaatgtgggctccgcttctatcacaggctttcctagtctctcttcctctgcaactaccagcacttcttcaaccagctcctctctgaccacagctctcactgaaataacccccttttcttatatttcccttccctccaccacaccctgtccaggaactataacaattaccatagtccctgcctctcccactgatccatgtgttgaaatggatcccagcactgaagctacttctcctcccaccaccccattaacagtctttccctttactaccgaaatggtcacctgtcctacctccatcagtatccaaactactcttactacatatatggacacttcttccatgatgccagaaagtgagtccagcatctcacccaatgcttccagttccactggcactgggactgtacccacaaacacagttttcacaagtactcgactgcccaccagtgagacctggctgagcaacagttctgtgatccccctacctcttcctggcgtctctaccatcccgctcaccatgaaaccaagcagtagcctcccgaccatcctgaggacttcaagcaagtcaacacacccatccccacccaccactaggacttcagagacaccagtggccactacccagactcctaccacccttacatcacgcaggacaactcgcatcacttctcagatgaccacacagtccacgttgaccaccactgcaggcacctgtgacaatggtggcacctgggaacagggccagtgtgcttgccttccggggttttctggggaccgctgtcagctccagaccagatgccagaatgggggtcagtgggatggcctcaaatgccagtgccccagcaccttctatggttccagttgtgagtttgctgtggaacaggtggatctagatgtagtggagaccgaggtgggcatggaagtgtctgtggatcagcagttctcgccggacctcaatgacaacacttcccaggcctacagggatttcaacaagaccttctggaatcagatgcagaagatttttgcagacatgcagggcttcaccttcaagggtgtggagatcctgtccctgaggaatggcagcatcgtggtggactacctggtcctgctggagatgcccttcagcccccagctggagagcgagtatgagcaggtgaagaccacgctgaaggaggggctgcagaacgccagccaggatgtgaacagctgccaggactcccagaccctgtgttttaagcctgactccatcaaggtgaacaacaacagcaagacagagctgaccccggcagccatctgccgccgcgccgctcccacgggctatgaagagttctacttccccttggtggaggccacccggctccgctgtgtcaccaaatgcacgtcgggggtggacaacgccatcgactgtcaccagggccagtgcgttctggagacgagcggtcccacgtgtcgctgctactccaccgacacgcactggttctctggcccgcgctgcgaggtggccgtccactggagggcgctggtcgggggcctgacggccggcgccgcgctgctggtgctgctgctgctggcgctgggcgtccgggcggtgcgctccggatggtggggcggccagcgccgaggccggtcctgggaccaggacaggaaatggttcgagacctgggatgaggaagtcgtgggcactttttcaaactggggtttcgaggacgacggaacagacaaggatacaaatttctatgtggccttggagaacgtggacaccactatgaaggtgcacatcaagagacccgagatgacctcgtcctcagtgtgagccctgcggggccccttcaccaccccctccgccctgccccggacacaagggtctgcattgcgtccatttcaagaggtggccccaggacgcgggcagcccaggctcctgctgttcttgggcaagatgagactgttcccccaaatcccatccttctccttccaacttggctgaaacccacctggagacgcagttcacgtccaggctcttccactgtggaatcttgggcaagtcagtaacgagcctcagtttcctcacctgcaaaacgggtacagcattcctgtatgatagctcacgccgttgttgtgaaaaccacatagacttggtcaattctcggtcctactctgccctcccgtctcagccctcgtgttgccattgcctctctcggatcctccaatcctcacgtccttcacctggtctctggccctggttcttattttctctcaattccctactgcctgtttcttactttgaacctggaggcagcctgcagccccatcccatctcctgccctctcctgatctaactccctgctgcatctcttgctctcattccttagacgtcctccccttttgaccccgttccttcatccatcctgcaccccagtcccccagccctaaatcctccctcctctcctcacatcctggtccctagcaaggtatagatagcctctgtgtcttaggataccccgggtgctgttccctcggtcaccctgttgcccagttccccgtttctcttgctctcattccttgtatcctttccccttttgagcccgtccattcatcggttctgcccccgactcccccagccctaaataccccagctgctgttccccccatcaccctgctgcccaattccccgtttctcttgctctcattccttgtatcttctccccttctgagcctgtccattcatcggtggttctgcccctactcccccagccctaaataccccagctgctgttcctccccatcaccccgctactggattctccatttttattctccacccctttctctcacccctggagccctgcgggtgggggcagggcatgagttccccagtccccaaggaaaggcagccccctcagtctccctcctcctcattcccttccatctccctcccctctgccttttaaacccatcccctccgattcccctcctcccccctctctccctggtgtcaactcgattcctgcggtaactctgagccctgaaatcctcagtctccttggcggggaagattggctttggggacaggaagtcggcacatctccaggtctccatgtgcacaatatagagtttattgtaaaaagc

SEQ ID NO: 497857 - DNA, 5101 bp, Homo sapiens
  misc_feature (409)..(409): n is a, c, g, or t
atggggtgccagcttcacttctttgataaccacctctgagaccccgtcacacagtactcccagcttcacttcttcaatcagcaccactgagaccacatcccacagtactcccagcttcacttcttcgatcaccaccactgagaccacctcacacagtactcccagcttcacttcttcgatcaccaccaccgagaccacctcacacagtactcccagcttcacttcttcgatcaccaccaccgagaccacctcacacagtactcccagcttcacttcttcgatcaccaccaccgagaccacatcccacagtactcccagcttcacttcttcgatcaggatcaccaccaccgagaccacctcacacagtactcccagcttcacttctttgatcaccacctctgagaccccntcacacagtactcccagcttcacttcttcgatcaccaccaccgagaccccctcaagcagtactcccagcttcacttcttcgatcaccaccaccgagaccacatcccacagtactcccagcttcacttcttcaatcagcaccactgagaccacatcccacagtactcccagcttcacttcttcgatcaccaccactgagaccacctcacacggtactcccagcttcacttcttcaatcaccaccactgagaccccctcacacagtactcccagcttcacttctttgatcaccaccaccgagaccacctcacacagtactcccagcttcacttcttcgatcaccaccaccgagaccacctcacacagtactcccagcttcacttctttgatcaccaccactgagaccccgtcacacagtactcccagcttcacttcttcgatcaccaccaccgagaccacctcacacagtactaccagcttcacttcttcgatcaccaccaccgagaccacctcacacagtactcccagcttcagttcttcaatcaccaccactgagacccccttacacagtactcctggcctaccttcgtgggtcaccaccaccaagaccacctcacacattactcctggcctcacttcttcaatcaccaccactgagactacctcacacagtactcccggcttcacttcttcaatcaccaccactggaccacctcacacagtactcccagcctcagttcttcaaccatctactccacagtcagcacatccacaactgccatcacctcacattttactacctcagagactgcggtgactcccacacctgtaaccccatcttctctgagtacagacatcccgaccacatccctaagaactctcaccccattatctttgaacaccagcacttcattgactacaaccacagactttccctctatacccactgatatcagtaccttaccaactcgaacacacatcatttcatcttctccctccatccaaagtacagaaacctcatcccttgtgggcaccacctctcccaccatgtccactgtgagaatgaccctcagaattactgagaacaccccaatcagttcctttagcacaagtattgttgttatacctgaaacccaacaacacagacccctcctgtactgacgtcagccactgggacccaaacatctcctgcacctactactgtcacctttggaagtacggattcctccacgtccactcttcatactcttactccatcaacagccttgagcacgatcgtgtcaacatcacaggttcctattcctagcacacattcctccacccttcaaacaactccttctactccctcattgcaaacttcactcacatctacaagtgagttcactacagaatctttcactaggggaagtacgtctacaaatgcaatcttgacttcttttagtaccatcatctggtcctcaacacccactattatcatgtcctcttctccatcttctgccagcataactccagtgttctccactaccattcattctgttccttcttcaccatacattttcagtacagaaaatgtgggctccgcttctatcacaggctttcctagtctctcttcctctgcaactaccagcacttcttcaaccagctcctctctgaccacagctctcactgaaataacccccttttcttatatttcccttccctccaccacaccctgtccaggaactataacaattaccatagtccctgcctctcccactgatccatgtgttgaaatggatcccagcactgaagctacttctcctcccaccaccccattaacagtctttccctttactaccgaaatggtcacctgtcctacctccatcagtatccaaactactcttactacatatatggacacttcttccatgatgccagaaagtgagtccagcatctcacccaatgcttccagttccactggcactgggactgtacccacaaacacagttttcacaagtactcgactgcccaccagtgagacctggctgagcaacagttctgtgatccccctacctcttcctggcgtctctaccatcccgctcaccatgaaaccaagcagtagcctcccgaccatcctgaggacttcaagcaagtcaacacacccatccccacccaccactaggacttcagagacaccagtggccactacccagactcctaccacccttacatcacgcaggacaactcgcatcacttctcagatgaccacacagtccacgttgaccaccactgcaggcacctgtgacaatggtggcacctgggaacagggccagtgtgcttgccttccggggttttctggggaccgctgtcagctccagaccagatgccagaatgggggtcagtgggatggcctcaaatgccagtgccccagcaccttctatggttccagttgtgagtttgctgtggaacaggtggatctagatgtagtggagaccgaggtgggcatggaagtgtctgtggatcagcagttctcgccggacctcaatgacaacacttcccaggcctacagggatttcaacaagaccttctggaatcagatgcagaagatttttgcagacatgcagggcttcaccttcaagggtgtggagatcctgtccctgaggaatggcagcatcgtggtggactacctggtcctgctggagatgcccttcagcccccagctggagagcgagtatgagcaggtgaagaccacgctgaaggaggggctgcagaacgccagccaggatgtgaacagctgccaggactcccagaccctgtgttttaagcctgactccatcaaggtgaacaacaacagcaagacagagctgaccccggcagccatctgccgccgcgccgctcccacgggctatgaagagttctacttccccttggtggaggccacccggctccgctgtgtcaccaaatgcacgtcgggggtggacaacgccatcgactgtcaccagggccagtgcgttctggagacgagcggtcccacgtgtcgctgctactccaccgacacgcactggttctctggcccgcgctgcgaggtggccgtccactggagggcgctggtcgggggcctgacggccggcgccgcgctgctggtgctgctgctgctggcgctgggcgtccgggcggtgcgctccggatggtggggcggccagcgccgaggccggtcctgggaccaggacaggaaatggttcgagacctgggatgaggaagtcgtgggcactttttcaaactggggtttcgaggacgacggaacagacaaggatacaaatttctatgtggccttggagaacgtggacaccactatgaaggtgcacatcaagagacccgagatgacctcgtcctcagtgtgagccctgcggggccccttcaccaccccctccgccctgccccggacacaagggtctgcattgcgtccatttcaagaggtggccccaggacgcgggcagcccaggctcctgctgttcttgggcaagatgagactgttcccccaaatcccatccttctccttccaacttggctgaaacccacctggagacgcagttcacgtccaggctcttccactgtggaatcttgggcaagtcagtaacgagcctcagtttcctcacctgcaaaacgggtacagcattcctgtatgatagctcacgccgttgttgtgaaaaccacatagacttggtcaattctcggtcctactctgccctcccgtctcagccctcgtgttgccattgcctctctcggatcctccaatcctcacgtccttcacctggtctctggccctggttcttattttctctcaattccctactgcctgtttcttactttgaacctggaggcagcctgcagccccatcccatctcctgccctctcctgatctaactccctgctgcatctcttgctctcattccttagacgtcctccccttttgaccccgttccttcatccatcctgcaccccagtcccccagccctaaatcctccctcctctcctcacatcctggtccctagcaaggtatagatagcctctgtgtcttaggataccccgggtgctgttccctcggtcaccctgttgcccagttccccgtttctcttgctctcattccttgtatcctttccccttttgagcccgtccattcatcggttctgcccccgactcccccagccctaaataccccagctgctgttccccccatcaccctgctgcccaattccccgtttctcttgctctcattccttgtatcttctccccttctgagcctgtccattcatcggtggttctgcccctactcccccagccctaaataccccagctgctgttcctccccatcaccccgctactggattctccatttttattctccacccctttctctcacccctggagccctgcgggtgggggcagggcatgagttccccagtccccaaggaaaggcagccccctcagtctccctcctcctcattcccttccatctccctcccctctgccttttaaacccatcccctccgattcccctcctcccccctctctccctggtgtcaactcgattcctgcggtaactctgagccctgaaatcctcagtctccttggcggggaagattggctttggggacaggaagtcggcacatctccaggtctccatgtgcacaatatagagtttattgtaaaaagc

SEQ ID NO: 497858 - DNA, 4871 bp, Homo sapiens
  misc_feature (423)..(423): n is a, c, g, or t
  misc_feature (460)..(460): n is a, c, g, or t
  misc_feature (462)..(462): n is a, c, g, or t
  misc_feature (466)..(466): n is a, c, g, or t
  misc_feature (468)..(468): n is a, c, g, or t
  misc_feature (473)..(474): n is a, c, g, or t
  misc_feature (477)..(478): n is a, c, g, or t
atggggtgccagcttcacttctttgataaccacctctgagaccccgtcacacagtactcccagcttcacttcttcaatcagcaccactgagaccacatcccacagtactcccagcttcacttcttcgatcaccaccactgagaccacctcacacagtactcccagcttcacttcttcgatcaccaccaccgagaccacctcacacagtactcccagcttcacttcttcgatcaccaccaccgagaccacctcacacagtactcccagcttcacttcttcgatcaccaccaccgagaccacatcccacagtactcccagcttcacttcttcgatcaggaccactgagaccacctctcatagtactcccagcttcacttcttcgatcatcgccaccgaaaccacctcacacagtactcccagctncacttctttgatccactgccaccgagaccgcctcacncngtantnccacnncanngaccacctcacacagtactcccagcttcacttcttcgatcaccaccaccgagaccacctcacacagtactcccagcttcacttctttgatcaccaccactgagaccccgtcacacagtactcccagcttcacttcttcgatcaccaccaccgagaccacctcacacagtactaccagcttcacttcttcgatcaccaccaccgagaccacctcacacagtactcccagcttcagttcttcaatcaccaccactgagacccccttacacagtactcctggcctaccttcgtgggtcaccaccaccaagaccacctcacacattactcctggcctcacttcttcaatcaccaccactgagactacctcacacagtactcccggcttcacttcttcaatcaccaccactggaccacctcacacagtactcccagcctcagttcttcaaccatctactccacagtcagcacatccacaactgccatcacctcacattttactacctcagagactgcggtgactcccacacctgtaaccccatcttctctgagtacagacatcccgaccacatccctaagaactctcaccccattatctttgaacaccagcacttcattgactacaaccacagactttccctctatacccactgatatcagtaccttaccaactcgaacacacatcatttcatcttctccctccatccaaagtacagaaacctcatcccttgtgggcaccacctctcccaccatgtccactgtgagaatgaccctcagaattactgagaacaccccaatcagttcctttagcacaagtattgttgttatacctgaaacccaacaacacagacccctcctgtactgacgtcagccactgggacccaaacatctcctgcacctactactgtcacctttggaagtacggattcctccacgtccactcttcatactcttactccatcaacagccttgagcacgatcgtgtcaacatcacaggttcctattcctagcacacattcctccacccttcaaacaactccttctactccctcattgcaaacttcactcacatctacaagtgagttcactacagaatctttcactaggggaagtacgtctacaaatgcaatcttgacttcttttagtaccatcatctggtcctcaacacccactattatcatgtcctcttctccatcttctgccagcataactccagtgttctccactaccattcattctgttccttcttcaccatacattttcagtacagaaaatgtgggctccgcttctatcacaggctttcctagtctctcttcctctgcaactaccagcacttcttcaaccagctcctctctgaccacagctctcactgaaataacccccttttcttatatttcccttccctccaccacaccctgtccaggaactataacaattaccatagtccctgcctctcccactgatccatgtgttgaaatggatcccagcactgaagctacttctcctcccaccaccccattaacagtctttccctttactaccgaaatggtcacctgtcctacctccatcagtatccaaactactcttactacatatatggacacttcttccatgatgccagaaagtgagtccagcatctcacccaatgcttccagttccactggcactgggactgtacccacaaacacagttttcacaagtactcgactgcccaccagtgagacctggctgagcaacagttctgtgatccccctacctcttcctggcgtctctaccatcccgctcaccatgaaaccaagcagtagcctcccgaccatcctgaggacttcaagcaagtcaacacacccatccccacccaccactaggacttcagagacaccagtggccactacccagactcctaccacccttacatcacgcaggacaactcgcatcacttctcagatgaccacacagtccacgttgaccaccactgcaggcacctgtgacaatggtggcacctgggaacagggccagtgtgcttgccttccggggttttctggggaccgctgtcagctccagaccagatgccagaatgggggtcagtgggatggcctcaaatgccagtgccccagcaccttctatggttccagttgtgagtttgctgtggaacaggtggatctagatgtagtggagaccgaggtgggcatggaagtgtctgtggatcagcagttctcgccggacctcaatgacaacacttcccaggcctacagggatttcaacaagaccttctggaatcagatgcagaagatttttgcagacatgcagggcttcaccttcaagggtgtggagatcctgtccctgaggaatggcagcatcgtggtggactacctggtcctgctggagatgcccttcagcccccagctggagagcgagtatgagcaggtgaagaccacgctgaaggaggggctgcagaacgccagccaggatgtgaacagctgccaggactcccagaccctgtgttttaagcctgactccatcaaggtgaacaacaacagcaagacagagctgaccccggcagccatctgccgccgcgccgctcccacgggctatgaagagttctacttccccttggtggaggccacccggctccgctgtgtcaccaaatgcacgtcgggggtggacaacgccatcgactgtcaccagggccagtgcgttctggagacgagcggtcccacgtgtcgctgctactccaccgacacgcactggttctctggcccgcgctgcgaggtggccgtccactggagggcgctggtcgggggcctgacggccggcgccgcgctgctggtgctgctgctgctggcgctgggcgtccgggcggtgcgctccggatggtggggcggccagcgccgaggccggtcctgggaccaggacaggaaatggttcgagacctgggatgaggaagtcgtgggcactttttcaaactggggtttcgaggacgacggaacagacaaggatacaaatttctatgtggccttggagaacgtggacaccactatgaaggtgcacatcaagagacccgagatgacctcgtcctcagtgtgagccctgcggggccccttcaccaccccctccgccctgccccggacacaagggtctgcattgcgtccatttcaagaggtggccccaggacgcgggcagcccaggctcctgctgttcttgggcaagatgagactgttcccccaaatcccatccttctccttccaacttggctgaaacccacctggagacgcagttcacgtccaggctcttccactgtggaatcttgggcaagtcagtaacgagcctcagtttcctcacctgcaaaacgggtacagcattcctgtatgatagctcacgccgttgttgtgaaaaccacatagacttggtcaattctcggtcctactctgccctcccgtctcagccctcgtgttgccattgcctctctcggatcctccaatcctcacgtccttcacctggtctctggccctggttcttattttctctcaattccctactgcctgtttcttactttgaacctggaggcagcctgcagccccatcccatctcctgccctctcctgatctaactccctgctgcatctcttgctctcattccttagacgtcctccccttttgaccccgttccttcatccatcctgcaccccagtcccccagccctaaatcctccctcctctcctcacatcctggtccctagcaaggtatagatagcctctgtgtcttaggataccccgggtgctgttccctcggtcaccctgttgcccagttccccgtttctcttgctctcattccttgtatcctttccccttttgagcccgtccattcatcggttctgcccccgactcccccagccctaaataccccagctgctgttccccccatcaccctgctgcccaattccccgtttctcttgctctcattccttgtatcttctccccttctgagcctgtccattcatcggtggttctgcccctactcccccagccctaaataccccagctgctgttcctccccatcaccccgctactggattctccatttttattctccacccctttctctcacccctggagccctgcgggtgggggcagggcatgagttccccagtccccaaggaaaggcagccccctcagtctccctcctcctcattcccttccatctccctcccctctgccttttaaacccatcccctccgattcccctcctcccccctctctccctggtgtcaactcgattcctgcggtaactctgagccctgaaatcctcagtctccttggcggggaagattggctttggggacaggaagtcggcacatctccaggtctccatgtgcacaatatagagtttattgtaaaaagc

SEQ ID NO: 497859 - DNA, 841 bp, Homo sapiens
  misc_feature (384)..(384): n is a, c, g, or t
gcctgcagctccccacccagctctgagttcatggatgttaattgagagccctgggtcctgccacagaaaaaaaaaaaaaaaaaccccctgggttttttctcggttggggtcaaccgcggttttgctttggcgcgttggtcgttgccctggttccctgtgactcgagcgttctatggttcgcaggggtgcggtggtacttctgtgcgtgccgtcctctatgaggtgcagtcttgccgtggaattgcagctgggtcgcgggtcttcacccctgtctttgatggggacgtcgcgcagacctgtgtttgccctttccagccagtgacccctccctttctagttcttatatttagtggtcggtgccctttcccttcttcctcagcccangaggttgttctggcgatgggtggtggatgggggtttcaccgtgaacacagaggtgttttttcttattgagggcctgttataacgtcctgatgtaccggctctcacgctacgttgaccaaacccaactcagatgatgaggacgatggggatgagaaagaagatgacgaggaggataaagatgacggtcccttgggccctcaacgtggggggcagcctccgagaccctgtagccaagaagacaggctggggcccagctctgagagtccacgaacaagtgtgcccggttcctcctgggacaattgcctttggcaccatctcggttggccccaagtgcgaacaacgccaggcaggttgtccaccctgcaaacgtgacctccatgggccagcgacgcacaccccctgaaaaagtcatgccagcgaattgtatcgtgggaccacataaaacgtacattacgga

SEQ ID NO: 497860 - DNA, 5155 bp, Homo sapiens
atggggtgccagcttcacttctttgataaccacctctgagaccccgtcacacagtactcccagcttcacttcttcaatcagcaccactgagaccacatcccacagtactcccagcttcacttcttcgatcaccaccactgagaccacctcacacagtactcccagcttcacttcttcgatcaccaccaccgagaccacctcacacagtactcccagcttcacttcttcgatcaccaccaccgagaccacctcacacagtactcccagcttcacttctccaccaccgagaccacctcacacagtactcccagcttcacttcttcaatcaccaccactgagaccacctcacatggagacaacctcacggagttctcccagcttcacttctttgatcaccatcactgggtccacatcccacagtactcccagcttcacttcttcgatcaccatcactgagaccacctcacacagtactcccagctacactacctcaatcaccaccaccgagaccccctcaagcagtactcccagcttcacttcttcgatcaccaccaccgagaccacatcccacagtactcccagcttcacttcttcaatcagcaccactgagaccacatcccacagtactcccagcttcacttcttcgatcaccaccactgagaccacctcacacggtactcccagcttcacttcttcaatcaccaccactgagaccccctcacacagtactcccagcttcacttctttgatcaccaccaccgagaccacctcacacagtactcccagcttcacttcttcgatcaccaccaccgagaccacctcacacagtactcccagcttcacttctttgatcaccaccactgagaccccgtcacacagtactcccagcttcacttcttcgatcaccaccaccgagaccacctcacacagtactaccagcttcacttcttcgatcaccaccaccgagaccacctcacacagtactcccagcttcagttcttcaatcaccaccactgagacccccttacacagtactcctggcctaccttcgtgggtcaccaccaccaagaccacctcacacattactcctggcctcacttcttcaatcaccaccactgagactacctcacacagtactcccggcttcacttcttcaatcaccaccactggaccacctcacacagtactcccagcctcagttcttcaaccatctactccacagtcagcacatccacaactgccatcacctcacattttactacctcagagactgcggtgactcccacacctgtaaccccatcttctctgagtacagacatcccgaccacatccctaagaactctcaccccattatctttgaacaccagcacttcattgactacaaccacagactttccctctatacccactgatatcagtaccttaccaactcgaacacacatcatttcatcttctccctccatccaaagtacagaaacctcatcccttgtgggcaccacctctcccaccatgtccactgtgagaatgaccctcagaattactgagaacaccccaatcagttcctttagcacaagtattgttgttatacctgaaacccaacaacacagacccctcctgtactgacgtcagccactgggacccaaacatctcctgcacctactactgtcacctttggaagtacggattcctccacgtccactcttcatactcttactccatcaacagccttgagcacgatcgtgtcaacatcacaggttcctattcctagcacacattcctccacccttcaaacaactccttctactccctcattgcaaacttcactcacatctacaagtgagttcactacagaatctttcactaggggaagtacgtctacaaatgcaatcttgacttcttttagtaccatcatctggtcctcaacacccactattatcatgtcctcttctccatcttctgccagcataactccagtgttctccactaccattcattctgttccttcttcaccatacattttcagtacagaaaatgtgggctccgcttctatcacaggctttcctagtctctcttcctctgcaactaccagcacttcttcaaccagctcctctctgaccacagctctcactgaaataacccccttttcttatatttcccttccctccaccacaccctgtccaggaactataacaattaccatagtccctgcctctcccactgatccatgtgttgaaatggatcccagcactgaagctacttctcctcccaccaccccattaacagtctttccctttactaccgaaatggtcacctgtcctacctccatcagtatccaaactactcttactacatatatggacacttcttccatgatgccagaaagtgagtccagcatctcacccaatgcttccagttccactggcactgggactgtacccacaaacacagttttcacaagtactcgactgcccaccagtgagacctggctgagcaacagttctgtgatccccctacctcttcctggcgtctctaccatcccgctcaccatgaaaccaagcagtagcctcccgaccatcctgaggacttcaagcaagtcaacacacccatccccacccaccactaggacttcagagacaccagtggccactacccagactcctaccacccttacatcacgcaggacaactcgcatcacttctcagatgaccacacagtccacgttgaccaccactgcaggcacctgtgacaatggtggcacctgggaacagggccagtgtgcttgccttccggggttttctggggaccgctgtcagctccagaccagatgccagaatgggggtcagtgggatggcctcaaatgccagtgccccagcaccttctatggttccagttgtgagtttgctgtggaacaggtggatctagatgtagtggagaccgaggtgggcatggaagtgtctgtggatcagcagttctcgccggacctcaatgacaacacttcccaggcctacagggatttcaacaagaccttctggaatcagatgcagaagatttttgcagacatgcagggcttcaccttcaagggtgtggagatcctgtccctgaggaatggcagcatcgtggtggactacctggtcctgctggagatgcccttcagcccccagctggagagcgagtatgagcaggtgaagaccacgctgaaggaggggctgcagaacgccagccaggatgtgaacagctgccaggactcccagaccctgtgttttaagcctgactccatcaaggtgaacaacaacagcaagacagagctgaccccggcagccatctgccgccgcgccgctcccacgggctatgaagagttctacttccccttggtggaggccacccggctccgctgtgtcaccaaatgcacgtcgggggtggacaacgccatcgactgtcaccagggccagtgcgttctggagacgagcggtcccacgtgtcgctgctactccaccgacacgcactggttctctggcccgcgctgcgaggtggccgtccactggagggcgctggtcgggggcctgacggccggcgccgcgctgctggtgctgctgctgctggcgctgggcgtccgggcggtgcgctccggatggtggggcggccagcgccgaggccggtcctgggaccaggacaggaaatggttcgagacctgggatgaggaagtcgtgggcactttttcaaactggggtttcgaggacgacggaacagacaaggatacaaatttctatgtggccttggagaacgtggacaccactatgaaggtgcacatcaagagacccgagatgacctcgtcctcagtgtgagccctgcggggccccttcaccaccccctccgccctgccccggacacaagggtctgcattgcgtccatttcaagaggtggccccaggacgcgggcagcccaggctcctgctgttcttgggcaagatgagactgttcccccaaatcccatccttctccttccaacttggctgaaacccacctggagacgcagttcacgtccaggctcttccactgtggaatcttgggcaagtcagtaacgagcctcagtttcctcacctgcaaaacgggtacagcattcctgtatgatagctcacgccgttgttgtgaaaaccacatagacttggtcaattctcggtcctactctgccctcccgtctcagccctcgtgttgccattgcctctctcggatcctccaatcctcacgtccttcacctggtctctggccctggttcttattttctctcaattccctactgcctgtttcttactttgaacctggaggcagcctgcagccccatcccatctcctgccctctcctgatctaactccctgctgcatctcttgctctcattccttagacgtcctccccttttgaccccgttccttcatccatcctgcaccccagtcccccagccctaaatcctccctcctctcctcacatcctggtccctagcaaggtatagatagcctctgtgtcttaggataccccgggtgctgttccctcggtcaccctgttgcccagttccccgtttctcttgctctcattccttgtatcctttccccttttgagcccgtccattcatcggttctgcccccgactcccccagccctaaataccccagctgctgttccccccatcaccctgctgcccaattccccgtttctcttgctctcattccttgtatcttctccccttctgagcctgtccattcatcggtggttctgcccctactcccccagccctaaataccccagctgctgttcctccccatcaccccgctactggattctccatttttattctccacccctttctctcacccctggagccctgcgggtgggggcagggcatgagttccccagtccccaaggaaaggcagccccctcagtctccctcctcctcattcccttccatctccctcccctctgccttttaaacccatcccctccgattcccctcctcccccctctctccctggtgtcaactcgattcctgcggtaactctgagccctgaaatcctcagtctccttggcggggaagattggctttggggacaggaagtcggcacatctccaggtctccatgtgcacaatatagagtttattgtaaaaagc

SEQ ID NO: 497861 - DNA, 293 bp, Homo sapiens
gtcagataatcgagctggtaccctcccaaagtgctgggattacagggggtgagcactgtgcccagcagaacctccgaatggatctgtcactttgtccttagtctccttcagtctgtattcagcagagatggagtttcaccatatgggtcaggctggtctcgaactcccgacctcaggcgacctccctgcctgggcctcccaaagtgcggggactacaggcgtgagccactgtgcctggcctctagaagggtggtaacacagatagttggaacaaaaaggtatttccatcctcc

SEQ ID NO: 497862 - DNA, 4433 bp, Homo sapiens
  misc_feature (4271)..(4271): n is a, c, g, or t
atggggtgccagcttcacttctttgataaccacctctgagaccccgtcacacagtactcccagcttcacttcttcaatcagcaccactgagaccacatcccacagtactcccagcttcacttcttcgatcaccaccactgagaccacctcacacagtactcccagcttcacttcttcgatcaccaccaccgagaccacctcacacagtactcccagcttcacttcttcgatcaccaccaccgagaccacctcacacagtactcccagcttcacttcttcgatcaccaccaccgagaccacatcccacagtactcccagcttcacttcttcgatcaccaccaccgagaccacctcacacagtactcccagcttcacttcttcaatcaccaccactgagaccacctcacacagtactcccagcttcacttcttcgatcaccaccaccgagaccacctcacacagtactcccagcctcagttcttcaaccatctactccacagtcagcacatccacaactgccatcacctcacattttactacctcagagactgcggtgactcccacacctgtaaccccatcttctctgagtacagacatcccgaccacatccctaagaactctcaccccattatctttgaacaccagcacttcattgactacaaccacagactttccctctatacccactgatatcagtaccttaccaactcgaacacacatcatttcatcttctccctccatccaaagtacagaaacctcatcccttgtgggcaccacctctcccaccatgtccactgtgagaatgaccctcagaattactgagaacaccccaatcagttcctttagcacaagtattgttgttatacctgaaacccaacaacacagacccctcctgtactgacgtcagccactgggacccaaacatctcctgcacctactactgtcacctttggaagtacggattcctccacgtccactcttcatactcttactccatcaacagccttgagcacgatcgtgtcaacatcacaggttcctattcctagcacacattcctccacccttcaaacaactccttctactccctcattgcaaacttcactcacatctacaagtgagttcactacagaatctttcactaggggaagtacgtctacaaatgcaatcttgacttcttttagtaccatcatctggtcctcaacacccactattatcatgtcctcttctccatcttctgccagcataactccagtgttctccactaccattcattctgttccttcttcaccatacattttcagtacagaaaatgtgggctccgcttctatcacaggctttcctagtctctcttcctctgcaactaccagcacttcttcaaccagctcctctctgaccacagctctcactgaaataacccccttttcttatatttcccttccctccaccacaccctgtccaggaactataacaattaccatagtccctgcctctcccactgatccatgtgttgaaatggatcccagcactgaagctacttctcctcccaccaccccattaacagtctttccctttactaccgaaatggtcacctgtcctacctccatcagtatccaaactactcttactacatatatggacacttcttccatgatgccagaaagtgagtccagcatctcacccaatgcttccagttccactggcactgggactgtacccacaaacacagttttcacaagtactcgactgcccaccagtgagacctggctgagcaacagttctgtgatccccctacctcttcctggcgtctctaccatcccgctcaccatgaaaccaagcagtagcctcccgaccatcctgaggacttcaagcaagtcaacacacccatccccacccaccactaggacttcagagacaccagtggccactacccagactcctaccacccttacatcacgcaggacaactcgcatcacttctcagatgaccacacagtccacgttgaccaccactgcaggcacctgtgacaatggtggcacctgggaacagggccagtgtgcttgccttccggggttttctggggaccgctgtcagctccagaccagatgccagaatgggggtcagtgggatggcctcaaatgccagtgccccagcaccttctatggttccagttgtgagtttgctgtggaacaggtggatctagatgtagtggagaccgaggtgggcatggaagtgtctgtggatcagcagttctcgccggacctcaatgacaacacttcccaggcctacagggatttcaacaagaccttctggaatcagatgcagaagatttttgcagacatgcagggcttcaccttcaagggtgtggagatcctgtccctgaggaatggcagcatcgtggtggactacctggtcctgctggagatgcccttcagcccccagctggagagcgagtatgagcaggtgaagaccacgctgaaggaggggctgcagaacgccagccaggatgtgaacagctgccaggactcccagaccctgtgttttaagcctgactccatcaaggtgaacaacaacagcaagacagagctgaccccggcagccatctgccgccgcgccgctcccacgggctatgaagagttctacttccccttggtggaggccacccggctccgctgtgtcaccaaatgcacgtcgggggtggacaacgccatcgactgtcaccagggccagtgcgttctggagacgagcggtcccacgtgtcgctgctactccaccgacacgcactggttctctggcccgcgctgcgaggtggccgtccactggagggcgctggtcgggggcctgacggccggcgccgcgctgctggtgctgctgctgctggcgctgggcgtccgggcggtgcgctccggatggtggggcggccagcgccgaggccggtcctgggaccaggacaggaaatggttcgagacctgggatgaggaagtcgtgggcactttttcaaactggggtttcgaggacgacggaacagacaaggatacaaatttctatgtggccttggagaacgtggacaccactatgaaggtgcacatcaagagacccgagatgacctcgtcctcagtgtgagccctgcggggccccttcaccaccccctccgccctgccccggacacaagggtctgcattgcgtccatttcaagaggtggccccaggacgcgggcagcccaggctcctgctgttcttgggcaagatgagactgttcccccaaatcccatccttctccttccaacttggctgaaacccacctggagacgcagttcacgtccaggctcttccactgtggaatcttgggcaagtcagtaacgagcctcagtttcctcacctgcaaaacgggtacagcattcctgtatgatagctcacgccgttgttgtgaaaaccacatagacttggtcaattctcggtcctactctgccctcccgtctcagccctcgtgttgccattgcctctctcggatcctccaatcctcacgtccttcacctggtctctggccctggttcttattttctctcaattccctactgcctgtttcttactttgaacctggaggcagcctgcagccccatcccatctcctgccctctcctgatctaactccctgctgcatctcttgctctcattccttagacgtcctccccttttgaccccgttccttcatccatcctgcaccccagtcccccagccctaaatcctccctcctctcctcacatcctggtccctagcaaggtatagatagcctctgtgtcttaggataccccgggtgctgttccctcggtcaccctgttgcccagttccccgtttctcttgctctcattccttgtatcctttccccttttgagcccgtccattcatcggttctgcccccgactcccccagccctaaataccccagctgctgttccccccatcaccctgctgcccaattccccgtttctcttgctctcattccttgtatcttctccccttctgagcctgtccattcatcggtggttctgcccctactcccccagccctaaataccccagctgctgttcctccccatcaccccgctactggattctccatttttattctccacccctttctctcacccctggagccctgcgggtgggggcagggcatgagttccccagtccccaaggaaaggcagccccctcagtctcctttttgttttttttcttccattttctttttttttgtcttttaaacccatttttttttanttctttttttttgggcaggggcctggtgtcaactcgattcctgcggtaactctgagccctgaaatcctcagtctccttggcggggaagattggctttggggacaggaagtcggcacatctccaggtctccatgtgcacaatatagagtttattgtaaaaagc

SEQ ID NO: 497863 - DNA, 278 bp, Homo sapiens
gcaaaaaacagggttaattgggcttacagttccccctgggtggggaagccccacaattttggcaaaaggggaaagggcccaaaccccttttttttggggggccaccggcaaaaagcttgggccgggcaactccctgcccttagggtttttaaaaccatcaaatcttgtgagaatcattcccttttataaaaacagccccggaaagacccccccccattatttatgctccacccatgacccgggggaattgggggaattccaaattaaggggaatttgg

SEQ ID NO: 497864 - DNA, 211 bp, Homo sapiens
aaatttaggaaaacccctttttgtttttaaagtgatttgtgatttgggcgggataaaccggataaaaggttttgtttttaaagggggattttcattcctttgggggcaggggtcgcccaaacatttcccttgtaaaagaacccagtggaagatcctgtcctgattttcaaaaatttttttttttgtatgattaaaagttttttccctttta

SEQ ID NO: 497865 - DNA, 3981 bp, Homo sapiens
atggggtgccagcttcacttctttgataaccacctctgagaccccgtcacacagtactcccagcttcacttcttcaatcagcaccactgagaccacatcccacagtactcccagcttcacttcttcgatcaccaccactgagaccacctcacacagtactcccagcttcacttcttcgatcaccaccaccgagaccacctcacacagtactcccagcttcacttcttcgatcaccaccaccgagaccacctcacacagtactcccagcttcacttcttcgatcaccaccaccgagaccacatcccacagtactcccagcttcacttcttcgatcaccaccaccgagaccacctcacacagtactcccagcttcacttcttcaatcaccaccactgagaccacctcacacagtactcccagcttcacttcttcgatcaccaccaccgagaccacctcacacagtactcccagcctcagttcttcaaccatctactccacagtcagcacatccacaactgccatcacctcacattttactacctcagagactgcggtgactcccacacctgtaaccccatcttctctgagtacagacatcccgaccacatccctaagaactctcaccccattatctttgaacaccagcacttcattgactacaaccacagactttccctctatacccactgatatcagtaccttaccaactcgaacacacatcatttcatcttctccctccatccaaagtacagaaacctcatcccttgtgggcaccacctctcccaccatgtccactgtgagaatgaccctcagaattactgagaacaccccaatcagttcctttagcacaagtattgttgttatacctgaaacccaacaacacagacccctcctgtactgacgtcagccactgggacccaaacatctcctgcacctactactgtcacctttggaagtacggattcctccacgtccactcttcatactcttactccatcaacagccttgagcacgatcgtgtcaacatcacaggttcctattcctagcacacattcctccacccttcaaacaactccttctactccctcattgcaaacttcactcacatctacaagtgagttcactacagaatctttcactaggggaagtacgtctacaaatgcaatcttgacttcttttagtaccatcatctggtcctcaacacccactattatcatgtcctcttctccatcttctgccagcataactccagtgttctccactaccattcattctgttccttcttcaccatacattttcagtacagaaaatgtgggctccgcttctatcacaggctttcctagtctctcttcctctgcaactaccagcacttcttcaaccagctcctctctgaccacagctctcactgaaataacccccttttcttatatttcccttccctccaccacaccctgtccaggaactataacaattaccatagtccctgcctctcccactgatccatgtgttgaaatggatcccagcactgaagctacttctcctcccaccaccccattaacagtctttccctttactaccgaaatggtcacctgtcctacctccatcagtatccaaactactcttactacatatatggacacttcttccatgatgccagaaagtgagtccagcatctcacccaatgcttccagttccactggcactgggactgtacccacaaacacagttttcacaagtactcgactgcccaccagtgagacctggctgagcaacagttctgtgatccccctacctcttcctggcgtctctaccatcccgctcaccatgaaaccaagcagtagcctcccgaccatcctgaggacttcaagcaagtcaacacacccatccccacccaccactaggacttcagagacaccagtggccactacccagactcctaccacccttacatcacgcaggacaactcgcatcacttctcagatgaccacacagtccacgttgaccaccactgcaggcacctgtgacaatggtggcacctgggaacagggccagtgtgcttgccttccggggttttctggggaccgctgtcagctccagaccagatgccagaatgggggtcagtgggatggcctcaaatgccagtgccccagcaccttctatggttccagttgtgagtttgctgtggaacaggtggatctagatgtagtggagaccgaggtgggcatggaagtgtctgtggatcagcagttctcgccggacctcaatgacaacacttcccaggcctacagggatttcaacaagaccttctggaatcagatgcagaagatttttgcagacatgcagggcttcaccttcaagggtgtggagatcctgtccctgaggaatggcagcatcgtggtggactacctggtcctgctggagatgcccttcagcccccagctggagagcgagtatgagcaggtgaagaccacgctgaaggaggggctgcagaacgccagccaggatgtgaacagctgccaggactcccagaccctgtgttttaagcctgactccatcaaggtgaacaacaacagcaagacagagctgaccccggcagccatctgccgccgcgccgctcccacgggctatgaagagttctacttccccttggtggaggccacccggctccgctgtgtcaccaaatgcacgtcgggggtggacaacgccatcgactgtcaccagggccagtgcgttctggagacgagcggtcccacgtgtcgctgctactccaccgacacgcactggttctctggcccgcgctgcgaggtggccgtccactggagggcgctggtcgggggcctgacggccggcgccgcgctgctggtgctgctgctgctggcgctgggcgtccgggcggtgcgctccggatggtggggcggccagcgccgaggccggtcctgggaccaggacaggaaatggttcgagacctgggatgaggaagtcgtgggcactttttcaaactggggtttcgaggacgacggaacagacaaggatacaaatttctatgtggccttggagaacgtggacaccactatgaaggtgcacatcaagagacccgagatgacctcgtcctcagtgtgagccctgcggggccccttcaccaccccctccgccctgccccggacacaagggtctgcattgcgtccatttcaagaggtggccccaggacgcgggcagcccaggctcctgctgttcttgggcaagatgagactgttcccccaaatcccatccttctccttccaacttggctgaaacccacctggagacgcagttcacgtccaggctcttccactgtggaatcttgggcaagtcagtaacgagcctcagtttcctcacctgcaaaacgggtacagcattcctgtatgatagctcacgccgttgttgtgaaaaccacatagacttggtcaattctcggtcctactctgccctcccgtctcagccctcgtgttgccattgcctctctcggatcctccaatcctcacgtccttcacctggtctctggccctggttcttattttctctcaattccctactgcctgtttcttactttgaacctggaggcagcctgcagccccatcccatctcctgccctctcctgatctaactccctgctgcatctcttgctctcattccttagacgtcctccccttttgaccccgttccttcatccatcctgcaccccagtcccccagccctaaatcctccctcctctcctcacatcctggtccctagcaaggtatagatagcctctgtgtcttaggataccccgggtgctgttccctcggtcaccctgttgcccagttccccgtttctcttgctctcattccttgtatcctttccccttttgagcccatctcctgccctctcctgatctaactccctgctgcatctcttgctctcattccttagacgtcctccccttttgaccccgttccttcatcc

SEQ ID NO: 497866 - DNA, 212 bp, Homo sapiens
tatctaagcgggctgggagtcatgcccacagatgggttttatttaacccggtatatcatggatttactcttaccaaccctgagcatctggcataacgattaggagtagaaagaatgcaacatccagaaatatttgtaccctggaaagcacgtttgctttgccatgttttgatggcactgcaaagctgttctttgtggggaaaactttgcatc

SEQ ID NO: 497867 - DNA, 4177 bp, Homo sapiens
atggggtgccagcttcacttctttgataaccacctctgagaccccgtcacacagtactcccagcttcacttcttcaatcagcaccactgagaccacatcccacagtactcccagcttcacttcttcgatcaccaccactgagaccacctcacacagtactcccagcttcacttcttcgatcaccaccaccgagaccacctcacacagtactcccagcttcacttcttcgatcaccaccaccgagaccacctcacacagtactcccagcttcacttcttcgatcaccaccaccgagaccacatcccacagtactcccagcttcacttcttcgatcaccaccaccgagaccacctcacacagtactcccagcttcacttcttcaatcaccaccactgagaccacctcacacagtactcccagcttcacttcttcgatcaccaccaccgagaccacctcacacagtactcccagcctcagttcttcaaccatctactccacagtcagcacatccacaactgccatcacctcacattttactacctcagagactgcggtgactcccacacctgtaaccccatcttctctgagtacagacatcccgaccacatccctaagaactctcaccccattatctttgaacaccagcacttcattgactacaaccacagactttccctctatacccactgatatcagtaccttaccaactcgaacacacatcatttcatcttctccctccatccaaagtacagaaacctcatcccttgtgggcaccacctctcccaccatgtccactgtgagaatgaccctcagaattactgagaacaccccaatcagttcctttagcacaagtattgttgttatacctgaaacccaacaacacagacccctcctgtactgacgtcagccactgggacccaaacatctcctgcacctactactgtcacctttggaagtacggattcctccacgtccactcttcatactcttactccatcaacagccttgagcacgatcgtgtcaacatcacaggttcctattcctagcacacattcctccacccttcaaacaactccttctactccctcattgcaaacttcactcacatctacaagtgagttcactacagaatctttcactaggggaagtacgtctacaaatgcaatcttgacttcttttagtaccatcatctggtcctcaacacccactattatcatgtcctcttctccatcttctgccagcataactccagtgttctccactaccattcattctgttccttcttcaccatacattttcagtacagaaaatgtgggctccgcttctatcacaggctttcctagtctctcttcctctgcaactaccagcacttcttcaaccagctcctctctgaccacagctctcactgaaataacccccttttcttatatttcccttccctccaccacaccctgtccaggaactataacaattaccatagtccctgcctctcccactgatccatgtgttgaaatggatcccagcactgaagctacttctcctcccaccaccccattaacagtctttccctttactaccgaaatggtcacctgtcctacctccatcagtatccaaactactcttactacatatatggacacttcttccatgatgccagaaagtgagtccagcatctcacccaatgcttccagttccactggcactgggactgtacccacaaacacagttttcacaagtactcgactgcccaccagtgagacctggctgagcaacagttctgtgatccccctacctcttcctggcgtctctaccatcccgctcaccatgaaaccaagcagtagcctcccgaccatcctgaggacttcaagcaagtcaacacacccatccccacccaccactaggacttcagagacaccagtggccactacccagactcctaccacccttacatcacgcaggacaactcgcatcacttctcagatgaccacacagtccacgttgaccaccactgcaggcacctgtgacaatggtggcacctgggaacagggccagtgtgcttgccttccggggttttctggggaccgctgtcagctccagaccagatgccagaatgggggtcagtgggatggcctcaaatgccagtgccccagcaccttctatggttccagttgtgagtttgctgtggaacaggtggatctagatgcagaagatttttgcagacatgcagggcttcaccttcaagggtgtggagatcctgtccctgaggaatggcagcatcgtggtggactacctggtcctgctggagatgcccttcagcccccagctggagagcgagtatgagcaggtgaagaccacgctgaaggaggggctgcagaacgccagccaggatgtgaacagctgccaggactcccagaccctgtgttttaagcctgactccatcaaggtgaacaacaacagcaagacagagctgaccccggcagccatctgccgccgcgccgctcccacgggctatgaagagttctacttccccttggtggaggccacccggctccgctgtgtcaccaaatgcacgtcgggggtggacaacgccatcgactgtcaccagggccagtgcgttctggagacgagcggtcccacgtgtcgctgctactccaccgacacgcactggttctctggcccgcgctgcgaggtggccgtccactggagggcgctggtcgggggcctgacggccggcgccgcgctgctggtgctgctgctgctggcgctgggcgtccgggcggtgcgctccggatggtggggcggccagcgccgaggccggtcctgggaccaggacaggaaatggttcgagacctgggatgaggaagtcgtgggcactttttcaaactggggtttcgaggacgacggaacagacaaggatacaaatttctatgtggccttggagaacgtggacaccactatgaaggtgcacatcaagagacccgagatgacctcgtcctcagtgtgagccctgcggggccccttcaccaccccctccgccctgccccggacacaagggtctgcattgcgtccatttcaagaggtggccccaggacgcgggcagcccaggctcctgctgttcttgggcaagatgagactgttcccccaaatcccatccttctccttccaacttggctgaaacccacctggagacgcagttcacgtccaggctcttccactgtggaatcttgggcaagtcagtaacgagcctcagtttcctcacctgcaaaacgggtacagcattcctgtatgatagctcacgccgttgttgtgaaaaccacatagacttggtcaattctcggtcctactctgccctcccgtctcagccctcgtgttgccattgcctctctcggatcctccaatcctcacgtccttcacctggtctctggccctggttcttattttctctcaattccctactgcctgtttcttactttgaacctggaggcagcctgcagccccatcccatctcctgccctctcctgatctaactccctgctgcatctcttgctctcattccttagacgtcctccccttttgaccccgttccttcatccatcctgcaccccagtcccccagccctaaatcctccctcctctcctcacatcctggtccctagcaaggtatagatagcctctgtgtcttaggataccccgggtgctgttccctcggtcaccctgttgcccagttccccgtttctcttgctctcattccttgtatcctttccccttttgagcccgtccattcatcggttctgcccccgactcccccagccctaaataccccagctgctgttccccccatcaccctgctgcccaattctttattctccacccctttctctcacccctggagccctgcgggtgggggcagggcatgagttccccagtccccaaggaaaggcagccccctcagtctccctcctcctcattcccttccatctccctcccctctgccttttaaacccatcccctccgattcccctcctcccccctctctccctggtgtcaactcgattcctgcggtaactctgagccctgaaatcctcagtctccttggcggggaagattggctttggggacaggaagtcggcacatctccaggtctccatgtgcacaatatagagtttattgtaaaaagc

SEQ ID NO: 497868 - DNA, 4119 bp, Homo sapiens
atggggtgccagcttcacttctttgataaccacctctgagaccccgtcacacagtactcccagcttcacttcttcaatcagcaccactgagaccacatcccacagtactcccagcttcacttcttcgatcaccaccactgagaccacctcacacagtactcccagcttcacttcttcgatcaccaccaccgagaccacctcacacagtactcccagcttcacttcttcgatcaccaccaccgagaccacctcacacagtactcccagcttcacttcttcgatcaccaccaccgagaccacatcccacagtactcccagcttcacttcttcgatcaccaccaccgagaccacctcacacagtactcccagcttcacttcttcaatcaccaccactgagaccacctcacacagtactcccagcttcacttcttcgatcaccaccaccgagaccacctcacacagtactcccagcctcagttcttcaaccatctactccacagtcagcacatccacaactgccatcacctcacattttactacctcagagactgcggtgactcccacacctgtaaccccatcttctctgagtacagacatcccgaccacatccctaagaactctcaccccattatctttgaacaccagcacttcattgactacaaccacagactttccctctatacccactgatatcagtaccttaccaactcgaacacacatcatttcatcttctccctccatccaaagtacagaaacctcatcccttgtgggcaccacctctcccaccatgtccactgtgagaatgaccctcagaattactgagaacaccccaatcagttcctttagcacaagtattgttgttatacctgaaacccaacaacacagacccctcctgtactgacgtcagccactgggacccaaacatctcctgcacctactactgtcacctttggaagtacggattcctccacgtccactcttcatactcttactccatcaacagccttgagcacgatcgtgtcaacatcacaggttcctattcctagcacacattcctccacccttcaaacaactccttctactccctcattgcaaacttcactcacatctacaagtgagttcactacagaatctttcactaggggaagtacgtctacaaatgcaatcttgacttcttttagtaccatcatctggtcctcaacacccactattatcatgtcctcttctccatcttctgccagcataactccagtgttctccactaccattcattctgttccttcttcaccatacattttcagtacagaaaatgtgggctccgcttctatcacaggctttcctagtctctcttcctctgcaactaccagcacttcttcaaccagctcctctctgaccacagctctcactgaaataacccccttttcttatatttcccttccctccaccacaccctgtccaggaactataacaattaccatagtccctgcctctcccactgatccatgtgttgaaatggatcccagcactgaagctacttctcctcccaccaccccattaacagtctttccctttactaccgaaatggtcacctgtcctacctccatcagtatccaaactactcttactacatatatggacacttcttccatgatgccagaaagtgagtccagcatctcacccaatgcttccagttccactggcactgggactgtacccacaaacacagttttcacaagtactcgactgcccaccagtgagacctggctgagcaacagttctgtgatccccctacctcttcctggcgtctctaccatcccgctcaccatgaaaccaagcagtagcctcccgaccatcctgaggacttcaagcaagtcaacacacccatccccacccaccactaggacttcagagacaccagtggccactacccagactcctaccacccttacatcacgcaggacaactcgcatcacttctcagatgaccacacagtccacgttgaccaccactgcaggcacctgtgacaatggtggcacctgggaacagggccagtgtgcttgccttccggggttttctggggaccgctgtcagctccagaccagatgccagaatgggggtcagtgggatggcctcaaatgccagtgccccagcaccttctatggttccagttgtgagtttgctgtggaacaggtggatctagatgtagtggagaccgaggtgggcatggaagtgtctgtggatcagcagttctcgccggacctcaatgacaacacttcccaggcctacagggatttcaacaagaccttctggaatcagatgcagaagatttttgcagacatgcagggcttcaccttcaagggtgtggagatcctgtccctgaggaatggcagcatcgtggtggactacctggtcctgctggagatgcccttcagcccccagctggagagcgagtatgagcaggtgaagaccacgctgaaggaggggctgcagaacgccagccaggatgtgaacagctgccaggactcccagaccctgtgttttaagcctgactccatcaaggtgaacaacaacagcaagacagagctgaccccggcagccatctgccgccgcgccgctcccacgggctatgaagagttctacttccccttggtggaggccacccggctccgctgtgtcaccaaatgcacgtcgggggtggacaacgccatcgactgtcaccagggccagtgcgttctggagacgagcggtcccacgtgtcggtcctgggaccaggacaggaaatggttcgagacctgggatgaggaagtcgtgggcactttttcaaactggggtttcgaggacgacggaacagacaaggatacaaatttctatgtggccttggagaacgtggacaccactatgaaggtgcacatcaagagacccgagatgacctcgtcctcagtgtgagccctgcggggccccttcaccaccccctccgccctgccccggacacaagggtctgcattgcgtccatttcaagaggtggccccaggacgcgggcagcccaggctcctgctgttcttgggcaagatgagactgttcccccaaatcccatccttctccttccaacttggctgaaacccacctggagacgcagttcacgtccaggctcttccactgtggaatcttgggcaagtcagtaacgagcctcagtttcctcacctgcaaaacgggtacagcattcctgtatgatagctcacgccgttgttgtgaaaaccacatagacttggtcaattctcggtcctactctgccctcccgtctcagccctcgtgttgccattgcctctctcggatcctccaatcctcacgtccttcacctggtctctggccctggttcttattttctctcaattccctactgcctgtttcttactttgaacctggaggcagcctgcagccccatcccatctcctgccctctcctgatctaactccctgctgcatctcttgctctcattccttagacgtcctccccttttgaccccgttccttcatccatcctgcaccccagtcccccagccctaaatcctccctcctctcctcacatcctggtccctagcaaggtatagatagcctctgtgtcttaggataccccgggtgctgttccctcggtcaccctgttgcccagttccccgtttctcttgctctcattccttgtatcctttccccttttgagcccgtccattcatcggttctgcccccgactcccccagccctaaataccccagctgctgttccccccatcaccctgctgcccaattctttattctccacccctttctctcacccctggagccctgcgggtgggggcagggcatgagttccccagtccccaaggaaaggcagccccctcagtctccctcctcctcattcccttccatctccctcccctctgccttttaaacccatcccctccgattcccctcctcccccctctctccctggtgtcaactcgattcctgcggtaactctgagccctgaaatcctcagtctccttggcggggaagattggctttggggacaggaagtcggcacatctccaggtctccatgtgcacaatatagagtttattgtaaaaagc

SEQ ID NO: 497869 - DNA, 219 bp, Homo sapiens
tagtgtctcaaacatacaggtccaagggtaggcaatgaatttaccaaaaccagcaagttcattacagctggctttcttccacccgtcatccccagtgtgagctcttttttttttttggagatggagtttcactctcattgcccagaactgggagtgcagtgggcgcccttctcgcgctcacgtgtaacctcccactctctccgattcgaggcaatttct

SEQ ID NO: 497870 - DNA, 290 bp, Homo sapiens
caaagggaaaaaaccccaaaattcccccaaatggtctgtggggttctccaggtaatttaatttggctcccccaaaccggtaggaattacctaatcaggtggtctttggataaaaaggtttgacataggggcttacttttgaattggaacccacctccaggatgtccaaccctaatctggggttgtgatttaactgcttcacaaagccaccatctaccacatatctaagaagaatcaaagcaagttaagtttctggaaaataaaagaagacttgttaattgttaaaaaaaa

SEQ ID NO: 497871 - DNA, 3559 bp, Homo sapiens
atggggtgccagcttcacttctttgataaccacctctgagaccccgtcacacagtactcccagcttcacttcttcaatcagcaccactgagaccacatcccacagtactcccagcttcacttcttcgatcaccaccactgagaccacctcacacagtactcccagcttcacttcttcgatcaccaccaccgagaccacctcacacagtactcccagcttcacttcttcgatcaccaccaccgagaccacctcacacagtactcccagcttcacttcttcgatcaccaccaccgagaccacatcccacagtactcccagcttcacttcttcgatcaccaccaccgagaccacctcacacagtactcccagcttcacttcttcaatcaccaccactgagaccacctcacacagtactcccagcttcacttcttcgatcaccaccaccgagaccacctcacacagtactcccagcctcagttcttcaaccatctactccacagtcagcacatccacaactgccatcacctcacattttactacctcagagactgcggtgactcccacacctgtaaccccatcttctctgagtacagacatcccgaccacaagcctacgaactctcaccccttcgtctgtgggttcaaccagctcctctctgaccacagctctcactgaaataacccccttttcttatatttcccttccctccaccacaccctgtccaggaactataacaattaccatagtccctgcctctcccactgatccatgtgttgaaatggatcccagcactgaagctacttctcctcccaccaccccattaacagtctttccctttactaccgaaatggtcacctgtcctacctccatcagtatccaaactactcttactacatatatggacacttcttccatgatgccagaaagtgagtccagcatctcacccaatgcttccagttccactggcactgggactgtacccacaaacacagttttcacaagtactcgactgcccaccagtgagacctggctgagcaacagttctgtgatccccctacctcttcctggcgtctctaccatcccgctcaccatgaaaccaagcagtagcctcccgaccatcctgaggacttcaagcaagtcaacacacccatccccacccaccactaggacttcagagacaccagtggccactacccagactcctaccacccttacatcacgcaggacaactcgcatcacttctcagatgaccacacagtccacgttgaccaccactgcaggcacctgtgacaatggtggcacctgggaacagggccagtgtgcttgccttccggggttttctggggaccgctgtcagctccagaccagatgccagaatgggggtcagtgggatggcctcaaatgccagtgccccagcaccttctatggttccagttgtgagtttgctgtggaacaggtggatctagatgtagtggagaccgaggtgggcatggaagtgtctgtggatcagcagttctcgccggacctcaatgacaacacttcccaggcctacagggatttcaacaagaccttctggaatcagatgcagaagatttttgcagacatgcagggcttcaccttcaagggtgtggagatcctgtccctgaggaatggcagcatcgtggtggactacctggtcctgctggagatgcccttcagcccccagctggagagcgagtatgagcaggtgaagaccacgctgaaggaggggctgcagaacgccagccaggatgtgaacagctgccaggactcccagaccctgtgttttaagcctgactccatcaaggtgaacaacaacagcaagacagagctgaccccggcagccatctgccgccgcgccgctcccacgggctatgaagagttctacttccccttggtggaggccacccggctccgctgtgtcaccaaatgcacgtcgggggtggacaacgccatcgactgtcaccagggccagtgcgttctggagacgagcggtcccacgtgtcgctgctactccaccgacacgcactggttctctggcccgcgctgcgaggtggccgtccactggagggcgctggtcgggggcctgacggccggcgccgcgctgctggtgctgctgctgctggcgctgggcgtccgggcggtgcgctccggatggtggggcggccagcgccgaggccggtcctgggaccaggacaggaaatggttcgagacctgggatgaggaagtcgtgggcactttttcaaactggggtttcgaggacgacggaacagacaaggatacaaatttctatgtggccttggagaacgtggacaccactatgaaggtgcacatcaagagacccgagatgacctcgtcctcagtgtgagccctgcggggccccttcaccaccccctccgccctgccccggacacaagggtctgcattgcgtccatttcaagaggtggccccaggacgcgggcagcccaggctcctgctgttcttgggcaagatgagactgttcccccaaatcccatccttctccttccaacttggctgaaacccacctggagacgcagttcacgtccaggctcttccactgtggaatcttgggcaagtcagtaacgagcctcagtttcctcacctgcaaaacgggtacagcattcctgtatgatagctcacgccgttgttgtgaaaaccacatagacttggtcaattctcggtcctactctgccctcccgtctcagccctcgtgttgccattgcctctctcggatcctccaatcctcacgtccttcacctggtctctggccctggttcttattttctctcaattccctactgcctgtttcttactttgaacctggaggcagcctgcagccccatcccatctcctgccctctcctgatctaactccctgctgcatctcttgctctcattccttagacgtcctccccttttgaccccgttccttcatccatcctgcaccccagtcccccagccctaaatcctccctcctctcctcacatcctggtccctagcaaggtatagatagcctctgtgtcttaggataccccgggtgctgttccctcggtcaccctgttgcccagttccccgtttctcttgctctcattccttgtatcctttccccttttgagcccgtccattcatcggttctgcccccgactcccccagccctaaataccccagctgctgttccccccatcaccctgctgcccaattctttattctccacccctttctctcacccctggagccctgcgggtgggggcagggcatgagttccccagtccccaaggaaaggcagccccctcagtctccctcctcctcattcccttccatctccctcccctctgccttttaaacccatcccctccgattcccctcctcccccctctctccctggtgtcaactcgattcctgcggtaactctgagccctgaaatcctcagtctccttggcggggaagattggctttggggacaggaagtcggcacatctccaggtctccatgtgcacaatatagagtttattgtaaaaagc

SEQ ID NO: 497872 - DNA, 420 bp, Homo sapiens
  misc_feature (35)..(35): n is a, c, g, or t
  misc_feature (40)..(41): n is a, c, g, or t
  misc_feature (44)..(44): n is a, c, g, or t
  misc_feature (46)..(46): n is a, c, g, or t
  misc_feature (49)..(50): n is a, c, g, or t
  misc_feature (52)..(54): n is a, c, g, or t
  misc_feature (57)..(57): n is a, c, g, or t
  misc_feature (63)..(63): n is a, c, g, or t
  misc_feature (72)..(73): n is a, c, g, or t
  misc_feature (79)..(79): n is a, c, g, or t
  misc_feature (84)..(84): n is a, c, g, or t
  misc_feature (93)..(93): n is a, c, g, or t
  misc_feature (121)..(121): n is a, c, g, or t
  misc_feature (123)..(123): n is a, c, g, or t
  misc_feature (129)..(129): n is a, c, g, or t
  misc_feature (132)..(133): n is a, c, g, or t
  misc_feature (142)..(142): n is a, c, g, or t
  misc_feature (184)..(184): n is a, c, g, or t
  misc_feature (215)..(215): n is a, c, g, or t
gataccatggctgctgaaatcacaaagcggatggngcctnnagnanccnntnnnggngagcgnccaatctcnngatcgnagcancccttaaanccggctggctggtggctgttgctaggangngcacantgnngtgggacangagggggcaccttctccagatgatgtcctggagggggcaggnggtacctccctctccctctcctggggcattngagtctgtggctttggggtgtcctgggctccccatctccttctggcccatctgaactgctgacctgagccccggttctgtcagggtcccataaaggaggacactcagggactgtggacagagcagggcggaggcctgcatgtgctgttgcctctaggtgactttccaagatgccccccatacacacctttctttggaacgagggc

SEQ ID NO: 497873 - DNA, 1666 bp, Homo sapiens
gggatgatcccaataggagaacacatccactcttctcatctatagctgcggtcgatagatcatcgtcagtgatgccatccaggtaggggttgctcgagcacggtggctagcgtcttctatgcgtgatcctggacgtgtacttgaggctaccgcagtgccctcaggactgagatcgtctctcgatccgaccattgagaatcgacagtccgagccacgatagatctacggacaacgatcacaatatcgtgtgtgctctgacgtgcagccaaggctatgctatgtcgcgagatggtgggacggtcatacgagttgcgtatttgatttcgttgccatcgtgaacgttgagcaaggattacggggcgacgacgcgcttgtaattgactgtaatcggtgaactacggtgtcacatacgtaatctacatgcatacttgcttgtacacatcggtcggtgacttggttgacttcgcttccccaactggccttcgtctggaaattggaattaggcccacgagggaagcttgttcgatcagggcgcttatgggattggctaccctccgaggtaggagtcgcaacagatttagtacgactcttccttgaagtgggcgctcgatcaggaagaacatctcacccgaaaatcgtatactagtacacgcgacccgagttccgacgagagatacgaattctcgaggggggcaaatgaagaccattaagatttccaatatataagacattccctttgatggaggaaggagacttaggttcaatcgttgaggagattcgtgtgccctcggctccgtatcacccaggcggattcaacggctttaccccttcaattcaaactctaaataaacatcatgcaaccctttgctacattcaaacttgggcaagggttgctcctaaacgctatggcaattatgcgccattcggtccccgtacatgtcatgtgccactgacacagcagggggaattataacaccagatgcgcactgagggacattggacgagtgccgagaaagcagagttgagatagtggagaccttgccaaaaaccttataactgagaaggagatctacaaaggaacgggcacctcagggatccacaggtcgtctggcggaaggcgccggtcgcgtaagacggaagcagtaaaccaagtaagtaccggggagcaagaaggacacaaagggtgggagccacagcaacaaagacaaagcggattaagggcaaggggcaagaaagaagaccgcgtgcccccggagtggagacacggaaagacagggagacagcactaggcgcggcaggaaatcgtgcgacaccgggccctgtgacaaacatgggaacgagcggcgcggtgccccgaatgaagagccagccggcagccgaaggagaaagacccagcgacgcacaaagaggcacatcaagcaacgaagtcaaattggtgcgacaaaaggggcaacagtaatacagcacagcgggaagcccagtaaaccagaagaaggagacacagagcaccgactacccgggagggacgggggaatatacagaccacccagcgcactctgagagaaacagggcgtgagaaaacaaacaacttgtgggggggaggtgcggcagcaacacagagagagacgacagcactgcagcgacgccagtgactacagagacagaa

SEQ ID NO: 497874 - DNA, 503 bp, Homo sapiens
  misc_feature (21)..(21): n is a, c, g, or t
gcaggtgttatctgtgtgtanagtcctctattattttggggaggcataatgatggaaagttccagattttatatttctaaagaaatatttcaccgaaattagtaggctacaatagaaatgctgatttttcaattctaccatgtacagccagtaaaaacaataacacaccactatctcctgtcaccatcatttcatttaacaaaaggatatttccattcaaacaatttgaaagaacagaatctctcagaataaaatatttttaaatggaatcatttagctatatggaaaagtttactttcagaccagcctggccaacatgctgaaacctcatctctaccaaaaatacaaaaattagccaggcacggtggtggatgcctgtggtgccagctattcgggaggctgaggagggaaaattgcttgagactgggaggtggaggttgcaatgagtgcagattgcaccactgcactctaacattattgacagagtgagaccccgtctcaaa

SEQ ID NO: 497875 - DNA, 290 bp, Homo sapiens
  misc_feature (16)..(16): n is a, c, g, or t
  misc_feature (37)..(37): n is a, c, g, or t
  misc_feature (124)..(124): n is a, c, g, or t
  misc_feature (135)..(135): n is a, c, g, or t
  misc_feature (238)..(238): n is a, c, g, or t
taggctgaagcgcagnggaatggtctcagctcactgnaacctctgcctcctgggttcaactgatccgcccgcctcagcctccctagtacctgggactatagatgagcaccaccatgtccagggntaattttgggnttttaatagagatggggtttcaccatgttggccagactggtcttgaattcttgattcacctgtgtcagcttcccaaagtgctgagattacaggcatgagtcanctgcctgggcagggtcttggctcttttatccaacttggcactcttgtgactt

SEQ ID NO: 497876 - DNA, 656 bp, Homo sapiens
  misc_feature (184)..(184): n is a, c, g, or t
gttgttactataagggagactgcattgcttattgatccaaaaatttcctgttcttcatcccgccagtgggttgctctggttgtgggacatgaacttgcccatcaatggtttggaaatcttgttactatggaatggtggactcatctttggttaaatgaaggttttgcatcctggattgaatatntgtgtgtagaccactgcttcccagagtatgatatttggactcagtttgtttctgctgattacacccgtgcccaggagcttgacgccttagataacagccatcctattgaatattacaggctatctgcttcctgtcataaccctgaatcacactgtctgccaggtcagtgtgggccatccatctgaggttgatgagatatttgatgctatatcatatagcaaaggtgcatctgtcatccgaatgctgcatgactacattggggataaggactttaagaaaggaatgaacatgtatttaaccaagttccaacaaaagaatgctgccgcaggtaatctttaatagcttgagatagaaatggagagaaagtattgtcactctatccaggctgggacattttatttttgttctgaatacttaactcaaggtcaggatccatgtaataaataaattagccttatttgaaaaaaaaaaa

SEQ ID NO: 497877 - DNA, 417 bp, Homo sapiens
ccgagaccacctctatggcacagactacccagaggagagtgtatcggtgagtcttccctggggatatatcggtacatggctgtgcaacacataacagtggtcacacttactcagtagaaatgcatccacaacccgaagactctcctgagggcctgcacgtgaatacacgcgtatagttactaaatctcattggcaagggaccatagatagcgatgcgtcagggcctggagaaagaacctggagtgatgcacgtacggatgtggacacatattcaaggaagcagactggaccaagacgaatgagtgatcactacaggagcatcggtcacgctcacggaacgcagaaggcgctgagcagtatcagggtacacttgcgcaactggtacagcgatttattgctcacggacgtatatcgtgt

SEQ ID NO: 497878 - DNA, 517 bp, Homo sapiens
agctctaagggatgacaggaatcatgttctattcaactttattattattagttactacatttttttgaggaccatcgttatacattatgagtgagttaaaggcagaaaaatgtaagttagaagggttttcctagaaagcgttttatgtaattcagtattacaggctatctgcttcctgtcataaccctgaatcacactgtctgccaggtcagtgtgggccatccatctgaggttgatgagatatttgatgctatatcatatagcaaaggtgcatctgtcatccgaatgctgcatgactacattggggataaggactttaagaaaggaatgaacatgtatttaaccaagttccaacaaaagaatgctgccgcaggtaatctttaatagcttgagatagaaatggagagaaagtattgtcactctatccaggctgggacattttatttttgttctgaatacttaactcaaggtcaggatccatgtaataaataaattagccttatttgaaaaaaaaaaa

SEQ ID NO: 497879 - DNA, 407 bp, Homo sapiens
gacgttgtattttgcccctcccttgttatgacctcagacattaaaatgtcagtctctatcaagacatcgtaccaaagtcgatacaccattactgtagatgggcaaacagttgtgctagttctggcaaggtgcagtggctcacgcctgtaatcctagcactatggaaggctgaggtgggcagatcgcttgagcccaggagttcaggaccagcctgggcaacatggtgaaacgcatctctacaaaaattacaaaaattagccaggcgtggtggcaagtgcttatagtcctagctactcaggaggctgaggtgggagtatcacctgagcctgggaggttgaggctgcggtgagccatgattgtgccactgcaccccagcctgggtgacagagtgagactgtctcaaaaaa

SEQ ID NO: 497880 - DNA, 865 bp, Homo sapiens
ctaaaaggcaaaatgggaaaggaaaagaactcatatcaacagttgtcgtcgatggacacgctagattcgggcaagtccaccgactactggccatctgatctataatatgcggcggcatcgacaaaagaaccattgaaaaattcgagaaggaggctgctgaggatgggaagagggctccttcaagtatgcctgggtcttggtataaagctgagatagctgatgcgtgatacgtggcttactcgaccagtgtgatagtctcctttgtggcaaagtttgaaattcagtcaagtactatgtgactatcattgagtgccccaggacacagaggacgttctagttcaaaacacacggatggattacagggacgatctcagggctgactgtgctgtgctgatggttgctgctggctgttggttgaatttgaagctggtatctccaagaatgggcagacccgagagcatgcccttctggtcttgacacactgggtgttgaatagatagtaattgtcggtgttcaacagaagatggattcctactgtaggccacccttacagtccagacagcagatatgcaggaagatggttaagggagagtcaggcgcttacatttaagtaaagattgggtactagcccgacacagaagcatttgtgccgaatttctggtgggaatggtgacaagtgctggagccaagtgctatcatgaccagggttccaacgggagtggaacagtcaccccgtatgggatggcgaaaagcgagtggaacccaccgctgatgtgagggctctggactggatgctagcaccaactcgtccagctgaacgaggcccttgacgctggctctccaggatggtacaacgtgggggaag

SEQ ID NO: 497881 - DNA, 923 bp, Homo sapiens
  misc_feature (156)..(156): n is a, c, g, or t
ttttttttttaatttaaaaatcttaagttttttttagtaagcttaagatgtccagtagtttattggcagacagcatttttaaaaagtgaatagatgtttaactgaagttaaatacaaatttatgtctgtgtaccctctgggtaagatataacaaanactagaacatctaaacttttccttgggacaattctctctacttcttcaacaagtctggtcgggcaggtacaaacatggtggtgactttaccttcgggttaatagttctatagtcacagaagaaagtccagcgaagtttactggatctcagcttgcactccagaataggggatttagttccacttgggttattttcacttctaccctaaattcatagtccctgatacttaagctttaccctgtggcttaccagttttcatggcagcgagtaactggcggagtagcagagccttgggttactgtacaattggacaaaaagtatgtccttttctagcaggagcagataaatgataatggtcttagaactgtcgcaccctgctttttcgggaacggatgacctgcttagatggtgacaatgatggtccttttcccacccaagttgtgcgcctaccttttattaacagggcgaacaacccaagggcgatggtgcccgaataaagggagaactacgcgggcagaaatccgtgggaagggacgcttaagggacatggccgcggaattcgggggagaatattgggctcggcccgttggaagtgcctctccacacagaatttagccggctttcaaacaacacccgctttgtgagttcccccggagagacgggatcgtacacacgtggcgcgccggaacaagaggtagtctcccgactgtttggccgaccaaaggagaaaacaccacaccatcctcgtttcttcgttccatgaaaga

SEQ ID NO: 497882 - DNA, 233 bp, Homo sapiens
attcgcggccgcgtcgaccccaggtcatactaatggaagaggtgggtgtgagacatggggacaaaggggatcatttcggaattttaaggttaatgactgccctattggattttggacttgaatggggccggtagcccctttgttttggccaatttctcccatttggaatggttccaaagtttgtatccccatgtcgacgcggccgcgaatttatttatagaagtctaacccgg

SEQ ID NO: 497883 - DNA, 896 bp, Homo sapiens
gggaggcgctcggcacgaggccgtgctccgccgggaagatggggaaagtgagggggttgcgcgcccgagtgcaccaggctgccgtgaggccgaaaggggaggccgcccccggccccggccccctgccccggaggcgaccctccgccggcctcggccgggggaaggactgggcgttcatcaacaccaacatctttgccaggaccaagatagaccccagcgccttggtgcagaagctggagctggacgtgaggagtgtcacttccgtcaggagaggtgaggcaggctcgagtgcacggagcgtcccttccatcaggagaggtgcagaggccaagaccgttttgcccaagaaggagaaaatgaagctgaggcgtgagcaatggttgcagaaaatcgaagccataaaactggctgagcagaagcacagggaggagcggaggcggagggccacggtggtggtgggggacctgcaccctctcagggatgccctgcccgagctgctggggctcgaggctggcagccggcgccaagcccgcagcagggagagcaacaagccccggccctcagagctcagccggatgagcgcagcccagagacagcagcttctcgaggaagaaaggacccggtttcaggagctgctggccagtccggcctacagagccagccccctggtggccatcgggcagacgctggcccggcagatgcagctggaagatggcggcagctctgaccagggcagcgggcatgccacaaatcctcaggacacatgtgggccaagtagagagcgccggcccctcaaggaccatggcctgagcctggtggacgcccttccctctggtcggttgtggggctcaataaatggctctgtgaacttcccctgcactgccagggccgttccc

SEQ ID NO: 497884 - DNA, 1037 bp, Homo sapiens
gggtcagatggacgcggttgtggtggtcgcggaccggagcttgcgcggggggtccggtcccagtatagctttcatccgcatgccggtctagctcgcgagttccttcatgtgtgatccggggtttgcatcttggtagacgaggtaccataatcatacgtcggaacctaggtaacgtcactgtgtgagcggggaaccgtgcatgctgctcggtacgatcccagtatcgagggacggagtggtgatgtgcctggagacactggcgtgggagtccgtacggtcctccttgtgcctcggttatacccgagatacagtcgtcttcgcgagttattagcgacgatcaaacagacaggataactcatggatgttgctgctcctctgtgacgatctagcgcctggattgtccgagggtattagaccgccaaagttccatggcgtcctatgaatggatgaatgtcggatgcatggaaccgttcgtggggaagcaatggaccactcaggtctactagctctccttatgaagctaaattcgacctcttgatggagctggccccagcgggcacaaaggttccagcgccggccggcatctgcaacgatgaaacacactcttgattcgaaactagggcactgcgtgcgatcatgtacggccatattgattggatgggatgaagaagcttttcgctgcaagtttaccgtggggagcatgccttggagtggtagtcgctactgtaacggccaccgtttacgagtgggcccacttgtgtcaataggctagtcgtaaccttgggactcctggactacctggactggcccatgaaagtgttctgcgcagggaaacgccagagctggtggctcaaaggccaggaacccgtagggtacaccccgagttttgggttgggaaacggctggcattggcctagttggctgttcgctagaccggagtattgcctcggtatcgaaaaggaaggcgggtctttccaaaaacgtacgcttagggggagcggaacaaacaggtggtttgaaccttaagaaatgaacca

SEQ ID NO: 497885 - DNA, 851 bp, Homo sapiens
gggaggcgctcggcacgaggccgtgctccgccgggaagatggggaaagtgagggggttgcgcgcccgagtgcaccaggctgccgtgaggccgaaaggggaggccgcccccggccccggccccctgccccggaggcgaccctccgccggcctcggccgggggaaggactgggcgttcatcaacaccaacatctttgccaggaccaagatagaccccagcgccttggtgcagaagctggagctggacgtgaggagtgtcacttccgtcaggagaggtgcagaggccaagaccgttttgcccaagaaggagaaaatgaagctgaggcgtgagcaatggttgcagaaaatcgaagccataaaactggctgagcagaagcacagggaggagcggaggcggagggccacggtggtggtgggggacctgcaccctctcagggatgccctgcccgagctgctggggctcgaggctggcagccggcgccaagcccgcagcagggagagcaacaagccccggccctcagagctcagccggatgagcgcagcccagagacagcagcttctcgaggaagaaaggacccggtttcaggagctgctggccagtccggcctacagagccagccccctggtggccatcgggcagacgctggcccggcagatgcagctggaagatggcggcagctctgaccagggcagcgggcatgccacaaatcctcaggacacatgtgggccaagtagagagcgccggcccctcaaggaccatggcctgagcctggtggacgcccttccctctggtcggttgtggggctcaataaatggctctgtgaacttcccctgcactgccagggccgttccc

SEQ ID NO: 497886 - DNA, 782 bp, Homo sapiens
gggaggcgctcggcacgaggccgtgctccgccgggaagatggggaaagtgagggggttgcgcgcccgagtgcaccaggctgccgtgaggccgaaaggggaggccgcccccggccccggccccctgccccggaggcgaccctccgccggcctcggccgggggaaggactgggcgttcatcaacaccaacatctttgccaggaccaagatagaccccagcgccttggtgcagaagctggagctggacgtgaggagtgtcacttccgtcaggagaggtgcagaggccaagaccgttttgcccaagaaggagaaaatgaagctgaggcgtgagcaatggttgcagaaaatcgaagccataaaactggctgagcagaagcacagggaggagcggaggcggagggccacggtggtggtgggggacctgcaccctctcagggatgccctgcccgagctgctggggctcgaggctggcagccggcgccaagcccgcagcgaggaagaaaggacccggtttcaggagctgctggccagtccggcctacagagccagccccctggtggccatcgggcagacgctggcccggcagatgcagctggaagatggcggcagctctgaccagggcagcgggcatgccacaaatcctcaggacacatgtgggccaagtagagagcgccggcccctcaaggaccatggcctgagcctggtggacgcccttccctctggtcggttgtggggctcaataaatggctctgtgaacttcccctgcactgccagggccgttccc

SEQ ID NO: 497887 - DNA, 303 bp, Homo sapiens
  misc_feature (25)..(25): n is a, c, g, or t
  misc_feature (68)..(68): n is a, c, g, or t
  misc_feature (75)..(75): n is a, c, g, or t
  misc_feature (81)..(81): n is a, c, g, or t
  misc_feature (97)..(97): n is a, c, g, or t
  misc_feature (172)..(172): n is a, c, g, or t
  misc_feature (215)..(215): n is a, c, g, or t
agatcattgtctttgatgttcaggntgggtcatttaaaatagagatgcaatcaggaaggttggggganttgggantgtggntgaattgagaccttgntgatgtattcatgtcagcacttgagtcacagcccaggtgcccggaagcagcctttttgcataggcagtgatttgngattactttaaagctcaccttttttcttcccctctctgtttgntgctgtcagcataatgattgtgttccttccctatgggatccatttgttttgtaaacaataaagcgtttgagggagtgtaaaaaaaaaa

SEQ ID NO: 497888 - DNA, 310 bp, Homo sapiens
attgaaacccagttttcatttagttgctaaggcttttaatacattttgaagggcccccaaacaaaataagtcaaaatggccagtccttttttttggaggaaaaatttgaacaagggtctccaatgtgttgtgttttgtcatgacccttcatttttttcccttgtaattagagcctgctacgggtttatggaactgaaagctccccaggggggcaataaaccgagaaatcatgaaaaatgtttaatcccatgggaaaacctgtatgccgtttttccccaacccctctcccaaaataaaaatttccaatgta

SEQ ID NO: 497889 - DNA, 102 bp, Homo sapiens
gcttacggagaagaaggaagttgtggaagagtgagaaaatggaagagacgcccctgtaacgggaatgctaatgaggaaaactggggagcaggagtgtgacaa

SEQ ID NO: 497890 - DNA, 780 bp, Homo sapiens
gagtggttgcggcgggtttcggttactgaggtggcagactctgtctggccggcccttggcactcgccaggattgggggcttcactcactcgtggctttccgaaggctgctgctcctgtacgacacagtggagaccatgggaaaagactatagtcatcagaccttctagattctatgacacgggcgtcacacgaagtatattgagattctacattgcatgactgggattccagtagcaattttcataactctggtgaatgtattcataggtcaagctgaatctagacagaacttccagcaggctatgtaccagaacacctgggaactattataagcatcccatatcacgctggattgcaccgtaattttctatgatagtcctgaacgatatatgacagagcatatggacgtcctacagattgaagctgcaaaggctgaacttacgggtaccggagcgaccgtgcgaaaattgatgcatgtgcagaggagatcggacccaggagcacataccatgaggaccaacttgacaagctaaccccgatagagaccaagcatccgaaacagcaaatcccgggaccaatacggcatttaaacccccgactacacgtgactcaccaacaacggacaaccaaatacccaactataatctggaaaaggcaaacgagcacacgcacgagcacggcataggcacaaagagaggaccgatagagagcagagagaaagcccacaccaaacaggcaacgacacaaaagaacaacaggcacccacgcacaccagccgc

SEQ ID NO: 497891 - DNA, 104 bp, Homo sapiens
actctcaggatcttttttaacaggtctcactcccatcaactcagtattttgttagtagtttgtttgtttgtttgtttgtatttagtagatatagaagagtgcag

SEQ ID NO: 497892 - DNA, 362 bp, Homo sapiens
  misc_feature (208)..(208): n is a, c, g, or t
gatgcatgtgcggcaggaaacgtgtgcattccctgctctccgttttctcctgcagaactgcttgggggagtcctggtgacaatctgaagagcgcatccccactgcctggtgtgggtttccatctttactggccttggaggcaagccccatctccagggccagtttctatccttggggtctcattgtcagaattactttctcactcggnccctcccgcatgtcccgctttcctgctgtaattctcttcctagcacttatttctaacatactatgtattttacttactcatttggtttgctttcttcttcattagaatataaactctacaaagacagctatcttcatggttctcttcgtgtggt

SEQ ID NO: 497893 - DNA, 262 bp, Homo sapiens
acttctagaggatcagtaggtagacctaacataaccagagtcatctggggaaaagttactcgggcccactggaaacagtggcatggttctgtgccatagttcagaactcttcttcctgctaaggccattggacacagaatccgagtgatgctgtacccctcaaggatttaaactaacgaaaaatcaataaataaatgtggatttgtgctcttgtatttttaagtggattaaaaaacttactacctgggttaggtctacctgg

SEQ ID NO: 497894 - DNA, 263 bp, Homo sapiens
tgggcacagtggctcatgccgataatcccagcaattcagaaagctgaggcaggaggattacttgaggccagactgggcaatatagcaagaccccatctctaaaaaattaggcatggtggtgcatgcctgtattcccagctactcaggaggttgaggtggaaggatcacttgagcccagaagttcaaggctgcaatgagccatgattacaccacggcactacaaccttggtggcacagtgagaacctgactcttaaaaaaaaaa

SEQ ID NO: 497895 - DNA, 146 bp, Homo sapiens
atacgtgcaagatctccagagtgagaacagaaccatggtactattatgagtcaccaaagggctttgtgcttcaactcactaatggctggaacaagtgccagtcttggtcagccatccatgatattcatcacatgaactcacaatct

SEQ ID NO: 497896 - DNA, 1675 bp, Homo sapiens
ttccttacaacagcttgaaaatcattattattaaactccttaaatcactgtgtctagatcattttctacattgtgtgccatagacttacccatgggacaacagagctccttacattattaggaccaactcactgtcaatcatttttgttttcagtgcaacacacatggcaagtgtgccgggggtaaatcatggcccagtcacaacacattcatcatcacaagcgcagtacaaataactcatagctagtcagattgcatagacattggatatatagtacgcataagcacgtgtaagtgaccattatgataatggagatattcatatacagacacctatgtagtcatgaccccataggcagaccagacagtacggcccctagacccgtttaggtgatagaggacatcacgacgtaccaggtaggacatgaaacttacaccgtgaaaacaggaaacaaccaacagtgaatgagattgctggcaatagggggccatcaaacaagcacataccatacggcgactgaaagcgaaaatgacaaacaaatagataacaaagtgtgaaaaatgcaacaactgcgacaaagagtgcaatggatgactgagtgagaaaacaaccacgccaacagagataacaaggcacaagcctccgaaagtcccagggcatacaccggtcagcaccagagtgcgacgcagatgcaagaagggagcacgaataacgacaggggaacaccgaacaaagagacccagcaaaacagagagagtagccacaaaagaacgagcagacgagacgatcggtgccctgggggacaagacaaaaacacgaatgggcgggcaatgagaggacacgcgcgccagccagcgtgggacgcccacaacgccaaggagcaagataacgcgcggcgagggacacaacagaacagaggccacctaagagcaatggaggacaggaaggaaacggggcagttgacacccacacaacgggcaacagggagatgagacaccttgcccccggcactgaagccaccacacaaaaggccacaaaccagacatcagagagcgagtgcataaagaggccagaacactgagaaagagccacgcagaccacagcggcaggcatagcaaacagagaaaggggcgcccagccagacagggacaacgacgagcggggggcgccaagcgacaagcgaggctaaagggcacaagccatgccggcgagcagacatcggcgcgcgtgccgcggactggctgtggtcgacgccatgacagacacaacggcgccacggggcagcaaaggaacggagaagcacgcagaaaaacgagagcaggcgaggcgcggcgggccgaccggacgccgagcacgggcagacgggcaggaggagagcagacaagagagagacgccgacggggggcgggagacgggagaggagggcgaggcgcggcaaggggaggcgggaggaggggcggcgagtgagaaaggaagggagggagagcaggaggggcagcaggaggcgcgcgcagctagcgcggcggaaggcaggcgggcggagaggcggcaggggagagggaaaccgagggcgagggggagcacgagcgacggggggaggaggagggaggagggcgggggagcggagggaggggaggaggcggagcgggcgggaggagaggggggaggggggct

SEQ ID NO: 497897 - DNA, 1603 bp, Homo sapiens
atggggtgccagcttcacttctttgataaccacctctgagaccccgtcacacagtactcccagcttcacttcttcaatcagcaccactgagaccacatcccacagtactcccagcttcacttcttcgatcaccaccactgagaccacctcacacagtactcccagcttcacttcttcgatcaccaccaccgagaccacctcacacagtactcccagcttcacttcttcgatcaccaccaccgagaccacctcacacagtactcccagcttcacttcttcgatcaccaccaccgagaccacatcccacagtactcccagcttcacttcttcgatcaccaccaccgagaccacctcacacagtactcccagcttcacttcttcaatcaccaccactgagaccacctcacacagtactcccagcttcacttcttcgatcaccaccaccgagaccacctcacacagtactcccagcctcagttcttcaaccatctactccacagtcagcacatccacaactgccatcacctcacattttactacctcagagactgcggtgactcccacacctgtaaccccatcttctctgagtacagacatcccgaccacatccctaagaactctcaccccattatctttgaacaccagcacttcattgactacaaccacagactttccctctatacccactgatatcagtaccttaccaactcgaacacacatcatttcatcttctccctccatccaaagtacagaaacctcatcccttgtgggcaccacctctcccaccatgtccactgtgagaatgaccctcagaattactgagaacaccccaatcagttcctttagcacaagtattgttgttatacctgaaacccaacaacacagacccctcctgtactgacgtcagccactgggacccaaacatctcctgcacctactactgtcacctttggaagtacggattcctccacgtccactcttcatactcttactccatcaacagccttgagcacgatcgtgtcaacatcacaggttcctattcctagcacacattcctccacccttcaaacaactccttctactccctcattgcaaacttcactcacatctacaagtgagttcactacagaatctttcactaggggaagtacgtctacaaatgcaatcttgacttcttttagtaccatcatctggtcctcaacacccactattatcatgtcctcttctccatcttctgccagcataactccagtgttctccactaccattcattctgttccttcttcaccatacattttcagtacagaaaatgtgggctccgcttctatcacaggctttcctagtctctcttcctctgcaactaccagcacttcttcaaccagctcctctctgaccacagctctcactgaaataacccccttttcttatatttcccttccctccaccacaccctgtccaggaactataacaattaccatagtccctgcctctcccactgatccatgtgttgaaatggatcccagcactgaagctacttctcctcccaccacctcacacagtactccagctacactacctcaatcaccagcaccagacgggacct

SEQ ID NO: 497898 - DNA, 3214 bp, Homo sapiens
atggggtgccagcttcacttctttgataaccacctctgagaccccgtcacacagtactcccagcttcacttcttcaatcagcaccactgagaccacatcccacagtactcccagcttcacttcttcgatcaccaccactgagaccacctcacacagtactcccagcttcacttcttcgatcaccaccaccgagaccacctcacacagtactcccagcttcacttcttcgatcaccaccaccgagaccacctcacacagtactcccagcttcacttcttcgatcaccaccaccgagaccacatcccacagtactcccagcttcacttcttcgatcaccaccaccgagaccacctcacacagtactcccagcttcacttcttcaatcaccaccactgagaccacctcacacagtactcccagcttcacttcttcgatcaccaccaccgagaccacctcacacagtactcccagcctcagttcttcaaccatctactccacagtcagcacatccacaactgccatcacctcacattttactacctcagagactgcggtgactcccacacctgtaaccccatcttctctgagtacagacatcccgaccacatccctaagaactctcaccccattatctttgaacaccagcacttcattgactacaaccacagactttccctctatacccactgatatcagtaccttaccaactcgaacacacatcatttcatcttctccctccatccaaagtacagaaacctcatcccttgtgggcaccacctctcccaccatgtccactgtgagaatgaccctcagaattactgagaacaccccaatcagttcctttagcacaagtattgttgttatacctgaaacccaacaacacagacccctcctgtactgacgtcagccactgggacccaaacatctcctgcacctactactgtcacctttggaagtacggattcctccacgtccactcttcatactcttactccatcaacagccttgagcacgatcgtgtcaacatcacaggttcctattcctagcacacattcctccacccttcaaacaactccttctactccctcattgcaaacttcactcacatctacaagtgagttcactacagaatctttcactaggggaagtacgtctacaaatgcaatcttgacttcttttagtaccatcatctggtcctcaacacccactattatcatgtcctcttctccatcttctgccagcataactccagtgttctccactaccattcattctgttccttcttcaccatacattttcagtacagaaaatgtgggctccgcttctatcacaggctttcctagtctctcttcctctgcaactaccagcacttcttcaaccagctcctctctgaccacagctctcactgaaataacccccttttcttatatttcccttccctccaccacaccctgtccaggaactataacaattaccatagtccctgcctctcccactgatccatgtgttgaaatggatcccagcactgaagctacttctcctcccaccaccccattaacagtctttccctttactaccgaaatggtcacctgtcctacctccatcagtatccaaactactcttactacatatatggacacttcttccatgatgccagaaagtgagtccagcatctcacccaatgcttccagttccactggcactgggactgtacccacaaacacagttttcacaagtactcgactgcccaccagtgagacctggctgagcaacagttctgtgatccccctacctcttcctggcgtctctaccatcccgctcaccatgaaaccaagcagtagcctcccgaccatcctgaggacttcaagcaagtcaacacacccatccccacccaccactaggacttcagagacaccagtggccactacccagactcctaccacccttacatcacgcaggacaactcgcatcacttctcagatgaccacacagtccacgttgaccaccactgcaggcacctgtgacaatggtggcacctgggaacagggccagtgtgcttgccttccggggttttctggggaccgctgtcagctccagaccagatgccagaatgggggtcagtgggatggcctcaaatgccagtgccccagcaccttctatggttccagttgtgagtttgctgtggaacaggtggatctagatgtagtggagaccgaggtgggcatggaagtgtctgtggatcagcagttctcgccggacctcaatgacaacacttcccaggcctacagggatttcaacaagaccttctggaatcagatgcagaagatttttgcagacatgcagggcttcaccttcaagggtgtggagatcctgtccctgaggaatggcagcatcgtggtggactacctggtcctgctggagatgcccttcagcccccagctggagagcgagtatgagcaggtgaagaccacgctgaaggaggggctgcagaacgccagccaggatgtgaacagctgccaggactcccagaccctgtgttttaagcctgactccatcaaggtgaacaacaacagcaagacagagctgaccccggcagccatctgccgccgcgccgctcccacgggctatgaagagttctacttccccttggtggaggccacccggctccgctgtgtcaccaaatgcacgtcgggggtggacaacgccatcgactgtcaccagggccagtgcgttctggagacgagcggtcccacgtgtcgctgctactccaccgacacgcactggttctctggcccgcgctgcgaggtggccgtccactggagggcgctggtcgggggcctgacggccggcgccgcgctgctggtgctgctgctgctggcgctgggcgtccgggcggtgcgctccggatggtggggcggccagcgccgaggccggtcctgggaccaggacaggaaatggttcgagacctgggatgaggaagtcgtgggcactttttcaaactggggtttcgaggacgacggaacagacaaggatacaaatttctatgtggccttggagaacgtggacaccactatgaaggtgaggggctaaagagggggaccccaaggaactctcccagcctccattccagaatccctccccgacccccaaccagggcagggagggggctgggctcggatcggcagtgacctccctgtcagccctaccagtggct

SEQ ID NO: 497899 - DNA, 626 bp, Homo sapiens
atggggtgccagcttcacttctttgataaccacctctgagaccccgtcacacagtactcccagcttcacttcttcaatcagcaccactgagaccacatcccacagtactcccagcttcacttcttcgatcaccaccactgagaccacctcacacagtactcccagcttcacttcttcgatcaccaccaccgagaccacctcacacagtactcccagcttcacttcttcgatcaccaccaccgagaccacctcacacagtactcccagcttcacttcttcgatcaccaccaccgagaccacatcccacagtactcccagcttcacttcttcgatcaccaccaccgagaccccctcaagcagtactcccagcttcacttcttcgatcaccaccaccgactcgatcgtcaccaccgagaccacatcccacagtactcccagcttcacttcttcaatcagcaccactgagaccacatcccacagtactcccagcttcacttcttcgatcaccatcactgagaccacctcacacagtactcccagctacactacctcaatcaccaccaccgagctacctcacaccttcctcccaacttcacgtctttgatcaccgcctcccagaaagattg

SEQ ID NO: 497900 - DNA, 518 bp, Homo sapiens
  misc_feature (455)..(455): n is a, c, g, or t
  misc_feature (465)..(465): n is a, c, g, or t
atggggtgccagcttcacttctttgataaccacctctgagaccccgtcacacagtactcccagcttcacttcttcaatcagcaccactgagaccacatcccacagtactcccagcttcacttcttcgatcaccaccactgagaccacctcacacagtactcccagcttcacttcttcgatcaccaccaccgagaccacctcacacagtactcccagcttcacttcttcgatcaccaccaccgagaccacctcacacagtactcccagcttcacttcttcgatcaccaccaccgagaccacatcccacagtactcccagcttcacttcttcgatcaccaccaccgagaccacctcacacagtactcccagcttcacttcttcggatcaccaccaccgagaccacctcacacagtactcccagcttcacttctttgatcaccacctctgagaccccntcacacagtnctcccagcttcacttcttcgatacctccacagcccccagaagcaggtttcgtt

SEQ ID NO: 497901 - DNA, 178 bp, Homo sapiens
ggtatgcgagctcaaattcatcgacatgctgtctgcttcgtagggaggctggaggaagattcatcccaccggcaagatatgtttattctttcagatggagaaggaaaaatatggaaccagtcgaattgatggagagccccttggatgaatgaaatctctgtgaatagtggcaagtggt

SEQ ID NO: 497902 - DNA, 434 bp, Homo sapiens
  misc_feature (13)..(14): n is a, c, g, or t
  misc_feature (18)..(18): n is a, c, g, or t
  misc_feature (434)..(434): n is a, c, g, or t
ccattatggccgnnggcngatgctttgtgcctgtttttccagcactttgtcaaacagaggggggtcgaaaccgatgtcaggacttcatgaccatcctggttagcacagcgataccctgtgtctacgcctacagaacattatcctcgcgcgtggcggctgcttgtacgcccacggtaccggattgctgtgcggtcgatttgccaacccctcggaggctgcccttgctgcagcacgattccgccagactgactgcaggctgctcgacagtacagactgttctctatgtggagttttacacatacctctctctaggttgctatctggaccactgatagtgcgtgtctggcccacagaagcacatgttttcgggaggctgctggatcgaggatagattgatactagaagcctcaggatgtacggccttggtgggcccn

SEQ ID NO: 497903 - DNA, 398 bp, Homo sapiens
  misc_feature (342)..(342): n is a, c, g, or t
  misc_feature (345)..(345): n is a, c, g, or t
  misc_feature (353)..(353): n is a, c, g, or t
  misc_feature (358)..(358): n is a, c, g, or t
  misc_feature (360)..(361): n is a, c, g, or t
atggggtgccagcttcacttctttgataaccacctctgagaccccgtcacacagtactcccagcttcacttcttcaatcagcaccactgagaccacatcccacagtactcccagcttcacttcttcgatcaccaccactgagaccacctcacacagtactcccagcttcacttcttcgatcaccaccaccgagaccacctcacacagtactcccagcttcacttcttcgatcaccaccaccgagaccacctcacacagtactcccagcttcacttcttcgatcaccaccaccgagaccacatcccacagtactcccagcttcacttcttcgatcatgatcancancaccgagnccacntnncacagtactaatgagtgtgaacggtgatcctctagag

SEQ ID NO: 497904 - DNA, 350 bp, Homo sapiens
ccgagtagctcggattacagacacacaccaccatgcccaactaatttttgtatttttagtagagatggggtttcaccatgttggccaggctgatgtcgaactcctgaccttaagtgatccacccatctcggcctcccagagtgctgggattacaggcgtgagccaccgcacctggtctgttttttgttttatgagatggggtctcactccagcctggatgtcagaatgagactccatctcaaaaaaaatggggaaggaaggattaatttttcatttcaaatttagttcctcggccacactgcccatagttcaggggctcagtacccacatatggctggggactgccatat

SEQ ID NO: 497905 - DNA, 364 bp, Homo sapiens
  misc_feature (209)..(209): n is a, c, g, or t
  misc_feature (230)..(230): n is a, c, g, or t
ttctccccggagccgtgtcatgggctgggtaggcatttatcagccccgtcttggtgggggtggggcccccccccccctccaaacaaagcaacaacaggtagggggccagaaggtttttgggccttacgcctgagcagtggaggtcccccagaagtttcagttgccgggtcaggcattaagggggccccgtggagaaaaaggggcccctnaaaaattgtttttgggttttnacccctccccccccccccggggggattaggggggggggatcccggggggggggtttttcctccccccccaggggatcaagcccttttcccggccctcaataaccccccaataaattttttctttgtcaatcaga

SEQ ID NO: 497906 - DNA, 280 bp, Homo sapiens
gggttttttttgggtttaaaatgcccggcctcccaccccggggggggggggcccccttggttttttttttggggggcggggttttttgggaggggtttccccccccccgggggtttaaggggggccccccctgggccccaaaaattttttttggccaaaatttgggggggtttttttgggcccccaaaaacgggggggaaagggcccttgggggtaaactccggcccttaaaagggggtttttggggggggggggccccccaaggggtttttttcccgga

SEQ ID NO: 497907 - DNA, 655 bp, Homo sapiens
atggggtgccagcttcacttctttgataaccacctctgagaccccgtcacacagtactcccagcttcacttcttcaatcagcaccactgagaccacatcccacagtactcccagcttcacttcttcgatcaccaccactgagaccacctcacacagtactcccagcttcacttcttcgatcaccaccaccgagaccacctcacacagtactcccagcttcacttcttcgatcaccaccaccgagaccacctcacacagtactcccagcttcacttctccaccaccgagaccacctcacacagtactcccagcttcacttcttcaatcaccaccactgagaccacctcacatggagacaacctcacggagttctcccagcttcacttctttgatcaccatcactgggtccacatcccacagtactcccagcttcacttcttcgatcaccatcactgagaccacctcacacagtactcccagcatcacttcttcagtcaccactgccgagaggacatcccacagcactcccagctacgctttttcgattgccaccagtgagacaccctcacacactgttcccagcttcacttctttgatcaccaccaccgagagcacatcccacagtcgtcccactaacttggcgtccttaatcacc

SEQ ID NO: 497908 - DNA, 168 bp, Homo sapiens
gagatcgtgccttggcaccccagccggggcaataaaagtgagactgtcccaaaaacaaaacaaacaggcggggcatggtggctcacgcctgtgatcccagtagttggggaggccgaggcaggcggatggcctgaggtcaggagttcgagaccagccgggccgaggggg

SEQ ID NO: 497909 - DNA, 456 bp, Homo sapiens
  misc_feature (456)..(456): n is a, c, g, or t
aaaggactttatatcagcaggactttagggctgtggttccactgtttttatagtaaaatacactaatggaggggtagaggttggtgaacgaggtggaaacattcgatacaaggcaacatgacagacagggggaccctaactagactttaaggaattaattctatacagacggggggagccctacataattaagggtcacacttataaaaatatgactctgaattcagggataagaggcataagcctgtagatacaactccatctggagatactaactttaaattgaaagaagacaaacactcattgcatttatattacgtgttgaggtccttacatattcctaaatccatctactaattctctgttgtgatacaatggacagctatggtaagatgattaccacagccctgattcatgtgtggtctttagctgcagaaagtccatcggtcatgtagn

SEQ ID NO: 497910 - DNA, 447 bp, Homo sapiens
acgcaaagtaattctctttacaataatcaagtagcacactatgttgtttatatccagacctatgtattcttaccactgtcgaacagaaacaacacccatgtctgacaaccctccaaagtaaacaaatcacaccattatttggtttgcacttgagtttctgatacagctatcacctttattcagtgaagataaatagtctacctgcagaaggaatccatgttgaatcgtaaagaacttagaatagagcaactgcacagcccaggttagcatttccaactctcatgtattattctttgtatgttgtgttttttttagtttgagttatgttaatgagacagctggaattacaggtgtgcaccaaccatgcccggctaatttttgtatttgtagtagagatgggatttcaccatgtcggccaggctgttatcacactcctaacctcaagtg

SEQ ID NO: 497911 - DNA, 180 bp, Homo sapiens
gagtcctcattaccgccaatgcaacagtagccccagtaaagcagagaactgaagtgcagccatcatggtggacagcactcatgagatacgctgagtgactggcggtgctcgaaccatttggatgcaaatgtcgatgcttaagaaaaccggccacttcatgcaacagcccttttccccagg

SEQ ID NO: 497912 - DNA, 263 bp, Homo sapiens
gatcgagagactctgatcatagcttagcacgaacttcagaatacggacatagtcttcataacacttcacagaactggaatccctgtgtcctaaaagcaggctaaactgatgggttctagcggatctacatcactcagctactgaaactagtgtgcctcaaacgttacagggcagaactcacgaggctgggcaggatggggtaaagagcacagctacattactctctagttgcatctggcacaaggaggcccacgcataacgag

SEQ ID NO: 497913 - DNA, 583 bp, Homo sapiens
  misc_feature (132)..(132): n is a, c, g, or t
aggaagaaagactgaagcctgctcacatacctggacagatgttgcaaaccgttgtctgctatgtgagcccaacagactttgtcccagaacactgtatattcttcaagcccactgaattcccctgaaaatcanttactagccccctgaaattacccacacttccccattgctcatctgtaccccatttcgtggtggggcagtcactctgatttccccttgcatgctaatgaatgtgtattccatttctattctgcttttatgagctgacttttcagtgaaccttcagagggtaaaggggaagttttcccttggcccctgcaccgcagttggtaaggtccaaaatgttaaatggaaaattccagaaatagctggtcgtgatggctcctgcctgtaatcccagcactttgggaggccgaggtaggtggatagcttgaggtcaggagttcgagaccagcctggccaacatggtgaaacctgtctgtactaaaagtaccaaattactgggcgtgtgcgcacgcctgtagtcctgctacttgggagctgaggcaggagaatcacttgacctgggagcagagttcagtga

SEQ ID NO: 497914 - DNA, 234 bp, Homo sapiens
atgaagacggaggagctgctgaaacaggtggacgacctgaatgtggacgctgtcccagctgcacgtcgccaaagtgacatgtgcggtgcggcctccaagctctctaagatccgagtctgtccggaaatccatagcccgtgtactcacagatattaaccagactcagaaagaacacctcaggaaattctacaagggcaagaagtacaagcccctgagactatgcgaccaggcgta

SEQ ID NO: 497915 - DNA, 878 bp, Homo sapiens
  misc_feature (462)..(462): n is a, c, g, or t
agagagcgatgagcagaagaaattcctaaaagtcgatgtatttttggtacataagataataaacgagaaaaaagatccaccagagaaggttacaatccgacttcatgtgtccccataaaagtcgatgagaggggggttcaggaggaagccatatcagcgggggtgacctgggatgacagcccgcgaggtgctgtgctgcttcaccccgcaagacgtccgcgcttcgtacacggctaggagcttgctcggggtcgatctcgctgcgtcggtgttctccccctgcgtgccctctatttctgtctccctctgtggtggggtctcgtgcacgctgcaacgacggtcttctatgcagtcgccgcatctcgtggacctccagcgggggcctcgtcggtctcttttccgtgccttccacgtaggccttcatggggccatgtggggtcctgtgtcctggtcccggtgagntaactgcccgatcttcgcaactctggagcccacgggcatctggccctatgaaaacacgccctcgcgtcacgcaacactggactttgggcacacaaaccctcaggggaggacgtgcagaaccattcttgggttcgctaaccctgatcgcgcgtaaacctttaacctgctcgctgctcgtcctcccggttttgcacgcaagggcccccactggtgggtcggcctgagggagaacgggccaaagggtggtaaccccctttgtgttagagtaacaacctgggtaaaccccggcaaacgagtttgttatttacacaaacaaatttccttagcaattcgctggaatgttccgtggaaaattggttaacaatacctgtcctacttatggtgcccaacaatcctgcccccttccaactcgccca

SEQ ID NO: 497916 - DNA, 497 bp, Homo sapiens
accatccagttgcaggaaaaaaaacttaaaaagccgcacagatactacattatgcatcactacctaccggtcagactctccaggtccagaactttctccgagatcagcctccatcagaccaagctcatgactcacaatggcctatttaggcccattagcctacctcaaggcagtttcagcagatcaggctactggctcacaagagcctccacaggctcagctccacgcgttgcaatggcctctttaggaccgcagctcctgcctcccagccttctctccaggccctgaacttcctcaagtcgacctcaccaggcccagctcatgcttcttggcagactctccaggcccagctcctgcatcttggcagcctctccaggcccagcctctgcctcccgtcagcctctacagtcccaacatctgcctcacagcagattcttcaggcccagcatctgcctcactgtggaccacccaagccaagctccaaagcctgttaggcc

SEQ ID NO: 497917 - DNA, 146 bp, Homo sapiens
tatctgcactattggagcgccacttagcattcaccttacttcctctcatatctcttcacattctattctctgctatctagaatcgctgtcgccttatccagcctcgtttcacacttctagtaggctctacctgcacgccacacata

SEQ ID NO: 497918 - DNA, 463 bp, Homo sapiens
tatgtgcatcagccgccgaggtttgcagtgggtgcactttgctgattcctgatatagtgcccccagccagtacctgggtgttccccaccttggccatcatgcaccacaacaaacaggccactgagaatgccaaggcggaagtgcggcgcattctggggctgctggatgcttacttgaagacgaggacttttctggtgggcgaacgagtgacattggctgacatcacagttgtctgcaccctgttgtggctctataagcaggttctagagccttctttccgccagaactttcccaataccaaccgctggttcctcacctgcattaaccagccccagttccgggctgtcttgggcgaagtgacactgtgtgagaagctggcccagtttgctgctcaacagtttgcagagcaccaccctaaaacggacaaccacggcacgcgacgggtcacgggaagagacgcaga

SEQ ID NO: 497919 - DNA, 383 bp, Homo sapiens
  misc_feature (189)..(189): n is a, c, g, or t
aagaatcgtgtcatatttattttagaatggtttaaatcaaatacatttgggcacagtagatatttgacatgaaaagcagttgtatcagaatggtcatcagaaaaatagtaacattttacacataataactagaaaatattttctgtctgatcacttgagttagaaatcctgagaatgttactcattgancaattagaatctacctcataactgaaatttgctcagaaagaatcctcttaaaagatgctctgaaggccaggcagtggtggtgtacacctttaatcccagcatttgggagacagagccaggtggatctctgagttcaaggccagcctggtcaacagaacaagttccaggacagccagggccacaccagagaaacc

SEQ ID NO: 497920 - DNA, 100 bp, Homo sapiens
tgatccccatacagagtacagaccgtatatggtacattcacattgagagaaatgtaaacaaacgtaaagatgcacacggtactctgtatgggggatctcg

SEQ ID NO: 497921 - DNA, 410 bp, Homo sapiens
  misc_feature (10)..(10): n is a, c, g, or t
  misc_feature (151)..(152): n is a, c, g, or t
  misc_feature (156)..(156): n is a, c, g, or t
  misc_feature (158)..(158): n is a, c, g, or t
  misc_feature (161)..(161): n is a, c, g, or t
  misc_feature (167)..(167): n is a, c, g, or t
  misc_feature (179)..(179): n is a, c, g, or t
  misc_feature (193)..(193): n is a, c, g, or t
  misc_feature (197)..(197): n is a, c, g, or t
  misc_feature (216)..(216): n is a, c, g, or t
  misc_feature (219)..(219): n is a, c, g, or t
  misc_feature (229)..(229): n is a, c, g, or t
  misc_feature (237)..(237): n is a, c, g, or t
  misc_feature (239)..(239): n is a, c, g, or t
  misc_feature (245)..(245): n is a, c, g, or t
  misc_feature (258)..(258): n is a, c, g, or t
  misc_feature (272)..(272): n is a, c, g, or t
  misc_feature (282)..(282): n is a, c, g, or t
  misc_feature (294)..(295): n is a, c, g, or t
  misc_feature (309)..(309): n is a, c, g, or t
  misc_feature (316)..(316): n is a, c, g, or t
  misc_feature (325)..(325): n is a, c, g, or t
  misc_feature (332)..(332): n is a, c, g, or t
  misc_feature (371)..(371): n is a, c, g, or t
tgttggtttnggggcacagcctggtcccgggaggcccctggtgcacaggtggtggcccagggccacagtgctcgctcttgggggacgcgcggccgggggacgcggcctgtgtccggcccggggctcccggcgggctccggcggcagggacnntggngnggncgctcnccacttgaggangaccatcccggccngagnacggatgatagacccagcnccnggaagaggancttgagcngncggtcnctctactcctccngctcctatgagccnggctctaccnggaaggtgatgnngaggaaggtgccgnccgaccnggccctgcngcagcanggacgccacgctgcccggcacgccctgaggcgctctccnatgcccaggcccaggccgatgcccagggggatcatggcg

SEQ ID NO: 497922 - DNA, 138 bp, Homo sapiens
cttagtttaaccataccttactgatttaggtattactaaacatgcatcctaaggtacataaatccagcacagtgaaactgccatttccactgatgatagaaatggtgtctgtttctaaactgtttagtactcaagctt

SEQ ID NO: 497923 - DNA, 454 bp, Homo sapiens
caagcgcgttaatagtgcaatcttggaatctcccatagcccgatgaacagtagagctctctgctgtacgtagatagctatagaaatagtgtaacgctctacaagagcttttacgaaacaccagtccttggctaaggatgcccctctggggataacatctggctcgtgggctccatcggcctgtcgatgtcactccacttccggatcctctatgtcgaaccccagccactcatcttccagatcacaccgcttaacgtgacccagtggctgatggtgctgaaaatctccttgcccgtcattctcatggatgagacgctcaagtttgtggcccgcaactacctgaaacctggtagagatggtgtgcaggcggccatcaaatcctgctcgttctcggcatgcaccgatgggatttcctggccgattgtgctgcgcataatgcccctagtgatctgggt

SEQ ID NO: 497924 - DNA, 394 bp, Homo sapiens
  misc_feature (177)..(177): n is a, c, g, or t
cacgacctggcacatcctgtgggctggaggtggccggaatgggcgggcttgggaacgtgatgcccgggtaccgtgcctacaaggacgctgggtcatgactgttctctggaggctacgggtgccctgcagagtggaggcacgcggagggcctgggggggctggggatccagactgctngagcgcctgtttcccaccacaaacagcactgcggagtgccagccttgttctcgagggtggggcagcaccaccccaggcctcctgccaggccgcagggagccctgaggcagggcgtctgcccattctctcgtgccaacaccccgcactgcccaacatagacataagctggcccagggctactgaacagggccagggagggccggcaaagcctgcccct

SEQ ID NO: 497925 - DNA, 344 bp, Homo sapiens
  misc_feature (102)..(102): n is a, c, g, or t
  misc_feature (294)..(294): n is a, c, g, or t
tgagaaagagtctcgctccgtcaccaggctggagtgcaggggcgcaatctcggctcactgaaacctccacctcccgggttcaagccattctcctccctcagnctcccacgtagctgggactacaggcgcatgccaccacacccagctaattttttttgtatttttagtagagacggggtttcgccatgttggcctggctggcctctaactcgtagcctcaggtgatccgcccgccttggcctcccaaggtgctaggtttataggcgtgagccaactgtgcccagccaattaatnaactttttaaaacatgaaacgatttagtggagaaaagcggccggtttttt

SEQ ID NO: 497926 - DNA, 182 bp, Homo sapiens
cagtacctcgcattttatcaccccaacaggggtatgggatccctggctacaagaaggaggatcgcccatcaaatacaatcaaggatggcagatgtcgcctttgccagttaagccatcgagaaggtgagggagttcagtggtcagcactacagtccggcggaagccattacaggggggtggta

SEQ ID NO: 497927 - DNA, 153 bp, Homo sapiens
aaggagcgtgagcgaaccttggcactggaggaggagcagaaagcaggacaaaaagaagccggagtaggagggaacgggtaaaaggatgggctttgctcagctatttttgggccagatggggcctggcccgatagaataaaagacttttttacc

SEQ ID NO: 497928 - DNA, 209 bp, Homo sapiens
aagagatatccaggagagtcagagacccagaagggaacaggatccaggaggcctcatctcccagcactccagactgagccagccgggttatggaacatcactgagcaataaaaatattatcaacagacaaaaacagtttattgaataccaacctcaaaggcatcaacagtcctgggcccaagagatccatggcagggagtcacgagtac

SEQ ID NO: 497929 - DNA, 638 bp, Homo sapiens
gagtctggacttacgttcattgagttgtaaacctggtgctggctgtggtgttatgtggtgtctggggtacatcgcgtaccaaggaaatttgtgacattcctatgagaaacatagctagttgattctggggcacagtggcatcgacacttgtaatcctatcacttcggaggggttgaggtgggaggatcccggggatcccttccaggctaggagtttgaagccagcctggataatatagtgagatccccggctctacagaaaataaaaattagctgggcgtggtagtgcactcctggagtcaccagctactgggaggctgaggtgggaagatcacttgagcccaggagttggaaacaagcctgggcaacatggcaaaaccgccgatctctataaaaaatgcaaaaattagctaggcatagtggtgtgcaagctgtagtcccagctagcctggagggctgaggtgggaagatcgcctgagtctgggaggcagaggttgcagcgagctgagatcatgccactgaactctagcttgggcaacagagcaagaccctgtccccccaaaaacaaaagaatttatttcagctgtgcttaaaaagaatgagagcagagagggcagtttcccttgttgcatgttatct

SEQ ID NO: 497930 - DNA, 230 bp, Homo sapiens
taattcgcgtgcgggatctagagaatgcatcacgaacgcggtgaagctacatgcagattcgcgcgggatgacgaggttcagaaattgtcaggaatagggagtaaacagtggattcatgggtcggcaggagacacacgggccattgtaggtatactgccatctcccagtcatgtgtgcggagcgaagttcgccctatgactatatccggcaggctacaagtaggacggcgg

SEQ ID NO: 497931 - DNA, 820 bp, Homo sapiens
  misc_feature (476)..(476): n is a, c, g, or t
ggttcttgtcccggggatagcttgcttcacatgtctcggatcacctggtgttctccaggaaggacccatacgagtccagggtgaacgactttgtagtgcattcccagggctctattcgattcaagcctaggcctctccatcccacccgctcacggacttgatcgggcctcactggaacgccctgtggtaagtaggctcccgctctgggagctactaggctctcccatccgcttgctgctgcccttcgcagtgcctgtcattttcttctacggggcctctccccttcggtgctggctggtgggtgacgccgtgaacgggatcccttgctctttcatgggctactacgcgccatccatgttgccggtactccagggagcaggcagccacaccagcgggcctttgcaaccttgtcagagaaaacggcgtatcatgggcccgtcaccctgccgtgtctcccgaagcaggttcgagctcancatagggctcaaccatggaggcccctggagcccagatctgtcatctggtgctgccagctgtgctcactgtgggttttctgctcagggtctgaagcagctgctgtctccctcctctgcccccatcccctggctctcccctgggcacagtgccactcccttggaagggacgggaaccactccgtgagcacccagggcgttgggaagccatgaggcgggcctctgccatctccctgcccccagcacaattggcagagatgaggcgggtggtggacggctgggctgtcgtggcagggtctgcaacagggcaatgtcctggctgtaacccaggcagtgggaggtctgca

SEQ ID NO: 497932 - DNA, 160 bp, Homo sapiens
tgatctagaggatcctgagaagacgacagaaggggaagcaggaggggtaccacacactgagtctctgctctcatcctagcttatctggccagctgcccctttgtcatttcccttctctgtgaaatggctcttgggagactggctgaggagattgcagggg

SEQ ID NO: 497933 - DNA, 320 bp, Homo sapiens
catcagtacatggcctgaacgcactttacagtcattgaaactcatgcagtcattcatcccagtctgacatacctttgtctcaaatgttccacagtgcaactgtctttgtggcctaacaaaataatactcataggagttaaacatagacatcattataataaatactaacactttaaatgtttacgtcgacaaaaccagattagagtaacctacaccacatgcactatacagtagtaagcacaaaattccacagaatgaagcatcacaaagttctgctcagggtggctaattccatctaggtaaaatagctgggattttca

SEQ ID NO: 497934 - DNA, 130 bp, Homo sapiens
actctacgaggatccccgattatactcactaaatggctcagattatgattagcattttgagcaagtgaagtatttttaaattaaagtatatgcatgtagctctttttagacattatgctattgaaacggt

SEQ ID NO: 497935 - DNA, 317 bp, Homo sapiens
gatagaccatctgaggcatatagtaagtgacgaggttgttgccgtgagcagctctgtctatacaggcttgaaccaaactacctatgactcaggctttgaccactacacagattcacattatgcagacggagatgcataggaactaattgatcgatcaggctatgtgctgaccctgtgcttatgcgtatgtaagtggacatgtctagacgtgatacatctctatgtagccactacaatggagtgaactacatgagtgtagagactttgtaacgtgatggagacagtggccatatgatgatctgacctgtgttgcgcgt

SEQ ID NO: 497936 - DNA, 853 bp, Homo sapiens
agcggtgttaatcctagctgtgtgcagtctctcttacccttctgtgcccagctcagtcttccctagggctgggtgtattaggactggctttgtcccacagcttggggccatcggtcctgtctcccctctgctggccgggcacagctgtggtgaggttgggcagctgaacagtgttggctttcatgaggaggcagaaagcagaggctggcctcagactcatacagaaggtgggggttggctgggtacgagggatgtggagcacaaaagcctctcatcccccattaaccagggcaccaagcccacaggtgtccccagcccactggatcagaaagagttcagtaagaccggaagctcctggtacgggtttctcccagttctctagggaaggccacctgcaggtcactgaaacttcaagcaccagggaagatctaacatttgagtcccttccaggccatcagaggcctagtcagccacatgggaaacttccaagacctgactcaggcatcattccaccatggctaaggcaccagccggggaagacttgaaagaaaggggcaggagctcagatgaagagaaatcctaagttacctttctaggtcaaggcctgtccctggccatctctgaacttcagctagagcttcaagtctgtgcctggagctcctgggaaggctactcaccttgaacaccacgctttgacaggacagcatggtgcatgccgtgcatccgtgagcagtgtgtctcctgcatgcagaaagggagcagagaaggccaggggcttttgctaaaaatagtggccagaccagagctctggagccacctgtcccacctcaaatgggtctgggggtcaggaggc

SEQ ID NO: 497937 - DNA, 410 bp, Homo sapiens
aggaattcggcacgaggccaaggagaagctcccgcggtactacaagaccatcggtttgggcttcaagccccccaaggaggttattgagggcccctccattgccaagaaatcccccttcactggtaatgtgcccattcgagggcggatcctctctggggtggtgcccaagatgaagatgcagaggcccattgtcatccgccgagactatttgcactacatccgcaagtacacccgcttggagaagcgccacaagaacatgtctgtccccccccccccctgcttcagggacgtccagatcggtgacatcgtcacagtgggcgagtgccggcctttgagcaagacagtgcgcttcaacgtgctcaaggtcaccaaggctgccggccccaagaagcagttccagaagttttgag

SEQ ID NO: 497938 - DNA, 1530 bp, Homo sapiens
  misc_feature (564)..(564): n is a, c, g, or t
  misc_feature (718)..(718): n is a, c, g, or t
gcttcccagaaactggggacggaaaactgagacctcctggtcacccgccgccggtgccttttagaaactcccagaatgctctgccttccctccctggtccctcttcagagcccctcttaggtatctgtcgacggtgtaacgagtaagctctcatcgcttactctctcctctaatccagccccttctggagtaggacaagatgacttaacagctcgggtcgcagctagccatccagacagcgcgccggcagctgcagcgcactgagtacctgaaccccgtttactcgctcaccctcgtcgcgtccaggacctcggcagcctccgcggtgagcatggtggtgtcggcatgcatagggagaccagaaggagtctgagacaacgcgacgcgtcatgccgtcacttcgcagggagttgagacccgcggcctggagccagcatggacactcggcgacatagctgtacgcatgcaacacagaaggtatacgagaaggttctctccgcgtaggctcgcgcggccaacggcgggcggtcccagtccgtggatgtgcatatggctctctcgagntccccggggttacctttaatcccgcaaaggcgaggggcacacaaagaatgccctcaatgcgcggtgagcgcgccatctggcaaaatcgcgggcccctctgggaccgcaatatgcgcgcgaatgtccaagccaatctggaatcctgggtcctttncatgcccacgagcggaatcgcggccgcacatcacttcgacaagcaaaaaattgcttggcgttgtacatagccgacgttcgtccacggggcatctgcgcagcgtgccaccgttttaccattcattgctctcggcgagattcatataaggttcatgccccctatagacgctatcgcacttggcaagcggactgtgtagcagaaacccagtgtcccgtgcttccttcgccagggaaccttgccgtccaaaccattttgtaacacactttcttgccttgtagcatgggcgaaggttagttactttgtcttacagcattacaacaaagtcccacgttatcacagtagtcccggcccagggaacaattgtccgtagtgtccgctttatcgtattgatcatggctgacaccaagtgcaagaactccattgccccgaacagcgtgggtaactcccccagataaacgctgaactttccgatatatcaatggaactccccaccgttgcaacacttagttcccaactgaacaagcctaacacaattctggaactagccccttgttcacgaacatatcctttgtaattccctctgataaaacacaccaatatccagtctccacttcgaagatctatatcaaacacctttcattaactctttacgctaacctttcccttgaactcgattctaagccctcctccatgaacagtttctacatctccaactctttaccctaacttttacaacaaagtagcatataacatggccattatagtatatatccacttgtaccctccacgtccgcattcccacttctaacact

SEQ ID NO: 497939 - DNA, 377 bp, Homo sapiens
ggtggtcagaaacagcgtttgtcgattgctcgtggggttgttgggtcccctaaaattttgttttttgatgatccaacctcagctgtggatgcgcgttcggaaaatctggtgcaagaagcacttgataaagaattagctggcacgacaacgattgtgattgctgaaaaaatcagctctgtcttgcatgccgatcgcatcttggtactagatgacggccgcttagttggcagtgggttgcatgcggaattgttggcatcttcagccatttatcgggaaatttatgagacgcaaaaggcaaaaggtggtgacgaagcatgcatgattttcaacgcgcgaatgcgctatttctatcgatacttgaaacgctactggctgag

SEQ ID NO: 497940 - DNA, 393 bp, Homo sapiens
  misc_feature (10)..(10): n is a, c, g, or t
  misc_feature (95)..(95): n is a, c, g, or t
  misc_feature (97)..(97): n is a, c, g, or t
aggcctaaancgggaggatcctcaccctggggttcaaaagtttgggaaccagcctggcccatcatggtgaaaccccgtttctgttaaattagctnantgtggtggttcagacttgtaatcccagctacctgggactctgaggtgggaggatcgcttgaacctgggaggcggagattgcggtgagcccaggatgaaaccactgcactccagcctgggcgacagagcaagactctgcctcaaaaaagacaactgagaatctggctgggcgcagtggctcatgcctgtaatcccagcaatttcggaggccgagttgggtgcattgttctaggccaggagttcgagatctgcctagccaaacgcagtgaaacccgtctattaaaaatacaaaaaaaa

SEQ ID NO: 497941 - DNA, 727 bp, Homo sapiens
  misc_feature (139)..(139): n is a, c, g, or t
gaatcgactagtccgtgggattactcccgataagaagaatatgatgggtgagctatatgatcggtccccactggatgctatacacttggtacatcgattacaatacaatcgcgattgtactgatatctacgataggtgnataaaaggatactcttaaagggattagtagttcgttggtcgatttgtctaaaatgattcttttgtggagaagtatcatggatggaagaataagtggtggtggatctcgtggtactgtgttgtacctattgattatattggtatcaacgcaatatattgggagagcatcggagatgtaagtagtccaggataggagattgaaaacgtgtatgaggaggtctacgtggggagcatagattaaattgtgtcgtatgagtatcctaccttatagatgagggtggcgaaggctaactcttgacatttgggtcgacgttgagtataagaagatgctatttcgaaacattggttagcagaatgtgtgttagtgttgtatactagcgagtttcgtgggagaagaccgattttgaaaactggtagatcacacacattgaattgtgatagtggactttgatgctgcgacaggactccaggttgctgagtgaatcgtatcccgatagaaactaaaatgtactgattagtaaaaccgggtgtgggttgatatattgtgtatgtatggatgcaggtgggggaggatgggtactaagttggg

SEQ ID NO: 497942 - DNA, 182 bp, Homo sapiens
  misc_feature (40)..(40): n is a, c, g, or t
atgagcaaaggaaggagtatatatgtgagtagcccacttnttggtcaaaaggtaaatatatcggttgtttcggtaaagtgcttgccttgataagcagaaagacctaagcttgatccgcagaacccacatttttgtgatcccatacctggggaggtggaaaaaggtggatctcacggcttgct

SEQ ID NO: 497943 - DNA, 483 bp, Homo sapiens
  misc_feature (12)..(12): n is a, c, g, or t
  misc_feature (28)..(28): n is a, c, g, or t
  misc_feature (359)..(359): n is a, c, g, or t
  misc_feature (367)..(367): n is a, c, g, or t
  misc_feature (410)..(410): n is a, c, g, or t
  misc_feature (456)..(456): n is a, c, g, or t
caaatgtgcccntgggtattatacctgnaccataatccacccggcatatttatcaccaaatggagtcattcatagactgctttgggccatagactatggatctccaccttctttactctatttaaggtagttggaaacctggcctggcgatggcactcattctcatttaacttgctccattcaaaagaaagtgctaactttcttttacgccttattgcaaaaaagaatgagagaaaagagtaatctgaaaaatataatttagtgagaagagctgacaaccctgcagtatatacgtactgaattcacaaacgctgagcagtgcttgcaggttataaatagacttggcaagcttgaactgnccacactngtctgagcttgagcaaagcctgcggcagctgaccacttagtcnaatggggtatcacaggtgatggtccattgggcatgtgtagccagcnggttcagggagcctcctcccctcggcg

SEQ ID NO: 497944 - DNA, 377 bp, Homo sapiens
agactcacccacagggagttaatgtcgacagcggggctcaagttcaacacgaactggcggaatcgccagatcaatagacacccagatctccttcagagaggaacagagtccagtgtgttatgtcaccagaaaacatacaatcacaagactaaagaggcatggacatccagctggctgcgtttattaactgtgagaatgagtcatcaggcaactctccaggcaaatgtaaggctaaactggcttattgttgacaactcatcaaaaagttagaacgacaggaagctgaagagcgagccaactctaggctaaaggtaagaaggggaagagtacagacacacaaaggcctcaccaagagacccagggtcagcaaagacctc

SEQ ID NO: 497945 - DNA, 107 bp, Homo sapiens
cactgcgagtaaaggtagggatagtgtacaggataatatactcagatattttaaagtaactacttaataataagaatagcctacccttgtccattgctacaagaaca

SEQ ID NO: 497946 - DNA, 740 bp, Homo sapiens
gaccaacttgcgctctgggacctggtatgatgactgggcaatggaggtgatgcacaatgggacgaccatcctggatgaatactgtggcacaatctggacctgcctcaaggcagtgtgacacggtgtggcgtggtacggcgtggaggacgggactctccacttctcttgtcaactggcgatgactcacgggccctgcctgcctggaaccgtgcccaccgaggacgtcctactgctgatcagatcgagtcatctaatggaacaggacggcccccagggcaagccatctgttggcactgacagttggcacgagtggcatcaccagttcccttgacacaccacataccccttgagagcggcacagcaaaccacgggcttgctcatacccaacgctccctacccagataacccacttccacgtggaggcccacgggaggggctatccattgaacaccttggatggcctttacacaaataccatggaataggaaacaccggacaatgttaacccaggccaaacgttcacaatccaaccttaaaacacgcgggcgagcgaccccaggacagacccagcacgacaccacttcaaacgacgcccacacaacagcctggcgtccggcacaacgtcgcgcacgactatcgaaaagatgggcagacgtgcagccaagatccggaatacaagctcagctcacccatagacccccgcgaggcccagccattggacgatgacgaatctcgcgaag

SEQ ID NO: 497947 - DNA, 1575 bp, Homo sapiens
ctcaagagatccgcaacaggacgttggactcatatataccaataatacgtgggcaatgagtcattgagcacgtacttattggcggagcattgtagacgcggtacgcttcatatgcgcaagcccggatccttagagggccatcgctttaatgtcagaacctctgatgagtggtgagaccgagccaagagtctaaccaatcgtagagttagattcgaacacgaccctactgacaattacgtaatcagatctctagttccaattagctatattagccaatacatcatatctgtgcagtgagtttaagtgacacaccattgcaattaaagttctgcgcaagcgtcataatttagagtcagagctggaccctcaacgtattcactcgcgtcagatttataacttctgcggttgactcacacacgaactcaattgagaggcttttcctcgcaccgtccattaaaacacttaacaccatttcaatacgtcctccttcatcgtaccctttggtcttaccgcctactcccttgcttaattaccgttagcgtacgcgtcgccgttgcaggccaattgcgtagacctaagtgatgttggaggaacagggctccgtgaacggccatgcgcacatctaagggctatggggaacaacgttaccttaccccaatccccctgttgaggcacgtggcagatcatgaaactccttaaaaaccacttcgtgtacgtcccttctcgggtaacgcatcaggtcaagacggctagttcattcccctccctttattcactatcacgtgagggggcccgagttcgggatagtttctccctactttgattccataatccaagaagtggggattccaattactacaatttatatacaaattcccaacgatgagaccaaaatttaaattccgccaataatttacccaaaaacacccgccccttggttcccatttcaggtccctggaaattcacccggataaccgtgacacctcccaattcactggtccaggggtcccttggtaaatcttctgcttcccctaaaatttcttaactttatgggcaaagggttcccataaaagtcttcggtcctggtgacatcttcaattcctacctaaaggttaatccttaatagccgttggcactcgggggccaaattaacctttttattatcgttatacagttccaatcttcatgtaaccgcggacacacaccccgttttctgaaagaacaaggcaaggaggaatgtataacctctccggaaagtaccctggtaaccgcgtgaaagaggacagcgggaaagtatccctgccaaattttttttatggtagtgccaacaccactcggtaaaagtttcttgacaatttttgctcgggggtcatacacgccagggaggcagttttgacgaaatcaactatttattgccgataacataggggcgagctgctcgaaacaaatcaactcgtcggccaccactattatggggaaacacgcttcctatgtggaatctcagccatacgcgaacatctggtggacgcagcagtgtcggtgatacaccacaagagaggagtggcgacctgacag

SEQ ID NO: 497948 - DNA, 426 bp, Homo sapiens
ctaccacgttgtgcatgatggccttgaactactgacttcaaacgaactgcccacctagacctcgcaaagagctggaattacaggcatgagccaccacttccaacatgggatgactagcgcaaactatttatgagatatttcactgtagccttatagaaatcctactaatttctgtatgaagactgagcatcctggaactttactggatcacgtttataattggtgaaattgttcataggaatttttagatggactctctcagttgttgcaaagataagatcatactattgccaaacatggacagtaagatgcattgtatcccaaatcggatgccttaatcaacctgtgaagcatgactgatctatccaggaatactaggactacgaatgaacctccagagtgcggggctatccttcaccgtgccct

SEQ ID NO: 497949 - DNA, 433 bp, Homo sapiens
gagagagagttagagagagagagagagagagagagagagagagagagagagagagagagagagcgagagactatagagagctagcgcgatatagattgatccctatcttgtctctcttctccttctctttctcttcctctttcttcctcttcccctttctctctttcctctccttcttttcttttctttttctcttccttcctcctcatctctctttcccctccaatcttctttcctctttccttcctccttccttcttttcttcctttcctttctctttcttctccttcctcctcttcttctttctcccttctccttctctcccttcttttcctcctttctctcttttccccccttcttttctcttttctttctttctcttccttctctcttcctctctctttcctctccctctcccctcttcttttttctc

SEQ ID NO: 497950 - DNA, 1043 bp, Homo sapiens
tccgggactgcggagttgtactgtgaagccgggaacaaggaacgcggctggaacgacccgccgccagttctcatacgggcgtgcagacccaggccggggacccaggcgctcgctgcttaccaagagggtagccgcaccccaggatggatccccacagagtccccgcatcagagacttctcctgggtctcccccaagtggggtctccagtctccttcaagtaaggctcccaggtccccacctgtggacaatgtggtccgtgccttcttgtgggtggaagccccacaagttttcccagtcggagtcttgaggcttcgatttgacttgaacggatgttgcttgaagacccttgtgcgaaccaggtgccttttgggacagaacttgcccgtggtccaacaacatggcgatacgccaggatactgtcgacttgacattctaacacgaagcgccctgggctaatgttgttggcacgtgcaaccagttggggtctgccacgcgaacagtttgtctcaaattaccctttgtaacgtgcaaatcacgcacacgtgggcgtccattacccgagtggctggccaacagaagtctttttacaaggcccctatccgtgtttggtgggtcaccatgccactgtcatctttgtgacatttccacaacgggtgttccccctaccaagtgcgattgtgaccccatttgtttgcaactgtgaacggtgtccggtgtccccagagtgcacatttgcgactagacacagtttttacgtaccacagtaattttcatactttcgcgctatacactcactactgatgtgcgctgtgtccctggagtgtattccacggatacgttagtgcggcaagtgctcaaatgtggaacatcgcatagaacgatctgtctttggcattagcaccatacaagctcgttgctagataacgagcaactctcaaattatacacacaaataacgcttaggtgcttttccctatcgcacatcgcgcgttctccctagtaaaagttcgctttcggtggtagttcctccctcagtgaattgt

SEQ ID NO: 497951 - DNA, 594 bp, Homo sapiens
tgcccctcattcacataaagatattatagcgtatacatttagccatcatcacttctaggaatagctaaatcatatcgctcacacctcatgatcctccctactatgcgctagaaggaataatactatcgctgttgcatatatagactactctacataatcgcctcgaagcagcccactcccgtctttagccaatgattgtgcctattgccgatactagtctttgcctgcctgtcgagaagcaacggtgggcctagccctagctagtctcagtctccaacagatatggcctagactacgtacataactaaatcgtaatccaatgctagaactaatcgtcccaagtatctgtattagttactcacatgacattgactttccaagatcactaccgataccttctgcattcaacacaacctacccacagactaattattagcatcattcctcttactatttgttcaaccaaaattcaaaaacaatctattaacctgttccccgaacgctatacactaccgacacgctagacagcccggcctcctaatacttaactatcttgacatactttgcccttcacactcgctggaaatcaacaca

SEQ ID NO: 497952 - DNA, 772 bp, Homo sapiens
  misc_feature (83)..(83): n is a, c, g, or t
  misc_feature (130)..(130): n is a, c, g, or t
tgcaattcaacatcccaccgccgccaggacaaaaccccattgtgaatcatggatattccaatcctgcagtgttctctctaagncagattttaagacaccaaggaactgtgtggccgtgaccccactatancatggtgggacacttgacagaattgtgtacctgttccctgtggccattatagaaccgttgatgaacctcgttaactcgcccaagattcccagattattctggttatcctggaagccctttccaatatctttcaggctgctgagaaactaggtgaaactgagaaacttagtataatgatttgaagaatgtggaggcttagaccaaattgagagctctaccaaaccctgaaatgagtctgtgtataaggcttcgttaagcttaattgagaagtatttctctgtagaggaagaggaagatccaaacgcttgtacccgagaactacctctgaaggctacacccttcccagttcacggatggggctcctgggacccttaacttttagatcatgtagctgagacataaatttgttgtgtactacctttggtattttgtcttattgtttctctactaagaactctttcttaaatgtggtttgttactgtagcacctttttaccctgaaactatacttgaaccgttcccactgtacatacatactgtatgaagcttgtcctctgactaggtttctaatttctatgtggaatttcctatcttgcagcatcctgtaaataaaccttcaagtcccccccttttttgacttcca

SEQ ID NO: 497953 - DNA, 443 bp, Homo sapiens
aaggtcggaaaaggggacctccctgggagatcaatcccctgtcctcctgctctttgctccatgagaaagatccacctacgatctctgctcctcagaccaaccagcccaaggaacatctcaccaattttaaatcggatcttctcagcttagcggctgaagactgatgctgccagatgactttggaagccccctggaccatcacagatgcccagctttggataactcttacagtggaggacaggaatatcaggtctctgagcccaagctaagccatcatatcccctgtgacctgcatgtatgcatccagatggcctgaagtaactgaagaatcacaaaagaagtgaaaatggcgcgtgcctgccttaactgatgacattaccttgtgaaattccttctcctggctcatcctggctcaaaagctcccccactgagcaccttgtgac

SEQ ID NO: 497954 - DNA, 1309 bp, Homo sapiens
gcaccatggctatggtgggcaaggacatccggtctacatgctgcagcagccaggagtagcagctcccccatgtaccttctggctggaagtaatcgacaaggggatagatcgctgagcaagtgtcaagtagcactggtaggaacatattgtccacggtcgcacggcgcagggacgggggagagtcgatggagttacgaccaccagtcctggcacctccgatcgaggatcagctttgtcgggcagcgatgggcgcgctaccaaggtagtgtcgagtcaccagatccatcctttggcgtccagccatatccagcagtaaggccatggactcagccgtgaaatgtgtgagccatcatgcagcgcaaaaagcacccagcgaaggataacccagtccggagaccatgcaaccggatggcgccgcgcttcggaagtggtggcttggcgcaccagggtgcagccaaaagggccttcaggagtagccttggcgaggaacggagtggacgcgcaccgcgatatttccgcgcggcatgacgcgcggctggaggcgagcggccaatgacgagtggtcatatggcccggtcaatgcacccgatcgatgctctatgtgtcgactcagcgtgacaatggtggcacacacactgacgaatgagcgcagggggagagttaaaccatggcgtgatagctggtggtcaggaaatattcgaatcccggggatgtcctaattgttcaagcacatacactggggcaaccctctgtactgtgatcgcctagagagggacccacccaattccgttgggatgggttccccccttgggggaaaggcaaccggttgctggaataatctggtgggggaagaaaaacggagaggagtggcgacatcacacatggggcaaagagagagcacaggggagggaaaaacacaatcccggctccccgtagtcaagcgcggggattcaactggaggcggcccagggcccggatgaagccactcaacattgaggcgggacaggcagcatggaggcccgtgaaacaagccaaggttccctgggatgagatcaggcaaccggctggtcggggtagcaacggaatgccgcgggcccaggtgaataaccaagggggagaaaagagcacaaaaaaccactaaggcacagggcacgcagcagcacacaaggccaaaaggtgaaacagacatgggagcccagcaaaagcagccggaaggacaacgagctaggaacccacacgggcacgaagtcattcaccaacagaggggaggtggaagacaacgagatcacgacaagcacaaggagcagag

SEQ ID NO: 497955 - DNA, 240 bp, Homo sapiens
gccccctgcggtccagcccaaaatcgggtgcttcttcataccaatcacgaggaggtcaacgttgcccgagaggtcgataaggcgtcgacgggttctccggacagcacgcgggtctcgacctcgacatggggatgcttattagcgagcggcttgacgacctcgttgagtcgtttgagggcctcgtcgtgcacctcttcggagtcgttaccaggaaccgtcactgcgagcagcttgcagcca

SEQ ID NO: 497956 - DNA, 954 bp, Homo sapiens
gtctgtctaagaaaaaaaaaaaaggaagaaactgtcataactggtttacatgccctaaagtcaacggttggtttcatattggattggttctggtcagtgtctatggtctggatagtagttggtcaaagtttggcatgtcaagacgttgatattggcccaagacgtctaagtaaaaacttcttcaaagtccttagtgctgatttttggtcacaggaggttaaatttctcatcaatcatttaggctgaccaccacagtcctgtcttttctgccagaagcaagtcaagtgttggttacaagaacaagtgtgaaaaacattggcctgattaagatttctagcaccatgaaaggtggtaagtatttagatcggccatactcctcgtccaagtgattagacctcctctaaataaaccagtagtgagttcaaaacagccaccctgcagatttccttgctcacctctctggtcattcggtaactttacctgtgcccttagtaaaacactgtgtaaagaaacgtacgcccatacgggcttaacttcgtagaagattcttacgtcggtacctctggtggtacatctcccatcttcaagacggactcagaagtagtccttaatccaccttgggtcccctggccccatatcgcggggagaatatacggtatacggggtgcgaacagaaagggttataccgggcgtcacagggaccttggcgctctggatctcgaagtccttgtaaaaccccgggaagaaaaaggacagcgaagcagaggacagcagcaggaagcgaaagatcgattcgagcggcggcaaggggaggccaccagaaagagaagggttgaaggagaccacaagagaaatggggcaccggcgggacacgcaaaagagaggagagacgacaacagtgggaaaaacagggggagcacggaggagaacagggggcgcagaagcacgggaagg

SEQ ID NO: 497957 - DNA, 247 bp, Homo sapiens
  misc_feature (4)..(4): n is a, c, g, or t
  misc_feature (104)..(104): n is a, c, g, or t
  misc_feature (218)..(218): n is a, c, g, or t
aacntttgtgggtacatagtgtgtgtatatatttatgccatatatggcatattttgatacaggcatatgaataggtattaatcacatcagggcaaatgaaatanccatcaactccagcatttatcatttgtattacaaaccgattctacacttttagttactttaaaatgtacaagtaaattgctattgactatagggtcattttcatgggtataatnaaaattatatacaagtataaataaaatcc

SEQ ID NO: 497958 - DNA, 777 bp, Homo sapiens
cgcgggggctcacgcctgtaatccgtggaaaagaactgagagtccaggccgggcgcagtggctcacgcctgtaatcccagcactttgggaggccgaggcgggcggatcaccaggtcaggagatcgagaccatggtgaaaccccgtctctactaaaaatacaaaaaattagctgggcatggtggcgggcgcctgtggtcccagctactccggaggctgaggcaggagaatggcgtgaacccgggaggtggagcttgcagtgagctgagattgcgccactgcactccagcctgggcgacagagcgagactccgtctcaaaaaaaaaacaaaaaaaaaagagaattggagaattcggggaaattaacccaccgtttccaggggccacatgggaactttctcaaccaggggggctggaaaccccttccacaggggggaaagagacattggttctctcaggcaaattggtgtgcgctgggaccaggtgggtgattatcccattgtggcaaaacaaattggagggcggaggagccttgtgaaacatatattcctctaataagcacaaattttacccccacaatttgtgggccaaaagaacctctatgtgtgtgttgaggcgacgctaacaaccgaaaaattcttctagaagagaaacaccactgaggcggagtaaacttcttcagggaacctgtgggaaacaaggagggggccccttagaggccccacaattaaaagggttgtgagaccaacagacaaagactctctattttttacagcttgc

SEQ ID NO: 497959 - DNA, 308 bp, Homo sapiens
gcacatgtggatatcaaggggacgagaggagcttggtcctcgctgacatactcctacttatgcgcgagatgtacgtgtggatcctagcgtggattcaccgatgagagatcgtatcgggtgagaatgaacacataactagcatttattcttgtcctctgatccactcccagctgatcctctttgtgcatgctgtgagcatgagcccctttgacagggatgtgcggctgatctcccttggctcccggcagaacctttgtgtaaatgaagacgtgaaaagcctaggtactgtgcagcttatcaacgaccga

SEQ ID NO: 497960 - DNA, 464 bp, Homo sapiens
tacgtccacagagacattcactcattctctgaaagctgaaatggaatgctttggcctctgtcaagaaaattaaagactctcggtgacaatcaagtctgcaggagatgtttcactttctccagctggagaaaattaaaattacctggattatcaaaacagttatgtttctctaaagtctgagactgatagtcctaaatttggtgtctttgattatagactggacttataaaatatagactggacttacagactttgattatagactggtcttattatgacctataaaaaacgctgtcttcagatgacaaatcccaactaagcatcattgaaaacaagcaaaaaaagggaactatattgtggttttggctattcctaatcctatctgactcaggctagcgtaaggtagcattgtgtcttcttttatacaactgtgctattagcagtaatgagtactgattccagac

SEQ ID NO: 497961 - DNA, 1026 bp, Homo sapiens
accatctcgtcagagaaccagagcaccggccagcaatcggttcaggagcttgtctgtggcgcaccatactagattcctccgagtattgaggccgggctctagtaccctgaggagcgctggtgatacacgcaatgattgaggaccgtggaacaacgaggataactgagagtgcgtaagacgacggtcgcaggggtgcctgctggagtggaagcatgggtcatgcagagcgctcggaggcgtaggagaaagatgaagcgtagaagccgtggctggtcctccaagcaggaagccattcggagcatcaggtggagagtagtggagtttgtgacgatgtccttcgagtgtacaagtacttgagccacaggaacctgagaaataacgtgggggatcgcaacgccagaaagattcgctagcagcattgcacacgttgcaacagcacttcagatggcacggtgtttttcaagagctgggactgtgagagcgattgaggagacgtagaggactgagatgatgtgctggacgagtgacagctaccagagatgccagggacgactatgaggaaagaaggtcctgagccgcaaggattcaggacgtgtacggaagggctcaggcaaaggcttcgggttccatcccgtgggcacggggtggacgtcgagtgtaggtagggggacagagggggagcaggtacggcagagtggttcttagacattataggccactagtgaagtgtacgtgagacacaaaagaagtgagagagatgttggtaaggaatgatgaagttgtcgtaggcagtggtggatcatgggcaaggtgatactgtttcgggggggaacaagacatggtatacagaatgttatactttaatgtaatgtcaaggtttgaatgtaggctgagagtccgtgttggagttgttgcagaggataacggatggatgaagtgagagggacaattgagaatcttgggatgacgaacggttgagtcaggataaaataccacaatgtagggttgtgcttggcgacgtctcga

SEQ ID NO: 497962 - DNA, 225 bp, Homo sapiens
ccggcccctgtattatatagaagttgtggtcatcggacctgtggtcgctacgtgatgtgtaggaggaagagctcaggtggaaaaggagggagctactctcaggctgcgtccagcgacagttgcccagtggctctgactgtgtctctcacagcttgacaaagcctgtagacagcttgtctatgtgaagggactagagaatgcagtgatttctatcactcctcccct

SEQ ID NO: 497963 - DNA, 860 bp, Homo sapiens
gacatcccggttgtacttctgtgccgggggtcttcctgctgtcatgaagcgacgtaccgggctacctacagcataggcagagactccgcggcccgggcagcccgctgatgtggcaccgtctggaggagctctacacgaagaagttgtggcatcagctgagacttacagggtgctatgagtattgagtgcaggatccagtagcatatttgcccgaaaggatgatgggtcctcatttaaagctttatgaaacacgtttagtcaggtagaactttgagagccacaggtgtgaaatccctcgtgatctcctcggtggtaacatcagttccttacagcggtagggttcggaccacgagagacgtgagtccctaagtgtggcgtctatacgttttctgggtgaaagactcggtgagaacgtgtgacaagagtaggtggatagacggcagatgactcctgtggtataagaacaggcaagtttggaatgctctaatagattaagagcactcggggaggcctacagtgttaccaggaatggaaagcatagatgagacgatgtttgaacgcagaatgctctacaggccttcctggtgtgacatcggttcacaggtcgtgtcctagtagatctctccatgtaaattactagtcagaagcaatcggggataccatcgcgttcctactacccaaggattgctctgcggtatgataaggggcctgtgttgacatccgaggactctaccaggagctctgagcagccaggaagagagccttcacgctggggctagcaggactactcggcgaagggagattataaccttttggagaactcctcatgcaccctggggcttggagtcctgatgcatacg

SEQ ID NO: 497964 - DNA, 414 bp, Homo sapiens
cgggtggatcacgaggtcaggagttcaagaccagcctggccaagatggtgaaaccccgtctctactaaaaaatacaaaaaattagccaagcgtggtggcaggcacctgtaatcccagctacttgggaggctgaggcaagagaattgcttgaacctgggaggtggaggttgcagtgagctgagatcacaccattgcactctagcctgggcaacaagagtgaaactccatctcaaaaaaataaataaataaataaagtgctgggctactctgacctgggtgctgtgtgtccctgcgctgatcgcttgacatttctgagccagtttcttcatctggggcctggagtcctgccttcctcccttgcagggtggacttggaggtcagtgggagagacaagtgtggacaccccagagcagt

SEQ ID NO: 497965 - DNA, 373 bp, Homo sapiens
cggccttccatcctgggcataagagctgctggcctgtgtgccggggtgggggcctgcctggcaggcacaggcccacttaagttatccattggcagaagcggcaggtgccccgtcttgcagggctgagcttggagcagactgctgtgtgctgcagccacgcccgggctgctttcctggagggtgggacacccattctcatcctcacacctgcctcccttgagactcggcgctgtagcttttcctcttcgtggagcaccacctgggctggctcctacctgtctggcggccccttcccgtcccctctgccctactcccctcctcccctcttagctcttattgcccaggctggagtagctcttattgcccagggggg

SEQ ID NO: 497966 - DNA, 885 bp, Homo sapiens
  misc_feature (94)..(94): n is a, c, g, or t
tcctgatacgtgcattcatagaacccctttcttaagtcgcaaaggggtgctatccatagctggctaaagccggagacggagatacattagcaanagtgactacaaactcacacacatgaccgcgcagagggtgcccacgcaaatcgatagctgagggcacacctttaccctggcatagcgtcaacaaatttcacatatgcggctagaaagactgagtaagactgttcttattcacccaaagacgaacgtcccgcgttaaaagcccgtgcgaagaactcaacaactaggccttgtaatgactcagatccgatccagcaccctgtcattctccttcacctgatgcgtgtctgcagtgcctagtgagaaagcgcagctatgcaccaacaaccaactggcttggaagattttcttgtgcgcatgacggacattggtgaagatatgatccagtccagggactaggctcagccatctgtttccttggtccagaaaaacggtgacgattaagaagctttcaggaatgattctatggattaaaatcatacaaactggtggcgtgttctgagaatcagtctgggtattgatttccttttccagtgactgggctccaggccatgtctaatgaccagctcgattccctgtgcagttcagagagcaagtgaacccaaccaacgaatgtcgtcatctaagccctgaccctagccagggactcccatgctgctgttggtccagtctctccagaatgcctcctttactttttcaagtttttgcccttcctttgctttaaaagctattctcacatagctttatttcctcctcctttacttcaaacactgtaagcagcactctggagttttccacctgtgcacattagctcacctgtatgca

SEQ ID NO: 497967 - DNA, 209 bp, Homo sapiens
gtacagcgtacatacaacacatccaccagcgagcgcacactgcggtggtgcacctgctgacccctcccagctcagcctagctggctcttgcatgggctgcggagatgggcgcggagtgagtgctggtctttgtccagctcctgacccacaggcccctcaggactcctgcatttcccccccacgagcacaccctgtaccctgccaggaat

SEQ ID NO: 497968 - DNA, 427 bp, Homo sapiens
ggggaccctaagtaactcgagctaataccccagctgaagctataagggaacacgatctaggggcggctctagaactagacccgcgagaatcgcgaggttagatacgacgacgttggaatcccgaagtagaatagctaaacagctggaaccaaaatgaggggatacggcaaacaaaagtgaaacttactcgttatcgatctaagccgtcaagtacccgatctccgcgacccattgcactcaatttgactggagaatagcacggacaagcaggtggacacgctgtgaaagagaaactactaatagcctgtagacagcaagcggcccaagacgacagaaggctgcaaagggacgagcgtcgattcgagaaaaccatgcactgatttgcttatcctaccatggtagtacaggtttggaaaatttggagaaa

SEQ ID NO: 497969 - DNA, 966 bp, Homo sapiens
caggttcaggagatgggaagccagttttctgtgaaaatgcttgaagcagaatcacagggatggctgtattaagcattttcacagaaaacaggtttcaggagatgggaagccagtggtgcaagacttaaaaaatccttcacatttatttagaagtttctgttatcagcagaatgatttcatgtttttatgatttttatttggaaccatcattgagttccttttttttttttttaagttggattttgggttataagctgctggtatatatggtttttaatttttataaacaaatcaatttaagtttatagttcttagtatttaagaaagcagatttccagtagattgactcgtgttaatccgggtaaatatcgcagaatttctgggaagtgttatttctcccaggtggaatatttcaccgtgatactcaggatgtgtcaagataaataatattagaggtaaacaaaaggtagtgtggggggaattgcaatttggacatgaaggtgtattaaagccaggtgtaatcaagtgtagttaagatacattttaaatcaacttttcaaataaaattttagaagccattcttctttaaattaaactcacaagtcagacttttttcttaagtttatcaaggttcacagaatatccattcttacagcctaaacaccgtgtagcaaaacaggacaaattcgtgaatacgaatttagtttccagactaaggttgcaatatattgtataaagccattcgaaatatgcgaaacacatgttgagcctcatctcgaaatgtaaaaaactattgtccactttccagtggattatagagagatttcccaaagtagaacacaagcttaactctggtaggagacgcccccccgatggttaatcacaccaatgccaaaggtgtcatacacgagatgatactcccaacaaagtatacaagctaaggacttgtaaaatgagtcattacta

SEQ ID NO: 497970 - DNA, 221 bp, Homo sapiens
tcgcagtggtacctattatgttatgaaaaccctcgatgttcatggaatggtttaaacttttatgcgcaactacaaaatgatgtctttttcctatgactcaaagatgaaagctgtttcatttgcgtcagattgtctcagattgaccttaccaagtgggtcttacttggtaaatttatctgttgtccccttcctctcctcgtgccctcccattcttgtgccct

SEQ ID NO: 497971 - DNA, 130 bp, Homo sapiens
atcgtgctgtgtgtcgtgtgctgagcgtccgtgtgctggtgctcgtgtagtagtgctgtgtgtgcgtgtgtgctgtgcgtccgtgtgtgctgtgcgtctgcgtgtgtgctgtgtgctcgtgtgtgtgctg

SEQ ID NO: 497972 - DNA, 571 bp, Homo sapiens
gcatcctaacagtgctcttttcacagctatcatctttccctggcaggtggtgaaactgagtggacagacaagtgtccatagtacagctgcctcgtgtgggacccactgctctaacgagccagccccgacacagaagctgagcacccccaagctggggaacctagagagacctgcacccgggtcccacgtggaagactggctggtgccattttgtcttctgtggatgggtgagagtcccctttgcaccctcccccagtaatatcaggtaagctaggaaataaaagcctttggctaagcggtcagttccccacggtttaggtgccttgaagcacattcttgccaccccttcacctggttctttctcctctgactccattttattgctccactttggtttcattttcagtcctaacatgtatgtcttgtttggagtcttatgtttgctttcgactttctgttaattgtatttgggcaattgtttaaggcaggacacttggttgtgagaggtcccctgtcgtgttgactctgggataccagagtcacgttgtcacgttgttctatgtactgtaac

SEQ ID NO: 497973 - DNA, 855 bp, Homo sapiens
actgtatggctggagggctattgtggtaatagatgctatctaaagatgatctccatgaaagtatggacgtacttggtgctgggaactctacttctagtccgttactctgttcaaacctgcatcatcagtatgtcatacacccgtatatcagtatataacgatcgggctcgttgtagagtaggtggatcacgattagtacctccaattccgataattgtagaacgagtcctggaattcccggtgtccaaatggaggagggtaacactcactgtactcaaggttatagactctagcattggtgagagtcaggccaggacttgaaagaattccttctgtagcacttattcctcgaatgcatcctaaatcacaggacagcgggttcgcatcttcatgatattgagaggtcgatagacagatacggtgataatggtgagtcaattccagaatacgttccgttagattgaatgcttgtaccaggagtgctgattgtatacatacttcgaaaaattagggctacgaaaggagaatatatactacacctttgtttaatgtgtcattagtggggagtggactactagggaataattcttcagtttatgctatgtgaattctattcttgtggtcttccacgattgtttgctacagacgaatttcaactcaaatagtaaaagttgtccgtgaagagatatcagagtggatttacgagaatgatcgcagtttccatgaagagcacctgtatgctggtaatgaagcagaatttaaggttggtacttattaagcgtgaatgtcattcaagggagttacatctttattgttgtgacagaggaggatcattgactactggtcggtcagaaa

SEQ ID NO: 497974 - DNA, 388 bp, Homo sapiens
  misc_feature (28)..(28): n is a, c, g, or t
  misc_feature (33)..(33): n is a, c, g, or t
ttcatgcacgattgagatctcacgaagnctacnaatatcaagtcaagcaagaatcatggccaaaatattgctatggaactcatagaaaaagacctgaacaacaaagttctaagtggagacagtaaaaaaaaaatccatgtttcttaaacagcccaaccatccacaaagaaacaatcagggctgggtatgtggctcacacctgtaatcccaacactttgggaggccgaggcgggtggatcacgaggtcaggagatcaagaccatcctggctaacacggtgaaaccccatctttactaaaaatacaaaaaattaactgggcgtggtggcgggcgcttgtggtctcagctactcgggaggctgaggcaggagaatggcgtgaacccgggag

SEQ ID NO: 497975 - DNA, 120 bp, Homo sapiens
ggccctgggcctgcggcacctggtggtggtggacaaccgcaatcaggttgtcgggttggtgacctggaagtgatcatattttggatatattcggttaaataaaatcagcggttaggattc

SEQ ID NO: 497976 - DNA, 130 bp, Homo sapiens
gttactcaccgtatgtgacctcacgcggagcttacctcacccgtagctgtacctcacccgtagctgtacctcacccgtagctgtacctcacccgtagctgtacctcacccgtagctgtacctcacccgta

SEQ ID NO: 497977 - DNA, 587 bp, Homo sapiens
  misc_feature (7)..(7): n is a, c, g, or t
  misc_feature (333)..(333): n is a, c, g, or t
  misc_feature (342)..(342): n is a, c, g, or t
  misc_feature (366)..(367): n is a, c, g, or t
  misc_feature (369)..(369): n is a, c, g, or t
  misc_feature (378)..(378): n is a, c, g, or t
  misc_feature (383)..(383): n is a, c, g, or t
  misc_feature (390)..(390): n is a, c, g, or t
  misc_feature (405)..(405): n is a, c, g, or t
  misc_feature (427)..(427): n is a, c, g, or t
  misc_feature (461)..(461): n is a, c, g, or t
  misc_feature (501)..(501): n is a, c, g, or t
  misc_feature (506)..(506): n is a, c, g, or t
  misc_feature (511)..(511): n is a, c, g, or t
  misc_feature (556)..(556): n is a, c, g, or t
  misc_feature (560)..(560): n is a, c, g, or t
  misc_feature (563)..(563): n is a, c, g, or t
  misc_feature (567)..(567): n is a, c, g, or t
aaggagncaatgtctgtaagtctaaatcagactgtacaacagttacagcagttgcttcaggcggtaaaacacagctcacaaaggagaaagagcactacaggtggttagagtgaagtaattgggaaactgttcctttgaggataaaaaaggccttgtattatattttgcccaattaaagccttatttatgttttccccctttttactttgtcagaaaccctgaacagagttttgtcttttctaatccctgttagactactgatttaaagaaggaaaaaaaaagcccactctgtagaccccttcagagtttagttttataataaaaactgtttgnataattagncctttccattcctgaagataaacnngnaatcttttntcttnttttgcnccataaaattgttcngaagatcaaagtggtaaagccnatgtaaaatttaaccttttaatactgatgttggnccctgttttacttaaccttttgggaagtaactgcctttgncttcnactcnaaaaaacccttttttgttgctaatgtaatcggtttttgtaatggngtcngcnaatnaaaggatgcttttttttcca

SEQ ID NO: 497978 - DNA, 949 bp, Homo sapiens
  misc_feature (22)..(22): n is a, c, g, or t
  misc_feature (127)..(127): n is a, c, g, or t
  misc_feature (132)..(132): n is a, c, g, or t
  misc_feature (141)..(141): n is a, c, g, or t
  misc_feature (153)..(153): n is a, c, g, or t
  misc_feature (157)..(157): n is a, c, g, or t
  misc_feature (168)..(168): n is a, c, g, or t
  misc_feature (170)..(170): n is a, c, g, or t
  misc_feature (249)..(249): n is a, c, g, or t
  misc_feature (256)..(256): n is a, c, g, or t
  misc_feature (268)..(268): n is a, c, g, or t
  misc_feature (311)..(311): n is a, c, g, or t
  misc_feature (314)..(314): n is a, c, g, or t
  misc_feature (332)..(332): n is a, c, g, or t
  misc_feature (345)..(345): n is a, c, g, or t
  misc_feature (373)..(373): n is a, c, g, or t
  misc_feature (399)..(399): n is a, c, g, or t
  misc_feature (403)..(403): n is a, c, g, or t
  misc_feature (412)..(412): n is a, c, g, or t
  misc_feature (435)..(435): n is a, c, g, or t
  misc_feature (523)..(523): n is a, c, g, or t
  misc_feature (558)..(558): n is a, c, g, or t
  misc_feature (581)..(581): n is a, c, g, or t
  misc_feature (588)..(588): n is a, c, g, or t
  misc_feature (637)..(637): n is a, c, g, or t
  misc_feature (649)..(649): n is a, c, g, or t
  misc_feature (652)..(653): n is a, c, g, or t
  misc_feature (670)..(670): n is a, c, g, or t
  misc_feature (677)..(677): n is a, c, g, or t
  misc_feature (679)..(679): n is a, c, g, or t
  misc_feature (681)..(681): n is a, c, g, or t
  misc_feature (689)..(690): n is a, c, g, or t
  misc_feature (695)..(695): n is a, c, g, or t
  misc_feature (697)..(697): n is a, c, g, or t
  misc_feature (703)..(703): n is a, c, g, or t
  misc_feature (719)..(720): n is a, c, g, or t
  misc_feature (739)..(739): n is a, c, g, or t
  misc_feature (758)..(759): n is a, c, g, or t
  misc_feature (761)..(762): n is a, c, g, or t
  misc_feature (780)..(780): n is a, c, g, or t
  misc_feature (786)..(786): n is a, c, g, or t
  misc_feature (798)..(798): n is a, c, g, or t
  misc_feature (807)..(808): n is a, c, g, or t
  misc_feature (812)..(812): n is a, c, g, or t
  misc_feature (817)..(817): n is a, c, g, or t
  misc_feature (819)..(820): n is a, c, g, or t
  misc_feature (823)..(823): n is a, c, g, or t
  misc_feature (826)..(826): n is a, c, g, or t
  misc_feature (828)..(828): n is a, c, g, or t
  misc_feature (831)..(831): n is a, c, g, or t
  misc_feature (833)..(838): n is a, c, g, or t
  misc_feature (842)..(842): n is a, c, g, or t
  misc_feature (850)..(850): n is a, c, g, or t
  misc_feature (861)..(861): n is a, c, g, or t
  misc_feature (948)..(948): n is a, c, g, or t
tggatccgaagcagctgctgcncccatcccttccctggaacagtccattagagtgaagggggaaaaaaaaaataaagaaagaagataggaagtctgcagaatgcggccagagctgaaagaggatganttcantgaagaggnagcatttcaacnaggnttgagcgttcncntgctgggggggtgaggaagaagggaataaatgagcagagacatgggagtgggaggtgtctgggaaaaggaagaatagtngggaggnttccagaaagtnatgtgggaaatgcaggtagggaactggagtgcaaggataaggnatnaaaagtattggtggtttntgagcagtagagnagtgtgaggagtaggaagttaggaaggntaatggataggtggagagagaatggnaggnggaggaggnattataaggaggatgtgattttntaggtaggtgggaatggagtttgaatttggtgagagaagggaaaaaaagaagagaaggagggggtgtgttgacgcatccacgcacgcntacacgcgcagtacgcgcgactgttccactccagngtagacagcgtagcgaccccaangctctgngtcaaaggttcgtcgctgctcgctcggccctcgtcgctgacgtcttaanccctcgctcgcngtnngactgctcgtccgctcngacgggnangngcttcttnngcgtngngggggnaagggttcgccctcanncccacccccagacgctcgngccaccgacgacgtcgacnntnngacaaacctcgttcaggngtccancgagcacacacngagaagttnngtgntgtcnannggnagngngtnannnnnnccancaccaagngccttgcacanctgcgtacctgtcctcccacgttcccggctggtgctcccctcccaaagtcggcgtgggaggtgctcaatgaaggaacatttgcccanc

SEQ ID NO: 497979 - DNA, 157 bp, Homo sapiens
  misc_feature (11)..(11): n is a, c, g, or t
  misc_feature (48)..(48): n is a, c, g, or t
  misc_feature (130)..(130): n is a, c, g, or t
  misc_feature (141)..(141): n is a, c, g, or t
ctagtttaccncttagtgagcattgaggattagggttcagattacttncttaggctgacatggctggtaaggattggagttaggattgcaatctgggtctttgctatagccattattctttccagtatantttaggaaagntctcctgttgtgtcct

SEQ ID NO: 497980 - DNA, 498 bp, Homo sapiens
  misc_feature (250)..(250): n is a, c, g, or t
  misc_feature (395)..(395): n is a, c, g, or t
  misc_feature (422)..(422): n is a, c, g, or t
  misc_feature (442)..(442): n is a, c, g, or t
  misc_feature (448)..(448): n is a, c, g, or t
  misc_feature (481)..(481): n is a, c, g, or t
  misc_feature (487)..(487): n is a, c, g, or t
ggccagtgaagaaattaaggaaaatgaaaaatttcttgaaacacatgataatggaaacacaacatactaaaacctatgagatatagggaaagcagtactaatagggaggtttatagctctaaatgtctacatcaacaacaaaaaacccttcaaataaataacctaacaatgcatcttaaggaactagaaaggcaagagcaaaccaaatccaaaattaataatagaagaaaagaaataataaagttcaatnaaaaagtttttttaaaaagttaaacaaaattgataaacctttagtcagactgaggaaaaatagaggacctaaataaataaaatcagagatttaaaaggaggccgggctggtgggcttcacagtactttggggaggccaaagcggncggttcttttgaggtcaggggcttcangaccagcctgacccaggggntaaaantctggtccaatgttattccccgctaggccgggnggttgngggccggggga

SEQ ID NO: 497981 - DNA, 707 bp, Homo sapiens
tctctctcgtggtgttccgctccgcagtgggccaagtttgaattgatgctgcccggggctcgtgccaaatccgtgaaaggcttccccttcctgtgccccaccggggttccgtgtgctgggcttcctgtgcccctttccgtgctttggcagccagggggttcaggagggtggctcgggttgtgggctggagaggcagaagccctttccgtgtgggtgtcccagcacatgtggagcccttgggctgagcaccaagacctttgaaccttttgggtttaaccttttttccaaattaacagtggggagaaattttcaggtgaaattcggggggtgggggtggggttgaaagggtgggggtgggagatttggaggagtatgaatcagggctgggagttgggtaaaaactttccggtgatatccttcttaaccacgttggctgatggtggggataggtatgaggggaaggaagtggagttagcctatgtgaaagggggtccatagtggagctcggtagataaatgcctgttaacagaggtgggtgggagaccgtgggtgtcgataaagaaattcaatcggatagaaggagtgcaaaagggtcctatagttgggaaagctagtgagaattcaatttatcattgaaaagttatgtcttaaataagattggtgtggaaaagggaatgaagtgtggaaaaaggagtcggagagttgga

SEQ ID NO: 497982 - DNA, 102 bp, Homo sapiens
  misc_feature (1)..(1): n is a, c, g, or t
  misc_feature (53)..(53): n is a, c, g, or t
ncggggactgcgcggcggtgcagagccgggcgtgggcgagaacgaacgggctncctgcggctgagagcgtcgagtgtcaccatgggtatcacgcttggagct

SEQ ID NO: 497983 - DNA, 284 bp, Homo sapiens
atactgaggagtgactttctgaactgaaaactgagctactagcatgatctggatcgcgcaaatcctgaggagagctgtagtatgcctcaagagtgaagggtttcttcctattatatgtgggacctttaggagaaaggagcagcatgatcttggggaaagacttcacagtcccttggacccttcttcagctgagaattccatcgtcagagattttggatacgtactacatcagttatagaaaatctctgacttttaaagctggctataagatggctcacgcaatt

SEQ ID NO: 497984 - DNA, 337 bp, Homo sapiens
  misc_feature (47)..(48): n is a, c, g, or t
agcccctccagccttagcggccccctttggttgggaaaagaagattnngaaaaacccaaagttttggcctgggaagtcccccctcggggcctggggtggcccgttcaaaaaagttttaacaggggggagggttaaggggaaaagggcccccccctgttctttagtttaggcgtgaccccctcccattcttggggttttgacccttttttccaaggggggccccccccaatggggggcccccgggttttttttcccccccccccccccctccccctggggtttaattttgttaaggtggggggggaaaaaaaaaaaaaagggattttttgccccggga

SEQ ID NO: 497985 - DNA, 212 bp, Homo sapiens
acctaatcgcactactgactggtcaagaggaaatgacgccattcttccataacttactatctactacaataaaatggcaggaatatcacagtaatacaactaatggtagagatcctttgaggaccagaataactcatctgaggtaaattaactgataagtcactgaacccatgatagaacccaggttcatttgttatataacctgtttgttc

SEQ ID NO: 497986 - DNA, 891 bp, Homo sapiens
tggaaatagtgtttggctctgttgcccgggctggagtgcaggggcatgatctgggctcgctggggcctccacctctcccgggctcaggcaattccctcctgtgccccagccctcccgggatagcgtgggatttacaggcgttgcacaacgtgcatgtgcacaacctaatttttgtgtattttatagataaagacagggttttcgccatgtgttgtggccaagcgtggctcttcaaactctcctgtgggccctcaaggtgactccgcccaccttacagcctctcccaaacagtgttggggatttttaggcattaaggccaccagagtgcccagagcccagagatattcaccaatattcttttgtgggctcgtgcaagtgtgtaagaaggcacttcaacagaatatgaaatatatggtagccctcactctcaaacacgtgcgagacaaaacaccacacatatttattctcccaggtgttccccacaaatctccagtgtgggaagaaagattaacgacacaagtgattatttacacactcgtgaatgtggtcgggtgtgcaaaaacaaacctttcaaaagttatattacaccttaaatgctggcccgaggggcaaacactctgtgtgtcacacaaactccaccacaagtgggttgaaaaaccattacacgaggtgggcgccaagggtattttgacgaagaaaaaaaccaagcgcacgcagacgaacttttaacttaggggaataatatacagaaccaagcaggttataaacaggcgaacaaataaaattccgtggggtcaacgaaccttaacaggatacaacatacatgttagaaaacacaagaactgtggatgtggaaatacttccttggagaaaatctatcaaaagaggttt

SEQ ID NO: 497987 - DNA, 148 bp, Homo sapiens
tggccctcgctgctccagatcaagtgatcctcccacttcagcctctcgtgtagccaggactacaggagcatgccacagtgcccggctcattttttttttttcttgggtgaaaatggggttcacaccatgtgggaccagccataagatc

SEQ ID NO: 497988 - DNA, 121 bp, Homo sapiens
attcgggccgagatgtcttgctccgtggccttagctgtgctcgcgctactctctctttctgggcttgaggctattcaggcgtacttccaaggtttaaggttaattaacgtactcacagaca

SEQ ID NO: 497989 - DNA, 692 bp, Homo sapiens
agcggaggacgctcagaggattctgacaatatcttaccggagaagaggcaaagtacgctcaaagccgaagccacagctcctcctgccgcatttctttcctgcttgcgaattccaagctgttaaatacagatgtgcaaagggcttgcaggtctgccggcttcttgcttgaggacgtgcaaaacgatatgaaacatcggctaggtttcctgctgcaaaaatctgattcctgtgaacacaattcttcccacaacaagaaggacaaagctggttactctgccagagagtgagccaacgagcgaagtcaagaaatgggctgaactcactggcaaaacctcgattacgtcatgcaatgtgcggctggccagcctttcaaagccttctcttgcaaggtctgacatactaggtgcaggcagcaatcactcgacttctggcatcagctgtgcaagagtacaagacaatcaaatcaccatctaaactaagtcccaaggccaaacaacgatctatacatgaacttcatctcagtccaggcaaccacaagaggtgacacctggattcttgcaccagggcaacgtgacaagccggcacatgctacgagcctacaataacctggctttgatgaggcccatgaagacgattttcaacctgatggacaagggattcctaccgccgcttcctcaagtctcgattctatc

SEQ ID NO: 497990 - DNA, 158 bp, Homo sapiens
cccttaactgaataaattttttttttaaattggctgggccccatgtttgacgcctgaaatctgtaatcccagccctttgggaggctgaggtgggaggattgcttgagccctggagttcaagaccagcccaggcgacatagtgagcccccctttttgta

SEQ ID NO: 497991 - DNA, 101 bp, Homo sapiens
ccgaggtgaagttggggtagtagaaggctttggctgagagaaggaacgtgggttgaactcctttgcattgggattcaatgttgatttcctaacttgctcag

SEQ ID NO: 497992 - DNA, 357 bp, Homo sapiens
  misc_feature (317)..(317): n is a, c, g, or t
  misc_feature (329)..(329): n is a, c, g, or t
  misc_feature (342)..(342): n is a, c, g, or t
acgttgacacttcagtacaagtttaaaaattttagcagaatgatcatagggaaaaacagaccaggcaggatgtttcacccctgtaattccagtactctaggaggccgaggcagatgaatcatttgaggcaagaaacttgagaccagcctggcccacatggcaaaaccctgtctctactgcaaatacaaaaattaactgggcatggtagcacatgcctgtggtcccagctactcaggaggttgagacagaagaatcgcttcaacccgggtggtggaggttgcagtgagccgagattgccccactgcatttcagcctgngcgacagagcangacaccatctcanaaaaaaaaataagta

SEQ ID NO: 497993 - DNA, 151 bp, Homo sapiens
ttgaagggcagagctacaaaacattgtatatttcaaaagacaaaagaagcagcagcagtatcttgttctctaattcatagacaagttgactgtgtttgtggtactttgggtttttaaacactttggggtactaatccctagacattgcctt

SEQ ID NO: 497994 - DNA, 462 bp, Homo sapiens
  misc_feature (47)..(47): n is a, c, g, or t
agcgggaggggccccccgatcatcgagacggcggggtggtgggctanaccagtttcgcgcggccgctcgccgtcccccgcccagtcgtactcggcgccccagctcggtgctgccgccatcttcttggaggacaggaggagaggcgaaggctccccctccccgtgatcgctccgcactcccgccaccacctgccctcccgcgaccgcctctctcctcctcagtgggcacttgtctccttctaacaaacggccttccccccactccagttacccaccgcaaggcgaagattctcattacctgttccactcttataagcataagaaaaccgagctcataaggtaggaactgtggcgaaacagggacaagccgccatcttggtaaaggagaagaggctacgcttgacctccccccccacccccagcctctatatggccaactgccgtgggaggagcacggcgcttg

SEQ ID NO: 497995 - DNA, 754 bp, Homo sapiens
gtgcctcaccttcagaaccaagcctcgtgaagatgacctcttccacgccacgaaatggctccagccgtcccactctccgtgtgacgcaagaaaaacacggtgaaacgcgctaggatcgcgccctccctggtagtcagaaggagcgagtgagagagacacaaccacctggccgggccaaaactgggccaaatgaacaacgggagcacttagtgatgccagaaggacgtggagccaactgagcggagaccggcctctccctaggaacagcgagccggggacctgacgccccaacacgaaccactaatgactttgaggacccaagggcagccaccgtacacctccattcctcgtgctttacctccccatgacaaagaccatgaaagagtcatctcctgatgcggcgttctccggtgcggcccatcatcctcttcatacatcctcatcatcaatgctgctgttcctggccatcttcattacgccttctcgaactatgctggaccatgaagctggtgaagcccttcagctgaggactctcctgacctgtagaagggaccgtggggtcccctcccagcatgggactggcctgcactcctaccgcccagctcgcgagctcctccagacctcctaggcctgattgtccttgccagggtagtccagacagacagcctcggaccggccacactcccagaattgctaacatggagctctgagatcaccccacttccatcaattactgctgcccccaaccctacgt

SEQ ID NO: 497996 - DNA, 1412 bp, Homo sapiens
agcggacatccgcctgcgcgctgggcggggcggggcgggctggggcgggctgtgagcggaccgcgagcgctgggcgggtccgcggcgcggtcggtcggcgcctgttctcgggctgtttggcggacgaagcttcacaaaagatgtctaagcaacagccaactcagtttataaatccagaaacacctggctatgttggatttgcaaacctccccaatcaagttcaccgaaaatcagtgaaaaaaggttttgagttcacactgatggtggtcggtgaatcaggtctaggaaaatcgactctcataaacagcctattcctaactgatctgtacccagaaagagtcatacctggagcagcagaaaaaattgaaagaactgtccagattgaggcttcaactgttgaaattgaagagcgaggggtcaagctacgcctgacagtggtagatacccctggctatggtgacgctatcaactgcagagattgttttaagacaattatctcctatattgatgagcaatttgagaggtacctgcatgacgagagcggcttgaacaggcggcacatcattgataatagggtgcattgttgcttttactttatttcaccttttggacatggacttaagcccttagatgtggcgtttatgaaggcaatacacaacaaggtgaatattgtgcctgtcattgcaaaagctgacactctcaccctgaaggaacgggagcggctgaagaacaaggattctggatgacattgaagaacataacatcaaaatctatcacttacctgatgcagaatcagatgaagatgaagattttaaagagcagactagacttctcaaggctagcatcccattctctgtggttggatccaatcagttgattgaagccaaaggaaagaaggtcagaggccgcctctacccctggggtgttgtggaagtggagaacccagagcacaatgactttctgaagctgagaaccatgctcatcacccacatgcaggatctccaggaggtgacccaggaccttcattatgaaaacttccgttctgagagactcaagagaggcggcaggtcatcacactgtgcccctttctctgtattgtgtcaccctgagccacaatgttcctcctcctctatgtgttcagctcagccttcttgaccattaagcaacatggtttggtttcctactcaaaagttattataaaagagttgttaatttaatcaaattatgctcttttagcctttttaagaaaaagtacatttaatgatatgcacgtaaaaactttaggccaggcacggtggctcatgcctgtaatcccagcaccttgggagaccaaggcaaggtagattgcctgagcgcaggagttttgagaccatgagattacatggtgaagtcccatctctacaaaaatttaa

SEQ ID NO: 497997 - DNA, 288 bp, Homo sapiens
aacttcgaggattcgaaccatgacctcctaccacaaaagccctacgactggaaggcgttgttcctcgtggcgctggccgaagtgccagtgatcgcccacgcctgcaaagcggcgggcgtgaaccgcgtgaccgcctggcgcgcccgcgaggccgacccggagttcgccaaggcctgggacgacgcgatggaggagggcgtcgaccgcgccgagcaggaggccttccgccgggccgtggtgggctatgagaagcccgtttggtacaagggcgtgccggtgggcacggag

SEQ ID NO: 497998 - DNA, 1627 bp, Homo sapiens
  misc_feature (47)..(47): n is a, c, g, or t
agcgggaggggccccccgatcatcgagacggcggggtggtgggctanaccagtttcgcgcggccgctcgccgtcccccgcccagtcgtactcggcgccccagctcggtgctgccgccatcttcttggaggacaggaggagaggcgaaggctccccctccccgtgatcgctccgcactcccgccaccacctgccctcccgcgaccgcctctctcctcctcagtgggcacttgtctccttctaacaaacggccttccccccactccagttacccaccgcaaggcgaagattctcattacctgttccactcttataagcataagaaaaccgagctcataagacgaagcttcacaaaagatgtctaagcaacagccaactcagtttataaatccagaaacacctggctatgttggatttgcaaacctccccaatcaagttcaccgaaaatcagtgaaaaaaggttttgagttcacactgatggtggtcggtgaatcaggtctaggaaaatcgactctcataaacagcctattcctaactgatctgtacccagaaagagtcatacctggagcagcagaaaaaattgaaagaactgtccagattgaggcttcaactgttgaaattgaagagcgaggggtcaagctacgcctgacagtggtagatacccctggctatggtgacgctatcaactgcagagattgttttaagacaattatctcctatattgatgagcaatttgagaggtacctgcatgacgagagcggcttgaacaggcggcacatcattgataatagggtgcattgttgcttttactttatttcaccttttggacatggacttaagcccttagatgtggcgtttatgaaggcaatacacaacaaggtgaatattgtgcctgtcattgcaaaagctgacactctcaccctgaaggaacgggagcggctgaagaacaaggattctggatgacattgaagaacataacatcaaaatctatcacttacctgatgcagaatcagatgaagatgaagattttaaagagcagactagacttctcaaggctagcatcccattctctgtggttggatccaatcagttgattgaagccaaaggaaagaaggtcagaggccgcctctacccctggggtgttgtggaagtggagaacccagagcacaatgactttctgaagctgagaaccatgctcatcacccacatgcaggatctccaggaggtgacccaggaccttcattatgaaaacttccgttctgagagactcaagagaggcggcaggtcatcacactgtgcccctttctctgtattgtgtcaccctgagccacaatgttcctcctcctctatgtgttcagctcagccttcttgaccattaagcaacatggtttggtttcctactcaaaagttattataaaagagttgttaatttaatcaaattatgctcttttagcctttttaagaaaaagtacatttaatgatatgcacgtaaaaactttaggccaggcacggtggctcatgcctgtaatcccagcaccttgggagaccaaggcaaggtagattgcctgagcgcaggagttttgagaccatgagattacatggtgaagtcccatctctacaaaaatttaa

SEQ ID NO: 497999 - DNA, 1727 bp, Homo sapiens
  misc_feature (47)..(47): n is a, c, g, or t
agcgggaggggccccccgatcatcgagacggcggggtggtgggctanaccagtttcgcgcggccgctcgccgtcccccgcccagtcgtactcggcgccccagctcggtgctgccgccatcttcttggaggacaggaggagaggcgaaggctccccctccccgtgatcgctccgcactcccgccaccacctgccctcccgcgaccgcctctctcctcctcagtgggcacttgtctccttctaacaaacggccttccccccactccagttacccaccgcaaggcgaagattctcattacctgttccactcttataagcataagaaaaccgagctcataagcatacagaaactgctgtaaaagaagaagttgtgggtatttttttttttttttggtctggaggaatggggacaccaaaactcatttggcagcagaggtgagacgaagcttcacaaaagatgtctaagcaacagccaactcagtttataaatccagaaacacctggctatgttggatttgcaaacctccccaatcaagttcaccgaaaatcagtgaaaaaaggttttgagttcacactgatggtggtcggtgaatcaggtctaggaaaatcgactctcataaacagcctattcctaactgatctgtacccagaaagagtcatacctggagcagcagaaaaaattgaaagaactgtccagattgaggcttcaactgttgaaattgaagagcgaggggtcaagctacgcctgacagtggtagatacccctggctatggtgacgctatcaactgcagagattgttttaagacaattatctcctatattgatgagcaatttgagaggtacctgcatgacgagagcggcttgaacaggcggcacatcattgataatagggtgcattgttgcttttactttatttcaccttttggacatggacttaagcccttagatgtggcgtttatgaaggcaatacacaacaaggtgaatattgtgcctgtcattgcaaaagctgacactctcaccctgaaggaacgggagcggctgaagaacaaggattctggatgacattgaagaacataacatcaaaatctatcacttacctgatgcagaatcagatgaagatgaagattttaaagagcagactagacttctcaaggctagcatcccattctctgtggttggatccaatcagttgattgaagccaaaggaaagaaggtcagaggccgcctctacccctggggtgttgtggaagtggagaacccagagcacaatgactttctgaagctgagaaccatgctcatcacccacatgcaggatctccaggaggtgacccaggaccttcattatgaaaacttccgttctgagagactcaagagaggcggcaggtcatcacactgtgcccctttctctgtattgtgtcaccctgagccacaatgttcctcctcctctatgtgttcagctcagccttcttgaccattaagcaacatggtttggtttcctactcaaaagttattataaaagagttgttaatttaatcaaattatgctcttttagcctttttaagaaaaagtacatttaatgatatgcacgtaaaaactttaggccaggcacggtggctcatgcctgtaatcccagcaccttgggagaccaaggcaaggtagattgcctgagcgcaggagttttgagaccatgagattacatggtgaagtcccatctctacaaaaatttaa

SEQ ID NO: 498000 - DNA, 158 bp, Homo sapiens
aaataaaatgactcgtatgaaattataaaaattgaaataatagattatttttaaaaaaatttagttgataacatgaaattttcatacctacaaactaaacagttctttttttagcaattcaaatgtccattttataattaaatgaaattaataatgtg

SEQ ID NO: 498001 - DNA, 156 bp, Homo sapiens
gggttagctcggagtgtgcatgttggtcctcggcgtgtgcagcaacaacttcgttcatagagacttgacttcaagaagtgtgggcactcgagcgtgtgcaacacgccgatataaccaaaccacatgagctaaagatcggagtgaacgaagttgttg

SEQ ID NO: 498002 - DNA, 1625 bp, Homo sapiens
agcggacatccgcctgcgcgctgggcggggcggggcgggctggggcgggctgtgagcggaccgcgagcgctgggcgggtccgcggcgcggtcggtcggcgcctgttctcgggctgtttggcggaggactggccagcccccaaacctccaagcccatcggctggatgccgtggataagcgaggggagagcgactaggccctgtctgcgggtaccttcggcgaggagaggcgacgaagcatacagaaactgctgtaaaagaagaagttgtgggtatttttttttttttttggtctggaggaatggggacaccaaaactcatttggcagcagaggtgagacgaagcttcacaaaagatgtctaagcaacagccaactcagtttataaatccagaaacacctggctatgttggatttgcaaacctccccaatcaagttcaccgaaaatcagtgaaaaaaggttttgagttcacactgatggtggtcggtgaatcaggtctaggaaaatcgactctcataaacagcctattcctaactgatctgtacccagaaagagtcatacctggagcagcagaaaaaattgaaagaactgtccagattgaggcttcaactgttgaaattgaagagcgaggggtcaagctacgcctgacagtggtagatacccctggctatggtgacgctatcaactgcagagattgttttaagacaattatctcctatattgatgagcaatttgagaggtacctgcatgacgagagcggcttgaacaggcggcacatcattgataatagggtgcattgttgcttttactttatttcaccttttggacatggacttaagcccttagatgtggcgtttatgaaggcaatacacaacaaggtgaatattgtgcctgtcattgcaaaagctgacactctcaccctgaaggaacgggagcggctgaagaacaaggattctggatgacattgaagaacataacatcaaaatctatcacttacctgatgcagaatcagatgaagatgaagattttaaagagcagactagacttctcaaggctagcatcccattctctgtggttggatccaatcagttgattgaagccaaaggaaagaaggtcagaggccgcctctacccctggggtgttgtggaagtggagaacccagagcacaatgactttctgaagctgagaaccatgctcatcacccacatgcaggatctccaggaggtgacccaggaccttcattatgaaaacttccgttctgagagactcaagagaggcggcaggtcatcacactgtgcccctttctctgtattgtgtcaccctgagccacaatgttcctcctcctctatgtgttcagctcagccttcttgaccattaagcaacatggtttggtttcctactcaaaagttattataaaagagttgttaatttaatcaaattatgctcttttagcctttttaagaaaaagtacatttaatgatatgcacgtaaaaactttaggccaggcacggtggctcatgcctgtaatcccagcaccttgggagaccaaggcaaggtagattgcctgagcgcaggagttttgagaccatgagattacatggtgaagtcccatctctacaaaaatttaa

SEQ ID NO: 498003 - DNA, 1670 bp, Homo sapiens
  misc_feature (47)..(47): n is a, c, g, or t
agcgggaggggccccccgatcatcgagacggcggggtggtgggctanaccagtttcgcgcggccgctcgccgtcccccgcccagtcgtactcggcgccccagctcggtgctgccgccatcttcttggaggacaggaggagaggcgaaggctccccctccccgtgatcgctccgcactccttctaacaaacggccttccccccactccagttacccaccgcaaggcgaagattctcattacctgttccactcttataagcataagaaaaccgagctcataagcatacagaaactgctgtaaaagaagaagttgtgggtatttttttttttttttggtctggaggaatggggacaccaaaactcatttggcagcagaggtgagacgaagcttcacaaaagatgtctaagcaacagccaactcagtttataaatccagaaacacctggctatgttggatttgcaaacctccccaatcaagttcaccgaaaatcagtgaaaaaaggttttgagttcacactgatggtggtcggtgaatcaggtctaggaaaatcgactctcataaacagcctattcctaactgatctgtacccagaaagagtcatacctggagcagcagaaaaaattgaaagaactgtccagattgaggcttcaactgttgaaattgaagagcgaggggtcaagctacgcctgacagtggtagatacccctggctatggtgacgctatcaactgcagagattgttttaagacaattatctcctatattgatgagcaatttgagaggtacctgcatgacgagagcggcttgaacaggcggcacatcattgataatagggtgcattgttgcttttactttatttcaccttttggacatggacttaagcccttagatgtggcgtttatgaaggcaatacacaacaaggtgaatattgtgcctgtcattgcaaaagctgacactctcaccctgaaggaacgggagcggctgaagaacaaggattctggatgacattgaagaacataacatcaaaatctatcacttacctgatgcagaatcagatgaagatgaagattttaaagagcagactagacttctcaaggctagcatcccattctctgtggttggatccaatcagttgattgaagccaaaggaaagaaggtcagaggccgcctctacccctggggtgttgtggaagtggagaacccagagcacaatgactttctgaagctgagaaccatgctcatcacccacatgcaggatctccaggaggtgacccaggaccttcattatgaaaacttccgttctgagagactcaagagaggcggcaggtcatcacactgtgcccctttctctgtattgtgtcaccctgagccacaatgttcctcctcctctatgtgttcagctcagccttcttgaccattaagcaacatggtttggtttcctactcaaaagttattataaaagagttgttaatttaatcaaattatgctcttttagcctttttaagaaaaagtacatttaatgatatgcacgtaaaaactttaggccaggcacggtggctcatgcctgtaatcccagcaccttgggagaccaaggcaaggtagattgcctgagcgcaggagttttgagaccatgagattacatggtgaagtcccatctctacaaaaatttaa

SEQ ID NO: 498004 - DNA, 133 bp, Homo sapiens
attcagcaaaactgagccattggagaggggtcctcgcctcggttttttagtttaacccctatgaagaattctgacgactccacagagagacacacagacacacatactttcctggttaatgactccggacgtc

SEQ ID NO: 498005 - DNA, 4276 bp, Homo sapiens
ggaggcggaggggagcggagcccggagcgtcgtggaaagcattggacacatttccaccatgctaatggcattttaaatatatttggcaattttcccaattttttactgaagaaaactgtaagtttatacttgaggactgaagtgtgactctgccgattatcaggctttcaagatgaatctggaaaaactcagcaagcctgaactcctgacactatttagtattcttgaaggagagcttgaagcaagggaccttgttatagaagccttaaaggcccaacacagagatactttcattgaagaacgctatggaaaatataacatcagtgatcctttaatggctctacagagagattttgaaacactgaaggagaaaaatgatggcgaaaagcagccagtctgcacaaacccactctctattcttaaggttgtgatgaagcagtgcaagaacatgcaggagcgcatgctgtcccagctggctgctgctgagagcaggcaccgaaaggtgatcctagaccttgaggaagaaaggcagcggcatgcacaggatacggctgaaggagatgatgtcacctacatgctagagaaggaaagagagaggctgactcaacagttggaatttgaaaaatcccaagtgaaaaagtttgaaaaagaacagaagaagctctctagtcagctggaagaggagcgctcccgccacaagcagctctcatccatgctagtgcttgagtgcaagaaagccaccaacaaggcagccgaggaaggacagaaggcaggagagctgagcctgaaattggagaaggagaagagccgggtgagtaaactggaagaagagttggcagctgagagaaagagaggcttgcagactgaggcccaggtagagaagcagttatcagagtttgacatcgaaagggaacaactgagagcaaaactgaaccgagaagagaaccggaccaaaaccctgaaagaagaaatggaaagtttaaagaagatagtgaaggacctagaggcttcccaccagcacagtagccctaatgagcaattgaagaaaccagtaaccgtgtccaaaggcacagcaactgagcctctcatgctaatgtctgtgttttgccaaacagagagttttccagcagaaagaacccatgggagcaacatagccaagatgacaaacactgggctgcctggtcctgccactcctgcttactcatatgcaaaaaccaatggccattgtgacccagagatacaaactaccagggagctgactgcaggcaacaatgtagaaaaccaagtgcctccacgggaaaaatctgtggcattggcccaagagaaaccagtggagaatggtgggtgtcctgtggggattgagactccagtcccaatgcccagtcccctctcttccagtgggagctcactgtctcccagcagcactgcctcctcctctctaacatcctctccttgctcttcgccggtactcactaagcgtttattggggtcatcagctagcagccctggctaccagtcatcgtaccaagtagggatcaaccaacggttccatgcagctcgccacaaatttcagtcccaagcagatcaggaccaacaagccagtggcctacagagccctccatccagggatttatcccccaccctcatagacaactctgccgccaagcagctggcccgaaacacagtcactcaggtgctctccagattcactagccaacaagggccaatcaagccagtctctcccaacagctctccctttggcacagactatcgaaatctagccaacactgccaatccaagaggtgacacaagccattcacctactccagggaaagtgtccagtcccctgagccccctgtctccaggaatcaagtccccaaccatccccagagctgagagaggaaaccctccacccatcccacccaagaaacctggcctcaccccttctccatctgctaccactccattgaccaaaactcattcccaggcagcctctttgaccactgcagaagaccttgccagcagctgctcttccaatactgttgtagcaaatggtaaggatgttgagttacttttgcctaccagcagctagtccctaggagggagtctccacgtttgacattccatcagatttcgtccaaaagctcagtcagacttctgagtcagattatgttatttattttgatagtagctgaaaccatctgtataatacatttagtatatttcaccatgttggccaggctggtcttgaactcctgacctcaagtggtctgcctacctcggcctcccaaagtgctggaattacaggcgtgagcatcacgtctggcctaatttttttaatcgaatttatttttgtaatgatagatgcttgtcttattcctagggaaatatttgaagtaattgagatgctgtcacctaaaataatcaaaaggctcctgattcagttaaaagaattcatttaagtacagagtgtaagcgagctacaccaaagaatggtgattagcgctcccagggtggggaaaaatgaggattgtttatataggcaaaatggaggtgccaaacagaattataacattttcggaactaaggctcatttaaagatacaaatttgattggctactattgattacacttgaagggatttgtttaacttccttttgtaaagaagtaacagtcataaggatctctcatctcccagtcatttagtctagttttgaataaagaatagggggtctggttaatatatacatctaaacacaaaagtcagaaagaataaaagtagtgatgttacacgagccagctgtcagtgcttaacttttccctttggcctaatgcatttggaaggtcctgaaattgtattttctttttacattgcctatgtatgtgtaagtcttcttcaggtcagttcacgctgttaaatatacgtgcgtatacatacatactatgtatgtgcgtttatgtgtgtctgtgtgttttttttttaacagacgaagcttcacaaaagatgtctaagcaacagccaactcagtttataaatccagaaacacctggctatgttggatttgcaaacctccccaatcaagttcaccgaaaatcagtgaaaaaaggttttgagttcacactgatggtggtcggtgaatcaggtctaggaaaatcgactctcataaacagcctattcctaactgatctgtacccagaaagagtcatacctggagcagcagaaaaaattgaaagaactgtccagattgaggcttcaactgttgaaattgaagagcgaggggtcaagctacgcctgacagtggtagatacccctggctatggtgacgctatcaactgcagagattgttttaagacaattatctcctatattgatgagcaatttgagaggtacctgcatgacgagagcggcttgaacaggcggcacatcattgataatagggtgcattgttgcttttactttatttcaccttttggacatggacttaagcccttagatgtggcgtttatgaaggcaatacacaacaaggtgaatattgtgcctgtcattgcaaaagctgacactctcaccctgaaggaacgggagcggctgaagaacaaggattctggatgacattgaagaacataacatcaaaatctatcacttacctgatgcagaatcagatgaagatgaagattttaaagagcagactagacttctcaaggctagcatcccattctctgtggttggatccaatcagttgattgaagccaaaggaaagaaggtcagaggccgcctctacccctggggtgttgtggaagtggagaacccagagcacaatgactttctgaagctgagaaccatgctcatcacccacatgcaggatctccaggaggtgacccaggaccttcattatgaaaacttccgttctgagagactcaagagaggcggcaggtcatcacactgtgcccctttctctgtattgtgtcaccctgagccacaatgttcctcctcctctatgtgttcagctcagccttcttgaccattaagcaacatggtttggtttcctactcaaaagttattataaaagagttgttaatttaatcaaattatgctcttttagcctttttaagaaaaagtacatttaatgatatgcacgtaaaaactttaggccaggcacggtggctcatgcctgtaatcccagcaccttgggagaccaaggcaaggtagattgcctgagcgcaggagttttgagaccatgagattacatggtgaagtcccatctctacaaaaatttaa

SEQ ID NO: 498006 - DNA, 245 bp, Homo sapiens
  misc_feature (62)..(62): n is a, c, g, or t
gacagtgagggtaataatgactgtgtgggttgattgtagatattggggctgttaattgtcantgtacagtgttttaattctggacgcagagcttatgccggaggcagaattgttttcatggttacttaatatctaacattatgttctatctatagggtagatagattgggctccaattgggttgtgagcgagttcacgttatatgttgtgggattttttacggtagtagggtgttgacgcttgaa

SEQ ID NO: 498007 - DNA, 3210 bp, Homo sapiens
agcggacatccgcctgcgcgctgggcggggcggggcgggctggggcgggctgtgagcggaccgcgagcgctgggcgggtccgcggcgcggtcggtcggcgcctgttctcgggctgtttggcggaggactggccagcccccaaacctccaagcccatcggctggatgccgtggataagcgaggggagagcgactaggccctgtctgcgggtaccttcggcgaggagaggcgacgaagcatacagaaactgctgtaaaagaagaagttgtgggtatttttttttttttttggtctggaggaatggggacaccaaaactcatttggcagcagaggtgagacgaagcttcacaaaagatgtctaagacgggagtcttgttctgtcaccaggctggagtgcagtggcatgatctcagctcactgcaacttctgcctcccacgttcaagcgattcccctggctcagcctccggagtagctgggactgcagacacgtgccaccacgctggctaattttttggattttagtaaattcggggtttcaccgtgttggccaggatggccttgatctgttgacctcgtgatccacccgctttggccccccgaagtgttgggattacaggtgtgagccaccgtgcctggcctaattgtcatcttaaaagcttggagctttctcttttttcaggcttctactttcttttctctacacacatcagtaacagtccttttggcccccttagttcattcccagcagaccagataatttagaattctgataatttattatgatgaaattgatggggctcttagacttgataaattggtttaaatcagcctttgcaagttagttcagagataaattagtgctaaagaacatattctgagaaaagcagaacttgtggttaacattgcaagattattatttctgttttttttttatctttgaatcctgtgggtgttcattactgtccaatgcaaaatcatcataccagtttttgcattttataccagtgttagcatggaacacagataagcaaaaaaaaaaagtcattatttcaccactcaggaataaccactgttaatatgttacatatattctttttcacctgtgtgtgcatttgactatacatttacaaaatgtaatcctaaaggaaatactattttgtatcttgcctttttcaattaataaattgatttttaaaatttcttctcattttcagtatgccactgtctagattctggttacttctgctattcttgccttctcatatctctgtcctctctctcatcagatacccttctgtcaaggaatattgatgcttcagtgtagtcatctatgatcttctcattctgtcttttctttcttggtctttgacactagatactcaacatcccacccctaatttgcctgcctcacccttgatgaaactctgttctatagagctagaagcacagcaagagagatgcttttttcctcgatacttttcagaaatgcattgcacctaatacctgggagaagctattctttagccaagtttgttgaatgaaaccattcattcaaagtactgtcagctgtagcagtactttgtaagcttgactgattttcctggaactccatagtctctcaagtcgaaatttgaaattgcattaagatgtattaagcatgtatcttctatgtattgttaaattcctaaacagaatactgattaacaaaatgttaattttcagtcgcatacaactaaggagttatactagataagtttttctttttttaatgctcctagttgaatactactggttttctgatagaagtatgactttctggaagtgtttatactttttaaaaaatttgtgaaaactgataacctatgtttgtttcatgtctaactgattatatcttaaaagcaactactaaggtgtttattagtttgtttgttttttaatcttatttagcaacagccaactcagtttataaatccagaaacacctggctatgttggatttgcaaacctccccaatcaagttcaccgaaaatcagtgaaaaaaggttttgagttcacactgatggtggtcggtgaatcaggtctaggaaaatcgactctcataaacagcctattcctaactgatctgtacccagaaagagtcatacctggagcagcagaaaaaattgaaagaactgtccagattgaggcttcaactgttgaaattgaagagcgaggggtcaagctacgcctgacagtggtagatacccctggctatggtgacgctatcaactgcagagattgttttaagacaattatctcctatattgatgagcaatttgagaggtacctgcatgacgagagcggcttgaacaggcggcacatcattgataatagggtgcattgttgcttttactttatttcaccttttggacatggacttaagcccttagatgtggcgtttatgaaggcaatacacaacaaggtgaatattgtgcctgtcattgcaaaagctgacactctcaccctgaaggaacgggagcggctgaagaacaaggattctggatgacattgaagaacataacatcaaaatctatcacttacctgatgcagaatcagatgaagatgaagattttaaagagcagactagacttctcaaggctagcatcccattctctgtggttggatccaatcagttgattgaagccaaaggaaagaaggtcagaggccgcctctacccctggggtgttgtggaagtggagaacccagagcacaatgactttctgaagctgagaaccatgctcatcacccacatgcaggatctccaggaggtgacccaggaccttcattatgaaaacttccgttctgagagactcaagagaggcggcaggtcatcacactgtgcccctttctctgtattgtgtcaccctgagccacaatgttcctcctcctctatgtgttcagctcagccttcttgaccattaagcaacatggtttggtttcctactcaaaagttattataaaagagttgttaatttaatcaaattatgctcttttagcctttttaagaaaaagtacatttaatgatatgcacgtaaaaactttaggccaggcacggtggctcatgcctgtaatcccagcaccttgggagaccaaggcaaggtagattgcctgagcgcaggagttttgagaccatgagattacatggtgaagtcccatctctacaaaaatttaa

SEQ ID NO: 498008 - DNA, 150 bp, Homo sapiens
tgatgatgaatagcccaactccaaaacaattctgatgaaacaaaatcacagcacccacctaccatacaggcaggcacaaggggggcaggcaaggcaattctgccccaaacccaggccaggctcctttccctttttccatcatctcttttt

SEQ ID NO: 498009 - DNA, 1982 bp, Homo sapiens
  misc_feature (47)..(47): n is a, c, g, or t
agcgggaggggccccccgatcatcgagacggcggggtggtgggctanaccagtttcgcgcggccgctcgccgtcccccgcccagtcgtactcggcgccccagctcggtgctgccgccatcttcttggaggacaggaggagaggcgaaggctccccctccccgtgatcgctccgcactcccgccaccacctgccctcccgcgaccgcctctctcctcctcagtgggcacttgtctccttctaacaaacggccttccccccactccagttacccaccgcaaggcgaagattctcattacctgttccactcttataagcataagaaaaccgagctcataagcatacagaaactgctgtaaaagaagaagttgtgggtatttttttttttttttggtctggaggaatggggacaccaaaactcatttggcagcagaggtgaggacgaagcttcacaaaagatgtctaagacgggagtcttgttctgtcaccaggctggagtgcagtggcatgatctcagctcactgcaacttctgcctcccacgttcaagcgattcccctggctcagcctccggagtagctgggactgcagacacgtgccaccacgctggctaattttttggattttagtaaattcggggtttcaccgtgttggccaggatggccttgatctgttgacctcgtgatccacccgctttggccccccgaagtgttgggattacagcaacagccaactcagtttataaatccagaaacacctggctatgttggatttgcaaacctccccaatcaagttcaccgaaaatcagtgaaaaaaggttttgagttcacactgatggtggtcggtgaatcaggtctaggaaaatcgactctcataaacagcctattcctaactgatctgtacccagaaagagtcatacctggagcagcagaaaaaattgaaagaactgtccagattgaggcttcaactgttgaaattgaagagcgaggggtcaagctacgcctgacagtggtagatacccctggctatggtgacgctatcaactgcagagattgttttaagacaattatctcctatattgatgagcaatttgagaggtacctgcatgacgagagcggcttgaacaggcggcacatcattgataatagggtgcattgttgcttttactttatttcaccttttggacatggacttaagcccttagatgtggcgtttatgaaggcaatacacaacaaggtgaatattgtgcctgtcattgcaaaagctgacactctcaccctgaaggaacgggagcggctgaagaacaaggattctggatgacattgaagaacataacatcaaaatctatcacttacctgatgcagaatcagatgaagatgaagattttaaagagcagactagacttctcaaggctagcatcccattctctgtggttggatccaatcagttgattgaagccaaaggaaagaaggtcagaggccgcctctacccctggggtgttgtggaagtggagaacccagagcacaatgactttctgaagctgagaaccatgctcatcacccacatgcaggatctccaggaggtgacccaggaccttcattatgaaaacttccgttctgagagactcaagagaggcggcaggtcatcacactgtgcccctttctctgtattgtgtcaccctgagccacaatgttcctcctcctctatgtgttcagctcagccttcttgaccattaagcaacatggtttggtttcctactcaaaagttattataaaagagttgttaatttaatcaaattatgctcttttagcctttttaagaaaaagtacatttaatgatatgcacgtaaaaactttaggccaggcacggtggctcatgcctgtaatcccagcaccttgggagaccaaggcaaggtagattgcctgagcgcaggagttttgagaccatgagattacatggtgaagtcccatctctacaaaaatttaa

SEQ ID NO: 498010 - DNA, 2235 bp, Homo sapiens
gttggcgtcgtgcgaggccacgcccggggactagtaacttttcactttgtaaagtactttgaaatgctggaaaatatttcaagaactagtggagagaactctagcacaatccatagttgatttctctggcctttccccctattttctcccagatttgttgtgctgttcacagatgacctgggccacatttcccagtggagctccatcatggctgggagtctcgcaggcatggtttccaccattgtaacatatcctacagacctcatcaaaaccatttgttgtgctgttcacagatgacctgggccacatttcccagtggagctccatcatggctgggagtctcgcaggcatggtttccaccattgtaacatatcctacagacctcatcaaaacccggttgatcatgcagaacatactggaaccatcgtacagggggctcctccatgctttttctactatttaccaacaggaagggttccttgccctttatcgaggggtttccctcactgttgtagggattttagcaaccccagagcccctcctgttttctttccccggaatccccccaggaatttatgttctcaagccagtgttttcccaagacagcagcagcttctccctggccttgttttgcaggtgctctcccgttctctgctggctcccttcttgtttacatgaacctggagaagtgctctcccgttctctgctggctcccttcttgtttacatgaacctggagaaaatctggaacggaccccgagatcagttctctctcccacagaactttgctaatgtctgtctggctgctgcagtgacccagaccctctcctttccctttgagaccgtgaagagaaagatgcaggccatcatcttggccaggaacccagcatccagaatgtagacttgagaccctggctccttccactaggacatttatttcctaatgtttcaatcacctcatcccagcttctgtttcctgtcaggctcagagcccctagctcagagcccctacctcccacacagtggaggagtagatgtccatttctcaggagcagtggactgcttccggcagatagtgaaggcccagggggtcctggggctctggaatggattgacagccaatttactgaagtgtattgccaccgccattatctcactttacaagataatttaccctgatccaagttgactgcagacacattgatgttttctttttaagaacttaacttgattttcatttttggttttaacagatagttccatattttggaattatgtttagcacctttgagttctgcaagagaatctgtctttatcaaaatggttacattctgtctccactgagctataaattgaccccaggagtcgatcagagtttgcagccccaggaattacgagaattaaagaagttcttcaaaacgagaaaaccgaagcctaaaaaaccaactctataaaatggaatggaactagaagtgcactgactgacagcatgttgcaatcacagataaatgtagcctcataactgtgcacctgaggagggatgagaagctactgctatctgctgctctgggaaatgagatggtttggccatgcaccacctcagatctccaaactgatgtccctgtgaacacctgcactatgagaaggtttcccaacaagagtgtatcatgatggcattccacgaatagttccatattttggaattatgtttagcacctttgagttctgcaagagaatctgtctttatcaaaatggttacattctgtctccactgagctataaattgaccccaggagtcgatcagagtttgcagccccaggaattacgagaattaaagaagttcttcaaaacgagaaaaccgaagcctaaaaaaccaactctataaaatggaatggaactagaagtgcactgactgacagcatgttgcaatcacagataaatgtagcctcataactgtgcacctgaggagggatgagaagctactgctatctgctgctctgggaaatgagatggtttggccatgcaccacctcagatctccaaactgatgtccctgtgaacacctgcactatgagaaggtttcccaacaagagtgtatcatgatggcattccacgagattttataaccagagtctagcagtgataaaatgtacaatttacgctctgaatagaaacatgacaccaaagaaagggcattgccatgacatctcaaagcaacaggtaattgaagtggctga

SEQ ID NO: 498011 - DNA, 3461 bp, Homo sapiens
  misc_feature (47)..(47): n is a, c, g, or t
agcgggaggggccccccgatcatcgagacggcggggtggtgggctanaccagtttcgcgcggccgctcgccgtcccccgcccagtcgtactcggcgccccagctcggtgctgccgccatcttcttggaggacaggaggagaggcgaaggctccccctccccgtgatcgctccgcactcccgccaccacctgccctcccgcgaccgcctctctcctcctcagtgggcacttgtctccttctaacaaacggccttccccccactccagttacccaccgcaaggcgaagattctcattacctgttccactcttataagcataagaaaaccgagctcataagggcttggaatagttaaatgactttggtcttgtccaaggttagatggagttcaactctaacgtcaagtcttggtccttttcattgacgaagcttcacaaaagatgtctaaggtaagatcatacttcatgtatctacagcataaggagaaattgctttatgttttcagactgttgacagtcgggacttatatgattcattatttttaatacaactgatacatttgattcattaacacaaagagttctaatttagttgtctttttttttttttttgagacgggagtcttgttctgtcaccaggctggagtgcagtggcatgatctcagctcactgcaacttctgcctcccacgttcaagcgattcccctggctcagcctccggagtagctgggactgcagacacgtgccaccacgctggctaattttttggattttagtaaattcggggtttcaccgtgttggccaggatggccttgatctgttgacctcgtgatccacccgctttggccccccgaagtgttgggattacaggtgtgagccaccgtgcctggcctaattgtcatcttaaaagcttggagctttctcttttttcaggcttctactttcttttctctacacacatcagtaacagtccttttggcccccttagttcattcccagcagaccagataatttagaattctgataatttattatgatgaaattgatggggctcttagacttgataaattggtttaaatcagcctttgcaagttagttcagagataaattagtgctaaagaacatattctgagaaaagcagaacttgtggttaacattgcaagattattatttctgttttttttttatctttgaatcctgtgggtgttcattactgtccaatgcaaaatcatcataccagtttttgcattttataccagtgttagcatggaacacagataagcaaaaaaaaaaagtcattatttcaccactcaggaataaccactgttaatatgttacatatattctttttcacctgtgtgtgcatttgactatacatttacaaaatgtaatcctaaaggaaatactattttgtatcttgcctttttcaattaataaattgatttttaaaatttcttctcattttcagtatgccactgtctagattctggttacttctgctattcttgccttctcatatctctgtcctctctctcatcagatacccttctgtcaaggaatattgatgcttcagtgtagtcatctatgatcttctcattctgtcttttctttcttggtctttgacactagatactcaacatcccacccctaatttgcctgcctcacccttgatgaaactctgttctatagagctagaagcacagcaagagagatgcttttttcctcgatacttttcagaaatgcattgcacctaatacctgggagaagctattctttagccaagtttgttgaatgaaaccattcattcaaagtactgtcagctgtagcagtactttgtaagcttgactgattttcctggaactccatagtctctcaagtcgaaatttgaaattgcattaagatgtattaagcatgtatcttctatgtattgttaaattcctaaacagaatactgattaacaaaatgttaattttcagtcgcatacaactaaggagttatactagataagtttttctttttttaatgctcctagttgaatactactggttttctgatagaagtatgactttctggaagtgtttatactttttaaaaaatttgtgaaaactgataacctatgtttgtttcatgtctaactgattatatcttaaaagcaactactaaggtgtttattagtttgtttgttttttaatcttatttagcaacagccaactcagtttataaatccagaaacacctggctatgttggatttgcaaacctccccaatcaagttcaccgaaaatcagtgaaaaaaggttttgagttcacactgatggtggtcggtgaatcaggtctaggaaaatcgactctcataaacagcctattcctaactgatctgtacccagaaagagtcatacctggagcagcagaaaaaattgaaagaactgtccagattgaggcttcaactgttgaaattgaagagcgaggggtcaagctacgcctgacagtggtagatacccctggctatggtgacgctatcaactgcagagattgttttaagacaattatctcctatattgatgagcaatttgagaggtacctgcatgacgagagcggcttgaacaggcggcacatcattgataatagggtgcattgttgcttttactttatttcaccttttggacatggacttaagcccttagatgtggcgtttatgaaggcaatacacaacaaggtgaatattgtgcctgtcattgcaaaagctgacactctcaccctgaaggaacgggagcggctgaagaacaaggattctggatgacattgaagaacataacatcaaaatctatcacttacctgatgcagaatcagatgaagatgaagattttaaagagcagactagacttctcaaggctagcatcccattctctgtggttggatccaatcagttgattgaagccaaaggaaagaaggtcagaggccgcctctacccctggggtgttgtggaagtggagaacccagagcacaatgactttctgaagctgagaaccatgctcatcacccacatgcaggatctccaggaggtgacccaggaccttcattatgaaaacttccgttctgagagactcaagagaggcggcaggtcatcacactgtgcccctttctctgtattgtgtcaccctgagccacaatgttcctcctcctctatgtgttcagctcagccttcttgaccattaagcaacatggtttggtttcctactcaaaagttattataaaagagttgttaatttaatcaaattatgctcttttagcctttttaagaaaaagtacatttaatgatatgcacgtaaaaactttaggccaggcacggtggctcatgcctgtaatcccagcaccttgggagaccaaggcaaggtagattgcctgagcgcaggagttttgagaccatgagattacatggtgaagtcccatctctacaaaaatttaa

SEQ ID NO: 498012 - DNA, 1041 bp, Homo sapiens
atttaaccatctcacttctaggaatactagtatatcgctcacacctcatatcctccctactatgcctagaaggaataatactatcgctgttcattatagctactctcagttaacccgtcaacacccgactccctcttagccaatatgtgcctatgccatactagtctttgccgcctgcgaagcagcggtgggcctagccctactagtctcaatctccaacacatatggcctagactacgtacataacctaaacctacgtccaatgctaaaactaagtcgtcccaacaattatattactaccactgacatgactttccaaaaaacacataatttgaatcaacgacaaccaccacaggctaattattagcgatcatccctctactattttttaaccaaatcaacaacaacctatttagctgttccccaacttttcctccgatgcccgctaaaagaccccctccataagtactatatcataggcgtgactccctacctcctcacgaatcatggtaaggccaatcgccatttatccgagtgaaccactatcacgaagaaaaactctaacctcctctatacgtaatctccctacaaatctcctttaatttattaaccattcccaggcaacagaactaaattcatattgaatattttttttgaaacgacacttaattctcaaccgttggggtatcaatcaagccggatgaagacaacaaggcaggaaggcttgaaggccaggacaacatatcttcctatttgttacgccctgatagggatccgtttccgaataaatcgccgtggattagctcacaaaaaccctgggccccgaaaagcacgctagaccgacctcagtgcccgaagcattaaaccctgtcgcagcagaaaatgtatgcaggtcaccacaggtgttatgtagaggagaacctctccggcgcgtagtagaccaccagagagaacgcaccacgggtgagatacggcgccagcacaaacgccggtggctgcaccacacctcacccagcaagacaccgcgggcattgagacaga

SEQ ID NO: 498013 - DNA, 114 bp, Homo sapiens
  misc_feature (41)..(41): n is a, c, g, or t
  misc_feature (72)..(72): n is a, c, g, or t
  misc_feature (84)..(84): n is a, c, g, or t
cacctcacatcgaggaatacagatgtacgagtccaatggcntacaccatggtctactggcatgcactggacntctggagatgcntcccagtacaggctgtgtttgcccggggaa

SEQ ID NO: 498014 - DNA, 951 bp, Homo sapiens
tgcacgaggagcagcggcggcgagcgcctcggagcggcggcggaacagcgccccccgagcccgtgcccccgacgggtccgcctgaccagcacgcactacccgaggagcgtcggccgggcccagtgagggcgagcactccgcaacaatttggcatccggccgagcgaatctcggctgtagctctacgggtgctcgcgcagcgatcagtacacgccagaggcccggcagcatcagctgccagtcaccgcagacaccacgacgccaccaagggctcagctagacacccgtggaatacaaagcagggctcaggaactcaacgccctcccgcgcagtaaagacccaagaacatacaactagacctatagacaaaaaaatctcacgaagacaccagaacagacctagcgaaacgtggccaatagacaatagtcctccaagcaacaagtagactcagagacccacaacaccggcaacacagacaacacacagctagagccataggaccgtaaaaccacaacaagaaaaaaacaaacaacagacgacacaacaagaaaagccccacgaacgcccataacgggagacacagcgacacacaccctaaaaatgctggacaccaaagaacaaaaaaaacacccgctagcacagataaacagaacacaaaacaaaatgacacagctaaataaacacatacagaacgaagaaaacacacacaaatacaccttaattataccacacaaaagagaaacagcaccagcagacaaaggaaacaacacacaacacacacaacaccacagcaagaacccccccaatcacaacgagcaccacaacgcacaaaaacaccacaaccaacaagaacccaacacaaacaccaacgagtaccacagacacccagtgccgacccgaccgtacaaccacaataagataaaacagccacaacctcacaatcaagaaacaa

SEQ ID NO: 498015 - DNA, 682 bp, Homo sapiens
  misc_feature (105)..(105): n is a, c, g, or t
  misc_feature (190)..(190): n is a, c, g, or t
  misc_feature (260)..(260): n is a, c, g, or t
  misc_feature (273)..(273): n is a, c, g, or t
  misc_feature (323)..(323): n is a, c, g, or t
  misc_feature (682)..(682): n is a, c, g, or t
ggtctgttagtgggcagatccttgcttgccgtcccttcgcctccttcaccgccgcagaccccttcaagttctagtcatgcgtgagtgcatctccatccacgttgngccaggctggtgtccagattggcaatgcctgctgggagctctactgcctggaacacggcatccagcccgatggccagatgccaangtgacaagaccattgggggagcgagatgattccttcaacaccttcttcaggtgaaacgggtgctggcaangcactgtgccccnggagcacgtgctctgtacgaccttggaacccacagctcatttgatgaagnttcgcactggcaccttaccgccaggcgtcttccaccctggagacagctcatcgacaggcaaggaagtatgctgccaataactatgcccgagggcgactacaccattggccaaggagatcattgacctcgtgtaggaccgaattcagccaagctgtcctgaccaagtgcaccgagtctccagggacttcttggattgatccacacgctttgcgtggtgcggaactcggttctgcgttcacctcgctgtctcatggaacgtctctcagtcagaggtatggcaagaaagtcccaagctggagttctctatatacccggcgccccgggtttccacagctgtagttgaggcctacaactccctn

SEQ ID NO: 498016 - DNA, 248 bp, Homo sapiens
cgcggccgggccaccgacagtttctcgggcaggtttgaagacgtctaccagactgcaggaagatagtgctgggggagggcgctcatgccccgagtgcagaccttgcatcaaacctgatcaccagccaggagtacgccgtcaagatcattgagaagcagccaggccacattcgtaagcagggttttcagggaaggtggaagatagctgtaccaggtgcccaggggacacagggaaacgtcctagcagct

SEQ ID NO: 498017 - DNA, 251 bp, Homo sapiens
tcacacgaatgtaggctcttcttctcctagctctacacaatcgactggtgctggactcttttctatactcacacggactggtgttgtcgcttgtcctcagtcctagcttcatacaacactgggtcctggaatcctgtctgctgctgtctacctagattcactgaatccacttctgtgtagcaccctgggtcagctgtcaattaatgctagtcctcaggatttaaaaaataatcttggtacccgaccgtcgg

SEQ ID NO: 498018 - DNA, 294 bp, Homo sapiens
  misc_feature (148)..(148): n is a, c, g, or t
  misc_feature (277)..(277): n is a, c, g, or t
cggtaaaggctgcagtgcaattcccagagtcaaatggagaacaacctagagttttgatgctcaagggcagcagaagggtgtgctactccaaaagagagaaagatataattgacccttctacccttttttgtttaataatgagcccttnagccaatatggatggtagtttgcccgatgttgacgggtggacatttcccacactgtagttgacatggctcacgataccagtttcttctccaagaaacacccgttacagtacacaattccagaaacaatngttttatatagtcatct

SEQ ID NO: 498019 - DNA, 232 bp, Homo sapiens
cagcagcctcccccgttgaccctcgttcgagtcgttcccctgcgctttccgcacgcgcgcgctcgagcgcacgagaaaggaatcgtatgtatttcgtatcaaactccatcacgacgcttgtgatgagtagtgatgactgttctgctgctgagtatatccatataattcaagacggcgaagacttactactgtcaggatctgatgatacataagactagtggaagcgttaaaa

SEQ ID NO: 498020 - DNA, 350 bp, Homo sapiens
agatccacaagaactgacagactcaaacagatacttgtatgccagtaccattattcaaaatagacaaaaggcagaaataacccaaatgtccagcaacagaggacttgataaataaagtgaggtggctatataatacagtggaatatcattggtgcctaaaaaggaagttctgaggcatgatacaacatatggataatccttaaaaacactatactatgtgaagtaagccagacacaaaaggacagatatattattccacttaaatctagaataggcaaattcatagagacagtaaattagtgattaccaggggatgaggggagatgagaatgaggagtaatagcttaagc

SEQ ID NO: 498021 - DNA, 197 bp, Homo sapiens
ccttcatgagcgagtgcacggaggaagccgatgatgggccagacaagggcaaggacgcggaggccgctgaggccacggcctatggggcgctcaaggcagagaataatgagggcgggagcggcagggccaccactgccaagagctcgggcacccgacaggacagcgactccagcgctacctgcagtgcaaaccaggtg

SEQ ID NO: 498022 - DNA, 869 bp, Homo sapiens
cgcagtggctcacgcctgtaatcccaacactttgggaggccgaggtgggtggatcacctgaggtcaggagctcgagaccagcctggccaacatggtgaagccccatctctatcaaaaatacaaaaatttagctgggcgtggtggtgggcacctgtaatcccaggtatttgggaggctgaggcaggagaatcccttgaacccaggaggcaaaggttgcagttagctgagatcgcaccactgcactccagcctgggcaacaagagcgaaactccgtctcaaaaaaaaaaaaaccctattgtaaaccatggccttgggggggtaaagatgtctgaatgtaggtccatcaagttttaacaaattgtaccactttacggggcgggatataatatatctggactaataatatacctggagaaatccttcattctcggatagtcgtagcaaatcacaactcgtgaacttaatgtttactacaagaggctaaggtgcatcgaagatcctctttaaagagaactatctaacggcccaaacgtggattcacagtacccggggaccttccgacatcctaaaggggtcaagttccacaaatttggattcccctagagaaacgggtataaaagcagcttaacctggcgacacatttcctacgaccagacaccaaaaggctaacgggacaatgcgccaacttttaaggataaccaaaactggaacccagcggcagacgcaaatatactataggacttttaacccttggaacacggctaaaggggatacttcatgccgggggtagggggctcaaaacacctttggccatagaaagcctggataggtttattgacattacacatcatagattcaacgtgagaacc

SEQ ID NO: 498023 - DNA, 404 bp, Homo sapiens
  misc_feature (404)..(404): n is a, c, g, or t
agcaccggcccgaccttagctctcaccatcgctcttctactatgagcccccctccccagacccaaccccctgggcaagctcagcctaggcctactatatattctagccacctctagcctagccgttcactcaatcctctgagcagggtgagcatcacactcacactacgccctgatcggcgcactgcgagcagtagcccacacaataccatatgaagtcacgctagccatcattctactatcaacagtactaataagtggctccttgagcctgtgcacccttatcacaacacagagaacacctctgattactcctgtcatcatgaccgttgcacataccatgagttatctacgcactagcggagaccaaccgaacccactgcgaccttgccgaagggggctcgn

SEQ ID NO: 498024 - DNA, 598 bp, Homo sapiens
gccaccctctgagttttcccgcgcccaccacaatttttcatatgctgcgccgcggactatatcctccctacatgtgtgcgctcggccaaatccccatgttgcgagcacctctcaactggctcctcataaactcttcttgttccaaggacactcacaaatcgttggtccccccaccaaaaagaccgtctttttgtgaaacttttttacgcaagctgctccgctatacttgcgcccttccccccccccgttttcatactccttgggaactactttctctggctaataaaactactctttttctctcgtcccacaatacagcctcttctcccctattaaccaagaggctgtccatcaacaattctgttgtccacgctctcataatattccttcttatacacaattttaccacccaaaacacccaattggcggcgtcacacttcaccaccacccccctcacgcttgcacatcatatgcaaacccccctcctttcccaccgcgagaaaccaccctcactgggtttcactaaatcctctttccccccttttctccttttcccccacccccgaaacctttcccgggtttttcccgaaaaaaaaaa

SEQ ID NO: 498025 - DNA, 727 bp, Homo sapiens
gtctcacacgagtttatttgtgataaacatctcagcaatcagcaagcccacgagctatagtgttcttccgagtctatgtgggcaaaacaaaagcatattagagcaggccacacccaaaagatatattcccatagattaaaaaaacacacacactataatattacaaaaatatatttaattaaaaatatcttataacacgagtatctattagagcatatactttctcacacatatagcacatctctatatacacatggtatgaaatgtcactcatttatctacacaatatgtcacattcttgcagagaaaagagagttctctgccccgttatcatcatctattttacactatatatgtaaaaaaaatatatctacaatgctctggtagattagtagagcttcaacacaaaaattgagctctttggtcacagagtaggcttctagagtcggatctactcgagatcttctatttatcagtcgtgtcacacttgagcttaagagtttatctgcacctccaaaacacacagatatgtactattcacagcagttataaatgaagagacaaaagagaatgcgtatgtaggatgtttatgaacgtgcaaagaaagaatgaaagttgtattcttctttcctctctctctcttggaatgacgaatgacgacgtttgtaggttggccgatgttttttcctttcctccggtggctttttttctctaacttctgctcttc

SEQ ID NO: 498026 - DNA, 390 bp, Homo sapiens
cttggccttcaaagtaccagtgtctctcatattgggttttaatgattcctcgggattataagtaagttgaatggcttttaccacctgtttgacttctaatgtttggtttccaccttaatgtaagatttcttccaaagcctgtagacccttgtacacttgtggtttgataagtagccaggaattctgcaatgccccaggtagtgtggccaatacctcggatctctttcatataagatccaccagttgtctgtgtgtaccacacatatgctacacatgttgaagagagaatataagagagcatagatgtagagattttatattccgggtgcgcgaggcacctctcatgatgtctgagtgcgcagagctgcgcgcgtgccgttttcctacagc

SEQ ID NO: 498027 - DNA, 212 bp, Homo sapiens
  misc_feature (65)..(65): n is a, c, g, or t
tgaaatcaagacatcacacatttgggggcttctgaaccctgctgcatgtgcattcaaaaagcagncggggtacttctcccaggccccaagagaggcttcgaatcctactctgaccactgtaatagaccactctgtgcacagacatgtggaacattactgacttcctacagtttaacatatactgataacatggggggtgaatattggtaaaa

SEQ ID NO: 498028 - DNA, 853 bp, Homo sapiens
ggggagggggggggtggaggggaggagggagggggacgcggggggggaaagagaggggaagcgggggggacgcaagcagggaggcgaggctgaggcagcggggcaggggggttgaagcgccgagtgaggagtggtcgcagcgacggggcgaagtgcgggcgtgtcgggagggcgtcgaggagagggagcacagtggtgtcggggcgagcgcgaagtgtgcaggcacgtggagtggccgaggaggagacagaggattggcggcgtcagggcggggacgagaaggcgaggcggcagggggagggcgcatgaggcgggagcaggggggtgggcaggcggcaggaggggaggcgggcgagcgggggcgcgggcagagtagggggaggggcggggggtgtgaagggggggggtcggggagggggcgccaggggcgggggggcgtggcgccgggggagtgacggggggccgcgggcacgcgggggggcagcaagaggcgtgaagggccgcgaatgggggcgacagccaggtgtacacaaggggcagaggggggtgggtgccgagcagagcgcgggggacggggggggggacagggggggagggaggaagcagaggtggcgcggaggggggagccgccggactgtgggggcggcagtgggcggaaggggcaaccaggagggaggagcccagggggaaagcagcaggtgcgccaggggggggaatgtctggggagggggaggcggcgcacgtggcgggcgagcaggcaaggcgggaggcagggagcggaagaggcgactctctggtgcgacgccgcccggaagtgtcccaagggcccaaagggggacaatccgccaaaatg

SEQ ID NO: 498029 - DNA, 881 bp, Homo sapiens
  misc_feature (17)..(17): n is a, c, g, or t
  misc_feature (123)..(124): n is a, c, g, or t
  misc_feature (132)..(132): n is a, c, g, or t
  misc_feature (140)..(140): n is a, c, g, or t
  misc_feature (214)..(214): n is a, c, g, or t
  misc_feature (282)..(282): n is a, c, g, or t
  misc_feature (312)..(312): n is a, c, g, or t
  misc_feature (333)..(333): n is a, c, g, or t
  misc_feature (337)..(337): n is a, c, g, or t
  misc_feature (378)..(378): n is a, c, g, or t
  misc_feature (402)..(402): n is a, c, g, or t
  misc_feature (441)..(442): n is a, c, g, or t
  misc_feature (481)..(481): n is a, c, g, or t
  misc_feature (551)..(551): n is a, c, g, or t
  misc_feature (576)..(576): n is a, c, g, or t
  misc_feature (579)..(579): n is a, c, g, or t
  misc_feature (752)..(752): n is a, c, g, or t
  misc_feature (754)..(754): n is a, c, g, or t
  misc_feature (757)..(757): n is a, c, g, or t
  misc_feature (802)..(803): n is a, c, g, or t
  misc_feature (805)..(805): n is a, c, g, or t
  misc_feature (808)..(808): n is a, c, g, or t
  misc_feature (818)..(818): n is a, c, g, or t
  misc_feature (820)..(820): n is a, c, g, or t
  misc_feature (847)..(847): n is a, c, g, or t
ggaaggaagtgcctgcnaacagataaaacaccagaagcagcctcactttataacaaccactgtatggtaactaatccagtcccactagaatgggaactcactcactccctggagactgcactnntccctganggcggatncctcatgacccaaatgcctcttaaaagtccataacctctcaataatgttacactggcaatttaatttcaacatnagtttttgttgggacaaaccacatcctaaccatagcacacctggtccccatcccagcattgggttggntccacagggcccctgaagtttatccatagntaccattttatattgcttatntganctcacctttgatggcataacattttctgttctttgttcccncctctctcttagtggtttttattnttccttttctgtttttgcgtttttttccacaatttttannattttccacccctttctgatctttgtgttcttcttattnaattgttcccaaagttgtggtccccagaccagcagcatcaacattagcatcacctgggagctcattaganatgcatattcttgagccctacttgnganctactgcatcagacactcttggggtgggaccagcaacctgtgttttaacaagctctacagatgattttgattcaccttgaagtttgagaaccacttttaagtaataagtaagtagaattcacttctaagcttttaaagtcgttagcccatggtattttccaaaggggcttggnancantgcttggagtttgggtgtgtcgtatgagcgaggaaactgttgatnnanaantgcaaaaaananttggcatttcatagagttattcatttnttctcttccgccttaattaaggccagtgctcccc

SEQ ID NO: 498030 - DNA, 248 bp, Homo sapiens
gctatactgtgtctgggtcaatgattctcctgcctcagccccccgagtagctgggattacaggagcctgccaccacacctggctaatttttgaatttccagtaaagatggggcttcgccatgttggccaggctggtcccgaactcctgacctcaggtgatccacccgcctcggcctcctctaccctctttctaaatttctagagagaacactgcagcctctcaagctgtgggtcctgtagcctcatcc

SEQ ID NO: 498031 - DNA, 549 bp, Homo sapiens
  misc_feature (70)..(70): n is a, c, g, or t
cctgaactcattgagctaaggaaaaaaaagtttagagggcgatggcggaagtgagaccctcagctcttcnctgtgttgccagagaagagaacagccactgttggaggggccatgatgggatccaccacatttatgacatgtccccggttattaaccggaagggcccggctccttaactgcaaggtgtggaagtggcgctggcgccttaaaagttggagctggatcctatggccatgaccccaaagtattaggagcatgtgcgggagcagcaggctcaagtaaaaaaggagggcttcagtgacatggtgggtgagcccgctgcccaacagaagcaaaaaaaacggaaaggtcagcccccgggcaaccgtgggggcagcaaaaaatataaggagttcaagttttaggtcccccccccctagccctttttttggccctacgtttggaagcctggggttcacccaaaaaccccctctcccccagttcccaagggcttgtcctttcatgtttttattttagacctgttttgtaaataaagctgtttccccagga

SEQ ID NO: 498032 - DNA, 561 bp, Homo sapiens
  misc_feature (56)..(56): n is a, c, g, or t
  misc_feature (183)..(183): n is a, c, g, or t
ctcccctaggggtggggggggaaaacccaggttttgggcccccaaggcaggttgtngtttttttttccaactcttagttcccggttgatgggaggttcctattaaaaacctcaaccctttttggcgcttttccaaagggccaattcttcttttttttctggccttaaccctgggtcctgaggntcgggccaccaaagccccggccagggttttgttttttccccccctggtttattctcaaatgtggggggggggaggccccgcctcagtttttttccaaaccccttttcctttggcctggggccccagattttttccttttacccaagggccgggttttttccctcccccctttttcgggggccctttggttactttcctccccccctgccggggccccggtttggaattttggtggggggaaggggaaaggggtgggccttcccgtttcccgcaatttaaggggcacccctttttggggccccccctttaaagggggggggggttggggggtgccccaggtttttttttttttgggtatttaaggttttttggcccgga

SEQ ID NO: 498033 - DNA, 84 bp, Homo sapiens
catggatttgctggtgcagtacaactaggctcgaattgagctcgaattcgagctcgaattcgaggctcgaattccttctaacgt

SEQ ID NO: 498034 - DNA, 1626 bp, Homo sapiens
agcggacatccgcctgcgcgctgggcggggcggggcgggctggggcgggctgtgagcggaccgcgagcgctgggcgggtccgcggcgcggtcggtcggcgcctgttctcgggctgtttggcggaggactggccagcccccaaacctccaagcccatcggctggatgccgtggataagcgaggggagagcgactaggccctgtctgcgggtaccttcggcgaggagaggcgacgaagcatacagaaactgctgtaaaagaagaagttgtgggtatttttttttttttttggtctggaggaatggggacaccaaaactcatttggcagcagaggtgaggacgaagcttcacaaaagatgtctaagcaacagccaactcagtttataaatccagaaacacctggctatgttggatttgcaaacctccccaatcaagttcaccgaaaatcagtgaaaaaaggttttgagttcacactgatggtggtcggtgaatcaggtctaggaaaatcgactctcataaacagcctattcctaactgatctgtacccagaaagagtcatacctggagcagcagaaaaaattgaaagaactgtccagattgaggcttcaactgttgaaattgaagagcgaggggtcaagctacgcctgacagtggtagatacccctggctatggtgacgctatcaactgcagagattgttttaagacaattatctcctatattgatgagcaatttgagaggtacctgcatgacgagagcggcttgaacaggcggcacatcattgataatagggtgcattgttgcttttactttatttcaccttttggacatggacttaagcccttagatgtggcgtttatgaaggcaatacacaacaaggtgaatattgtgcctgtcattgcaaaagctgacactctcaccctgaaggaacgggagcggctgaagaacaaggattctggatgacattgaagaacataacatcaaaatctatcacttacctgatgcagaatcagatgaagatgaagattttaaagagcagactagacttctcaaggctagcatcccattctctgtggttggatccaatcagttgattgaagccaaaggaaagaaggtcagaggccgcctctacccctggggtgttgtggaagtggagaacccagagcacaatgactttctgaagctgagaaccatgctcatcacccacatgcaggatctccaggaggtgacccaggaccttcattatgaaaacttccgttctgagagactcaagagaggcggcaggtcatcacactgtgcccctttctctgtattgtgtcaccctgagccacaatgttcctcctcctctatgtgttcagctcagccttcttgaccattaagcaacatggtttggtttcctactcaaaagttattataaaagagttgttaatttaatcaaattatgctcttttagcctttttaagaaaaagtacatttaatgatatgcacgtaaaaactttaggccaggcacggtggctcatgcctgtaatcccagcaccttgggagaccaaggcaaggtagattgcctgagcgcaggagttttgagaccatgagattacatggtgaagtcccatctctacaaaaatttaa

SEQ ID NO: 498035 - DNA, 162 bp, Homo sapiens
ctcaactgtcggtccgtgtcttgagtgtttcttcttagaacttgcaggcccagcctcagaggattcaacttcatgttcagcttccaaggctaactcccatccctttcctgggcgtgtcggaggaatggttcaatcactgatctacaattgccagtgagctct

SEQ ID NO: 498036 - DNA, 609 bp, Homo sapiens
cgtggtggctcatgcctggaatcccagcactttgggaggctgaggtgggctgatcatgaggtcaggagtttgaaaccagcctggccaacatggtgaaatgccatctctactaaaaatacaacaattagccaggcatggtgatgtgcgcctgcagtctcagctactagggaggctgaggcagaagaatcacttgaacccgggaggcagaggttgcagcgagccgagatcgtgccactgcactccaacctgggtgacaggcgagactccctttcaagaagaaaaaagtataataaatgaggccaggccggtggctcacgcctataatcccagcactctgggaggctgaggcggatggctcgcttgagctcaggagttcgagaccagcctaggcaacatggcaaaaccctgtctctactaaaaatacaaaaattagttggatgtggcgtcatgcgcctgcggttccacctgcctctgggaggctgaggtgttaggattgcttgagcccaggaggcacaggttacagtcagccgagattgtgccactgcactccagcctgggtgaccgagtgagactccatctccaagccactttccccgcccaacatgtcgc

SEQ ID NO: 498037 - DNA, 1497 bp, Homo sapiens
agcggacatccgcctgcgcgctgggcggggcggggcgggctggggcgggctgtgagcggaccgcgagcgctgggcgggtccgcggcgcggtcggtcggcgcctgttctcgggctgtttggcggaggcttggaatagttaaatgactttggtcttgtccaaggttagatggagttcaactctaacgtcaagtcttggtccttttcattgacgaagcttcacaaaagatgtctaagcaacagccaactcagtttataaatccagaaacacctggctatgttggatttgcaaacctccccaatcaagttcaccgaaaatcagtgaaaaaaggttttgagttcacactgatggtggtcggtgaatcaggtctaggaaaatcgactctcataaacagcctattcctaactgatctgtacccagaaagagtcatacctggagcagcagaaaaaattgaaagaactgtccagattgaggcttcaactgttgaaattgaagagcgaggggtcaagctacgcctgacagtggtagatacccctggctatggtgacgctatcaactgcagagattgttttaagacaattatctcctatattgatgagcaatttgagaggtacctgcatgacgagagcggcttgaacaggcggcacatcattgataatagggtgcattgttgcttttactttatttcaccttttggacatggacttaagcccttagatgtggcgtttatgaaggcaatacacaacaaggtgaatattgtgcctgtcattgcaaaagctgacactctcaccctgaaggaacgggagcggctgaagaacaaggattctggatgacattgaagaacataacatcaaaatctatcacttacctgatgcagaatcagatgaagatgaagattttaaagagcagactagacttctcaaggctagcatcccattctctgtggttggatccaatcagttgattgaagccaaaggaaagaaggtcagaggccgcctctacccctggggtgttgtggaagtggagaacccagagcacaatgactttctgaagctgagaaccatgctcatcacccacatgcaggatctccaggaggtgacccaggaccttcattatgaaaacttccgttctgagagactcaagagaggcggcaggtcatcacactgtgcccctttctctgtattgtgtcaccctgagccacaatgttcctcctcctctatgtgttcagctcagccttcttgaccattaagcaacatggtttggtttcctactcaaaagttattataaaagagttgttaatttaatcaaattatgctcttttagcctttttaagaaaaagtacatttaatgatatgcacgtaaaaactttaggccaggcacggtggctcatgcctgtaatcccagcaccttgggagaccaaggcaaggtagattgcctgagcgcaggagttttgagaccatgagattacatggtgaagtcccatctctacaaaaatttaa

SEQ ID NO: 498038 - DNA, 1501 bp, Homo sapiens
agcggacatccgcctgcgcgctgggcggggcggggcgggctggggcgggctgtgagcggaccgcgagcgctgggcgggtccgcggcgcggtcggtcggcgcctgttctcgggctgtttggcggaggactggccagcccccaaacctccaagcccatcggctggatgccgtggataagcgaggggagagcgactaggccctgtctgcgggtaccttcggcgaggagaggcgacgaagagcaacagccaactcagtttataaatccagaaacacctggctatgttggatttgcaaacctccccaatcaagttcaccgaaaatcagtgaaaaaaggttttgagttcacactgatggtggtcggtgaatcaggtctaggaaaatcgactctcataaacagcctattcctaactgatctgtacccagaaagagtcatacctggagcagcagaaaaaattgaaagaactgtccagattgaggcttcaactgttgaaattgaagagcgaggggtcaagctacgcctgacagtggtagatacccctggctatggtgacgctatcaactgcagagattgttttaagacaattatctcctatattgatgagcaatttgagaggtacctgcatgacgagagcggcttgaacaggcggcacatcattgataatagggtgcattgttgcttttactttatttcaccttttggacatggacttaagcccttagatgtggcgtttatgaaggcaatacacaacaaggtgaatattgtgcctgtcattgcaaaagctgacactctcaccctgaaggaacgggagcggctgaagaacaaggattctggatgacattgaagaacataacatcaaaatctatcacttacctgatgcagaatcagatgaagatgaagattttaaagagcagactagacttctcaaggctagcatcccattctctgtggttggatccaatcagttgattgaagccaaaggaaagaaggtcagaggccgcctctacccctggggtgttgtggaagtggagaacccagagcacaatgactttctgaagctgagaaccatgctcatcacccacatgcaggatctccaggaggtgacccaggaccttcattatgaaaacttccgttctgagagactcaagagaggcggcaggtcatcacactgtgcccctttctctgtattgtgtcaccctgagccacaatgttcctcctcctctatgtgttcagctcagccttcttgaccattaagcaacatggtttggtttcctactcaaaagttattataaaagagttgttaatttaatcaaattatgctcttttagcctttttaagaaaaagtacatttaatgatatgcacgtaaaaactttaggccaggcacggtggctcatgcctgtaatcccagcaccttgggagaccaaggcaaggtagattgcctgagcgcaggagttttgagaccatgagattacatggtgaagtcccatctctacaaaaatttaa

SEQ ID NO: 498039 - DNA, 1341 bp, Homo sapiens
  misc_feature (7)..(7): n is a, c, g, or t
  misc_feature (9)..(9): n is a, c, g, or t
  misc_feature (11)..(11): n is a, c, g, or t
  misc_feature (33)..(33): n is a, c, g, or t
ccaattngncnttggccggggggtcggcgcctnttctcgggctgtttggcggacgaagcttcacaaaagatgtctaagcaacagccaactcagtttataaatccagaaacacctggctatgttggatttgcaaacctccccaatcaagttcaccgaaaatcagtgaaaaaaggttttgagttcacactgatggtggtcggtgaatcaggtctaggaaaatcgactctcataaacagcctattcctaactgatctgtacccagaaagagtcatacctggagcagcagaaaaaattgaaagaactgtccagattgaggcttcaactgttgaaattgaagagcgaggggtcaagctacgcctgacagtggtagatacccctggctatggtgacgctatcaactgcagagattgttttaagacaattatctcctatattgatgagcaatttgagaggtacctgcatgacgagagcggcttgaacaggcggcacatcattgataatagggtgcattgttgcttttactttatttcaccttttggacatggacttaagcccttagatgtggcgtttatgaaggcaatacacaacaaggtgaatattgtgcctgtcattgcaaaagctgacactctcaccctgaaggaacgggagcggctgaagaacaaggattctggatgacattgaagaacataacatcaaaatctatcacttacctgatgcagaatcagatgaagatgaagattttaaagagcagactagacttctcaaggctagcatcccattctctgtggttggatccaatcagttgattgaagccaaaggaaagaaggtcagaggccgcctctacccctggggtgttgtggaagtggagaacccagagcacaatgactttctgaagctgagaaccatgctcatcacccacatgcaggatctccaggaggtgacccaggaccttcattatgaaaacttccgttctgagagactcaagagaggcggcaggtcatcacactgtgcccctttctctgtattgtgtcaccctgagccacaatgttcctcctcctctatgtgttcagctcagccttcttgaccattaagcaacatggtttggtttcctactcaaaagttattataaaagagttgttaatttaatcaaattatgctcttttagcctttttaagaaaaagtacatttaatgatatgcacgtaaaaactttaggccaggcacggtggctcatgcctgtaatcccagcaccttgggagaccaaggcaaggtagattgcctgagcgcaggagttttgagaccatgagattacatggtgaagtcccatctctacaaaaatttaa

SEQ ID NO: 498040 - DNA, 265 bp, Homo sapiens
atggtctactcactaccagagatatggaatggggtgtgggaagtgatcatgccatcttcacatctcaggagtacagaagagttctattctactacccgatctgtggcatgatcagttggatctgaaagagacatgacatgaaatactaaaccactctcctcagtttgtgtagagtgaaatgaagcatggaatggcaacctgtttctgaaaaggaaagcaatgagtcgtagcggaggcaatacccaaccccagaaatgcagccaag

SEQ ID NO: 498041 - DNA, 1502 bp, Homo sapiens
agcggacatccgcctgcgcgctgggcggggcggggcgggctggggcgggctgtgagcggaccgcgagcgctgggcgggtccgcggcgcggtcggtcggcgcctgttctcgggctgtttggcggacgaagcttcacaaaagatgtctaagcaacagccaactcagtttataaatccagaaacacctggctatgttggatttgcaaacctccccaatcaagttcaccgaaaatcagtgaaaaaaggttttgagttcacactgatggtggtcggtgaatcaggtctaggaaaatcgactctcataaacagcctattcctaactgatctgtacccagaaagagtcatacctggagcagcagaaaaaattgaaagaactgtccagattgaggcttcaactgttgaaattgaagagcgaggggtcaagctacgcctgacagtggtagatacccctggctatggtgacgctatcaactgcagagattggtatgctcccccatgcccagggatctgcatttgtttacttaatatacttcataaatttatagatagtgttaatgagtgattattaagtttgggattgctgtatataataaaacacctagacaatttaaagcgtgttaaatgttgactttttaaataaggaattttatagagagtaatttttttctggtactctactgtaatttgagatcgcaaagccagtcatccatagactgctagtataaatgaaacacctggatttgagccgtggttggtgaccgagatactgtagtacatcctttctatgtggaaggaagtgaaacctgttagagagtgggttgagtcgtagtgtctgtaaatgactgctcattggcatcattttcacaaataaggaaatgaagaagtagaagatagagcagtctgtcacctgtactgtgcaaagaatgccacttttgttgtacaaactccctcctggttctattcctgtcaacataaagcatcaggtttccaccactagatgaaaaggggaaggttctgttatctttctcctacatttaggaatttctcccttcttacatgtgaaagtgctgtactgtttcccagctcagttaaatgctgtttcccagctcagataaacctgttcttgacccatgttctctaccaccctgttcctctgccccttttcacagtcacgttcctgaaaagaattggcagccctggctgggtgcgatggctcatgcctgtaatcccagcactttgggaggctgaggtgggctgatcacaaggtcaggagttcgagaccagcctggccaacatggtgaaaccctgtctctactaaaaatacaaaaattagccgggcgtggtggcgtgtgcctataatcccagctacttgggaggctgaggcaggagaatcgcttgaaccctggaagcagaggttgcagtgagccgagatcacgccactgcactccagcctgggcaacagtgcaagactcagtctcaaaaaaaagacgaattgcagccctgt

SEQ ID NO: 498042 - DNA, 167 bp, Homo sapiens
agaatccgctagcggcgccctttttttggggggcggggcggttggggacagggtctcactctattgcccaggctgaaatgcagtggtgcaatcatagttcactgcagcctcgaactcctgggctcaggtagatcctcccacctatacctcccaatgtatctgtggac

SEQ ID NO: 498043 - DNA, 652 bp, Homo sapiens
gaaaactgtaagcaagacaaataatcatctccaatgctatcagagactaggcataatactaaaccttaagttattctcaggaaagagtacccgacccgttattaatgtgtggcattgcctttctgtaagagtgtagacatgttttagatttataaagttttctattttaacaattttatcccccatttttcctgtcttagattaagttaccaaatattagtagctttccttggtgaagtaattactgataagtcctttctgtaaccaatattcacttcttattttgtaaatttttaaaagattcttatagtgatatttcttatgacacagtagtcatctaaaggtgccagtcacttttcctggaaaatataggaagtaatactaggagaaagtgtgcaactgttaaattctttcacatcaccaactttttcacaattaaagtatttgctttgtagagtgcttagcaatgtccattatgatttcttttttccattggcaattttgggcttccctcacatcatggaagttagaactggaagggacatgagatcatttggtttattctctgatgttatagtttgtgacactgatgcccataaaaataaatgatttgcctgaagtcgtatgtagctagtataacttagaaatcaaa

SEQ ID NO: 498044 - DNA, 6788 bp, Homo sapiens
ggaggcggaggggagcggagcccggagcgtcgtggaaagcattggacacatttccaccatgctaatggcattttaaatatatttggcaattttcccaattttttactgaagaaaactgtaagtttatacttgaggactgaagtgtgactctgccgattatcaggctttcaagatgaatctggaaaaactcagcaagcctgaactcctgacactatttagtattcttgaaggagagcttgaagcaagggaccttgttatagaagccttaaaggcccaacacagagatactttcattgaagaacgctatggaaaatataacatcagtgatcctttaatggctctacagagagattttgaaacactgaaggagaaaaatgatggcgaaaagcagccagtctgcacaaacccactctctattcttaaggttgtgatgaagcagtgcaagaacatgcaggagcgcatgctgtcccagctggctgctgctgagagcaggcaccgaaaggtgatcctagaccttgaggaagaaaggcagcggcatgcacaggatacggctgaaggagatgatgtcacctacatgctagagaaggaaagagagaggctgactcaacagttggaatttgaaaaatcccaagtgaaaaagtttgaaaaagaacagaagaagctctctagtcagctggaagaggagcgctcccgccacaagcagctctcatccatgctagtgcttgagtgcaagaaagccaccaacaaggcagccgaggaaggacagaaggcaggagagctgagcctgaaattggagaaggagaagagccgggtgagtaaactggaagaagagttggcagctgagagaaagagaggcttgcagactgaggcccaggtagagaagcagttatcagagtttgacatcgaaagggaacaactgagagcaaaactgaaccgagaagagaaccggaccaaaaccctgaaagaagaaatggaaagtttaaagaagatagtgaaggacctagaggcttcccaccagcacagtagccctaatgagcaattgaagaaaccagtaaccgtgtccaaaggcacagcaactgagcctctcatgctaatgtctgtgttttgccaaacagagagttttccagcagaaagaacccatgggagcaacatagccaagatgacaaacactgggctgcctggtcctgccactcctgcttactcatatgcaaaaaccaatggccattgtgacccagagatacaaactaccagggagctgactgcaggcaacaatgtagaaaaccaagtgcctccacgggaaaaatctgtggcattggcccaagagaaaccagtggagaatggtgggtgtcctgtggggattgagactccagtcccaatgcccagtcccctctcttccagtgggagctcactgtctcccagcagcactgcctcctcctctctaacatcctctccttgctcttcgccggtactcactaagcgtttattggggtcatcagctagcagccctggctaccagtcatcgtaccaagtagggatcaaccaacggttccatgcagctcgccacaaatttcagtcccaagcagatcaggaccaacaagccagtggcctacagagccctccatccagggatttatcccccaccctcatagacaactctgccgccaagcagctggcccgaaacacagtcactcaggtgctctccagattcactagccaacaagggccaatcaagccagtctctcccaacagctctccctttggcacagactatcgaaatctagccaacactgccaatccaagaggtgacacaagccattcacctactccagggaaagtgtccagtcccctgagccccctgtctccaggaatcaagtccccaaccatccccagagctgagagaggaaaccctccacccatcccacccaagaaacctggcctcaccccttctccatctgctaccactccattgaccaaaactcattcccaggcagcctctttgaccactgcagaagaccttgccagcagctgctcttccaatactgttgtagcaaatggtaaggatgttgagttacttttgcctaccagcagctagtccctaggagggagtctccacgtttgacattccatcagatttcgtccaaaagctcagtcagacttctgagtcagattatgttatttattttgatagtagctgaaaccatctgtataatacatttagtatatttcaccatgttggccaggctggtcttgaactcctgacctcaagtggtctgcctacctcggcctcccaaagtgctggaattacaggcgtgagcatcacgtctggcctaatttttttaatcgaatttatttttgtaatgatagatgcttgtcttattcctagggaaatatttgaagtaattgagatgctgtcacctaaaataatcaaaaggctcctgattcagttaaaagaattcatttaagtacagagtgtaagcgagctacaccaaagaatggtgattagcgctcccagggtggggaaaaatgaggattgtttatataggcaaaatggaggtgccaaacagaattataacattttcggaactaaggctcatttaaagatacaaatttgattggctactattgattacacttgaagggatttgtttaacttccttttgtaaagaagtaacagtcataaggatctctcatctcccagtcatttagtctagttttgaataaagaatagggggtctggttaatatatacatctaaacacaaaagtcagaaagaataaaagtagtgatgttacacgagccagctgtcagtgcttaacttttccctttggcctaatgcatttggaaggtcctgaaattgtattttctttttacattgcctatgtatgtgtaagtcttcttcaggtcagttcacgctgttaaatatacgtgcgtatacatacatactatgtatgtgcgtttatgtgtgtctgtgtgttttttttttaacagacgaagcttcacaaaagatgtctaaggtaagatcatacttcatgtatctacagcataaggagaaattgctttatgttttcagactgttgacagtcgggacttatatgattcattatttttaatacaactgatacatttgattcattaacacaaagagttctaatttagttgtctttttttttttttttgagacgggagtcttgttctgtcaccaggctggagtgcagtggcatgatctcagctcactgcaacttctgcctcccacgttcaagcgattcccctggctcagcctccggagtagctgggactgcagacacgtgccaccacgctggctaattttttggattttagtaaattcggggtttcaccgtgttggccaggatggccttgatctgttgacctcgtgatccacccgctttggccccccgaagtgttgggattacaggtgtgagccaccgtgcctggcctaattgtcatcttaaaagcttggagctttctcttttttcaggcttctactttcttttctctacacacatcagtaacagtccttttggcccccttagttcattcccagcagaccagataatttagaattctgataatttattatgatgaaattgatggggctcttagacttgataaattggtttaaatcagcctttgcaagttagttcagagataaattagtgctaaagaacatattctgagaaaagcagaacttgtggttaacattgcaagattattatttctgttttttttttatctttgaatcctgtgggtgttcattactgtccaatgcaaaatcatcataccagtttttgcattttataccagtgttagcatggaacacagataagcaaaaaaaaaaagtcattatttcaccactcaggaataaccactgttaatatgttacatatattctttttcacctgtgtgtgcatttgactatacatttacaaaatgtaatcctaaaggaaatactattttgtatcttgcctttttcaattaataaattgatttttaaaatttcttctcattttcagtatgccactgtctagattctggttacttctgctattcttgccttctcatatctctgtcctctctctcatcagatacccttctgtcaaggaatattgatgcttcagtgtagtcatctatgatcttctcattctgtcttttctttcttggtctttgacactagatactcaacatcccacccctaatttgcctgcctcacccttgatgaaactctgttctatagagctagaagcacagcaagagagatgcttttttcctcgatacttttcagaaatgcattgcacctaatacctgggagaagctattctttagccaagtttgttgaatgaaaccattcattcaaagtactgtcagctgtagcagtactttgtaagcttgactgattttcctggaactccatagtctctcaagtcgaaatttgaaattgcattaagatgtattaagcatgtatcttctatgtattgttaaattcctaaacagaatactgattaacaaaatgttaattttcagtcgcatacaactaaggagttatactagataagtttttctttttttaatgctcctagttgaatactactggttttctgatagaagtatgactttctggaagtgtttatactttttaaaaaatttgtgaaaactgataacctatgtttgtttcatgtctaactgattatatcttaaaagcaactactaaggtgtttattagtttgtttgttttttaatcttatttagcaacagccaactcagtttataaatccagaaacacctggctatgttggatttgcaaacctccccaatcaagttcaccgaaaatcagtgaaaaaaggttttgagttcacactgatggtggtcggtgaatcaggtctaggaaaatcgactctcataaacagcctattcctaactgatctgtacccagaaagagtcatacctggagcagcaggtaaaaacattcttatgttactgtaagtgtaattctacatgaaagatgctgaagactgcctaattaatattttatgtcttagctgtgtgttttgtttgttcttgttcagctttgaacacaaggaaaacacttttatggggtaggtgtgctgcaccgaggtccttggatttgggttgtagactttctttgacacgtatccatggatccatcctctcttgagtttgtctgtaaaatgtaataagtagtttctgcctatattaaatatttgatggaaggattaagtgagaatgttttacatcaaaaatgctgtgtaactagaagattactaggatagatgttcgaattcatctactgtcagaaagttccagcacaggacaccagcatccacaaatgactgttgaatgaaataggcacacatagtgagagcctaagacttgggctgctgcaagaatatgtagccctttcagaatatttttgaattcagtttttaaatgaattcgtaaattgctttctttttcccaggaacagaaattataatttttaacatttgtgtttttaaccttccccagtagcacaataatcttagctttaaccttcccctttctgacttctctgggatctttttttcttaatccccatggtatctttggagaacctacctctgtagagaggcagtagactctgaagtcacctgtcgtaagaacgtgagctttcctcttcacatgctgcttatattccctattaagtttgtttcttttctagaaaaaattgaaagaactgtccagattgaggcttcaactgttgaaattgaagagcgaggggtcaagctacgcctgacagtggtagatacccctggctatggtgacgctatcaactgcagagattgttttaagacaattatctcctatattgatgagcaatttgagaggtacctgcatgacgagagcggcttgaacaggcggcacatcattgataatagggtgcattgttgcttttactttatttcaccttttggacatggacttaagcccttagatgtggcgtttatgaaggcaatacacaacaaggtgaatattgtgcctgtcattgcaaaagctgacactctcaccctgaaggaacgggagcggctgaagaacaaggattctggatgacattgaagaacataacatcaaaatctatcacttacctgatgcagaatcagatgaagatgaagattttaaagagcagactagacttctcaaggctagcatcccattctctgtggttggatccaatcagttgattgaagccaaaggaaagaaggtcagaggccgcctctacccctggggtgttgtggaagtggagaacccagagcacaatgactttctgaagctgagaaccatgctcatcacccacatgcaggatctccaggaggtgacccaggaccttcattatgaaaacttccgttctgagagactcaagagaggcggcaggtcatcacactgtgcccctttctctgtattgtgtcaccctgagccacaatgttcctcctcctctatgtgttcagctcagccttcttgaccattaagcaacatggtttggtttcctactcaaaagttattataaaagagttgttaatttaatcaaattatgctcttttagcctttttaagaaaaagtacatttaatgatatgcacgtaaaaactttaggccaggcacggtggctcatgcctgtaatcccagcaccttgggagaccaaggcaaggtagattgcctgagcgcaggagttttgagaccatgagattacatggtgaagtcccatctctacaaaaatttaa

SEQ ID NO: 498045 - DNA, 283 bp, Homo sapiens
  misc_feature (4)..(4): n is a, c, g, or t
  misc_feature (48)..(48): n is a, c, g, or t
  misc_feature (58)..(58): n is a, c, g, or t
  misc_feature (78)..(78): n is a, c, g, or t
  misc_feature (104)..(104): n is a, c, g, or t
  misc_feature (120)..(120): n is a, c, g, or t
  misc_feature (132)..(132): n is a, c, g, or t
  misc_feature (139)..(139): n is a, c, g, or t
  misc_feature (147)..(147): n is a, c, g, or t
  misc_feature (163)..(163): n is a, c, g, or t
  misc_feature (166)..(166): n is a, c, g, or t
  misc_feature (175)..(175): n is a, c, g, or t
  misc_feature (248)..(248): n is a, c, g, or t
  misc_feature (264)..(265): n is a, c, g, or t
tggncacatgagtttacgaatccttagaagtgtctcccacagggtggnaggactgggngaatctctgaggcgtgtctnccaggccctcccacagcttgtgcccnccacagtgtagacttnaacacttggccncatgtgngccttccnccttggccccccaaancantgggattanaggcgagagccactggttggctaaaatatttatatttacctgacatgatttgttgatttgggggctagggagntcttaaaacaacaatnnaaaatcttctgtggctgc

SEQ ID NO: 498046 - DNA, 293 bp, Homo sapiens
atgggctctttgctcaagagtatttttttcaggctgtttcataacagtttgagttatgagcctggcacccttcatataccaccattttggcatacatcctagagtcatagcgtttgctacatttcttgaggtacttagctagattatgaacccagtgacgggaggaactgaatgacatctgtatatctctacgcagagatggcaagcgctcgccacactagatactatctcttgggtacccatggcaggcattgctggctgttcatgaccttctgttcctttgagcctagact

SEQ ID NO: 498047 - DNA, 520 bp, Homo sapiens
  misc_feature (23)..(23): n is a, c, g, or t
  misc_feature (171)..(171): n is a, c, g, or t
  misc_feature (252)..(253): n is a, c, g, or t
  misc_feature (328)..(328): n is a, c, g, or t
  misc_feature (369)..(369): n is a, c, g, or t
  misc_feature (411)..(411): n is a, c, g, or t
  misc_feature (441)..(441): n is a, c, g, or t
  misc_feature (517)..(517): n is a, c, g, or t
aaatcggccgagctcgaattcgncgagggagttttttggaaaggaatggggaacactatatctgcccaaactgcaccattctgcaagtgcaggatgagactcattcataaacggcagatcagtttgaagatccctcctgacctgttgatgctgccggcaccgattgtacangtataggaacactacagcagaagtctagcgaagaccaagggataaagggtagaattgagaaagctgcaaatccaagtggcnngaagaaactcaagatcttccagcctgtgatagaggcgcctggtgcctcaaaatgtattggccccgggtgctgtcncgtggcgcagcccgactcggtgtactgcagtaatgactgtntcctcaaacacgccgcagcgaccatgaagtttctaagctcanggtaagaacagaagccaaagcctaaagaanagatgaagatgaagccagagaagcccagtcttccgaaatgcggtgctcaggcaggtattaaaatctcttctgtgcncaa

SEQ ID NO: 498048 - DNA, 253 bp, Homo sapiens
cagtaatttttgtatttttggtagagacagggttttcccgggctgcctaagggtagtttcaaatttttggggtcaagggatcctgcccccttgggtttcccaagggttggggattacaggcatgagcccccccgccccgccaaaatattttttaaatttatataataaaataaatctctttcctctaagatctgttgaagtaaaatccctatactaaataccctcatatggcccatttttttatccctgaata

SEQ ID NO: 498049 - DNA, 2174 bp, Homo sapiens
agcggacatccgcctgcgcgctgggcggggcggggcgggctggggcgggctgtgagcggaccgcgagcgctgggcgggtccgcggcgcggtcggtcggcgcctgttctcgggctgtttggcggacgaagcttcacaaaagatgtctaagcaacagccaactcagtttataaatccagaaacacctggctatgttggatttgcaaacctccccaatcaagttcaccgaaaatcagtgaaaaaaggttttgagttcacactgatggtggtcggtgaatcaggtctaggaaaatcgactctcataaacagcctattcctaactgatctgtacccagaaagagtcatacctggagcagcaggtaaaaacattcttatgttactgtaagtgtaattctacatgaaagatgctgaagactgcctaattaatattttatgtcttagctgtgtgttttgtttgttcttgttcagctttgaacacaaggaaaacacttttatggggtaggtgtgctgcaccgaggtccttggatttgggttgtagactttctttgacacgtatccatggatccatcctctcttgagtttgtctgtaaaatgtaataagtagtttctgcctatattaaatatttgatggaaggattaagtgagaatgttttacatcaaaaatgctgtgtaactagaagattactaggatagatgttcgaattcatctactgtcagaaagttccagcacaggacaccagcatccacaaatgactgttgaatgaaataggcacacatagtgagagcctaagacttgggctgctgcaagaatatgtagccctttcagaatatttttgaattcagtttttaaatgaattcgtaaattgctttctttttcccaggaacagaaattataatttttaacatttgtgtttttaaccttccccagtagcacaataatcttagctttaaccttcccctttctgacttctctgggatctttttttcttaatccccatggtatctttggagaacctacctctgtagagaggcagtagactctgaagtcacctgtcgtaagaacgtgagctttcctcttcacatgctgcttatattccctattaagtttgtttcttttctagaaaaaattgaaagaactgtccagattgaggcttcaactgttgaaattgaagagcgaggggtcaagctacgcctgacagtggtagatacccctggctatggtgacgctatcaactgcagagattgttttaagacaattatctcctatattgatgagcaatttgagaggtacctgcatgacgagagcggcttgaacaggcggcacatcattgataatagggtgcattgttgcttttactttatttcaccttttggacatggacttaagcccttagatgtggcgtttatgaaggcaatacacaacaaggtgaatattgtgcctgtcattgcaaaagctgacactctcaccctgaaggaacgggagcggctgaagaacaaggattctggatgacattgaagaacataacatcaaaatctatcacttacctgatgcagaatcagatgaagatgaagattttaaagagcagactagacttctcaaggctagcatcccattctctgtggttggatccaatcagttgattgaagccaaaggaaagaaggtcagaggccgcctctacccctggggtgttgtggaagtggagaacccagagcacaatgactttctgaagctgagaaccatgctcatcacccacatgcaggatctccaggaggtgacccaggaccttcattatgaaaacttccgttctgagagactcaagagaggcggcaggtcatcacactgtgcccctttctctgtattgtgtcaccctgagccacaatgttcctcctcctctatgtgttcagctcagccttcttgaccattaagcaacatggtttggtttcctactcaaaagttattataaaagagttgttaatttaatcaaattatgctcttttagcctttttaagaaaaagtacatttaatgatatgcacgtaaaaactttaggccaggcacggtggctcatgcctgtaatcccagcaccttgggagaccaaggcaaggtagattgcctgagcgcaggagttttgagaccatgagattacatggtgaagtcccatctctacaaaaatttaa

SEQ ID NO: 498050 - DNA, 1289 bp, Homo sapiens
agcggacatccgcctgcgcgctgggcggggcggggcgggctggggcgggctgtgagcggaccgcgagcgctgggcgggtccgcggcgcggtcggtcggcgcctgttctcgggctgtttggcggagacgaagcttcacaaaagatgtctagaatcaggtctaggaaaatcgactctcataaacagcctattcctaactgatctgtacccagaaagagtcatacctggagcagcagaaaaaattgaaagaactgtccagattgaggcttcaactgttgaaattgaagagcgaggggtcaagctacgcctgacagtggtagatacccctggctatggtgacgctatcaactgcagagattgttttaagacaattatctcctatattgatgagcaatttgagaggtacctgcatgacgagagcggcttgaacaggcggcacatcattgataatagggtgcattgttgcttttactttatttcaccttttggacatggacttaagcccttagatgtggcgtttatgaaggcaatacacaacaaggtgaatattgtgcctgtcattgcaaaagctgacactctcaccctgaaggaacgggagcggctgaagaacaaggattctggatgacattgaagaacataacatcaaaatctatcacttacctgatgcagaatcagatgaagatgaagattttaaagagcagactagacttctcaaggctagcatcccattctctgtggttggatccaatcagttgattgaagccaaaggaaagaaggtcagaggccgcctctacccctggggtgttgtggaagtggagaacccagagcacaatgactttctgaagctgagaaccatgctcatcacccacatgcaggatctccaggaggtgacccaggaccttcattatgaaaacttccgttctgagagactcaagagaggcggcaggtcatcacactgtgcccctttctctgtattgtgtcaccctgagccacaatgttcctcctcctctatgtgttcagctcagccttcttgaccattaagcaacatggtttggtttcctactcaaaagttattataaaagagttgttaatttaatcaaattatgctcttttagcctttttaagaaaaagtacatttaatgatatgcacgtaaaaactttaggccaggcacggtggctcatgcctgtaatcccagcaccttgggagaccaaggcaaggtagattgcctgagcgcaggagttttgagaccatgagattacatggtgaagtcccatctctacaaaaatttaa

SEQ ID NO: 498051 - DNA, 977 bp, Homo sapiens
catctatcacgccattcatgctgcttcccgtctccacataccaggtccagagtacttcatggatgccctccttaatagccatatgcaataaaataaagtacatattatgaaaaaaaaaaaaaaaaaaaaaaaaaaaaaaaaaaaaaaaaaaaaaaaaaaaaaaaaaaaaaaaaaaaaggggggggccctaaaaaattccccgagggcccccaccatgaccgcaccaccgtttgttgacaacagagcggccccatgcaggagcctaaattacaacgacgacgggggcgcgcttaacaacacgccggacgcggacacaacatccgtcacggcgacacccgtggacaacacaagacaccaccgcgcggggggcccacacaatcgcggcacacaccctcagagcaagaaaattatgaaccccccgaggggggaaacaataaaaacttccacgagcgcggtataaggggggtggacaccaccaccggcagcacaattgagtccgccgcgagcccggacaaacaactgtgccgcgcacccggcgcgcatttgtcgtgctcgtgacaaaacactatactaccccgaggcgggacccatgtataaaaagcgcacacgacaacacacacaacacaccacacacaagacacgaacagacacaagacacacccgacaccacggcagacgggtacgagaacagggaaagaccgcagaaaggagcagcacgagaccgagagcgccagcggtaacgaccggcgaacagcgacaggaagaacaacaacaaactgggagaccagggcagcaccgaagagacgccaaggtgggaggacgcaaagcaccgcccgaagagcgagacctctgccgggcgggatggggcccggtagacaccacgcgacacagcggaccgaggcgcgacagccggcgagcggcacgcccacgcacgcgccagagagcaagaggaacacaggagcagagacagaagcaac

SEQ ID NO: 498052 - DNA, 1423 bp, Homo sapiens
agcggacatccgcctgcgcgctgggcggggcggggcgggctggggcgggctgtgagcggaccgcgagcgctgggcgggtccgcggcgcggtcggtcggcgcctgttctcgggctgtttggcggaggactggccagcccccaaacctccaagcccatcggctggatgccgtggataagcgaggggagagcgactaggccctgtctgcgggtaccttcggcgaggagaggcgacgaagacgaagcttcacaaaagatgtctacgaagcttcacaaaagatgtctagaatcaggtctaggaaaatcgactctcataaacagcctattcctaactgatctgtacccagaaagagtcatacctggagcagcagaaaaaattgaaagaactgtccagattgaggcttcaactgttgaaattgaagagcgaggggtcaagctacgcctgacagtggtagatacccctggctatggtgacgctatcaactgcagagattgttttaagacaattatctcctatattgatgagcaatttgagaggtacctgcatgacgagagcggcttgaacaggcggcacatcattgataatagggtgcattgttgcttttactttatttcaccttttggacatggacttaagcccttagatgtggcgtttatgaaggcaatacacaacaaggtgaatattgtgcctgtcattgcaaaagctgacactctcaccctgaaggaacgggagcggctgaagaacaaggattctggatgacattgaagaacataacatcaaaatctatcacttacctgatgcagaatcagatgaagatgaagattttaaagagcagactagacttctcaaggctagcatcccattctctgtggttggatccaatcagttgattgaagccaaaggaaagaaggtcagaggccgcctctacccctggggtgttgtggaagtggagaacccagagcacaatgactttctgaagctgagaaccatgctcatcacccacatgcaggatctccaggaggtgacccaggaccttcattatgaaaacttccgttctgagagactcaagagaggcggcaggtcatcacactgtgcccctttctctgtattgtgtcaccctgagccacaatgttcctcctcctctatgtgttcagctcagccttcttgaccattaagcaacatggtttggtttcctactcaaaagttattataaaagagttgttaatttaatcaaattatgctcttttagcctttttaagaaaaagtacatttaatgatatgcacgtaaaaactttaggccaggcacggtggctcatgcctgtaatcccagcaccttgggagaccaaggcaaggtagattgcctgagcgcaggagttttgagaccatgagattacatggtgaagtcccatctctacaaaaatttaa

SEQ ID NO: 498053 - DNA, 3608 bp, Homo sapiens
ggaggcggaggggagcggagcccggagcgtcgtggaaagcattggacacatttccaccatgctaatggcattttaaatatatttggcaattttcccaattttttactgaagaaaactgtaagtttatacttgaggactgaagtgtgactctgccgattatcaggctttcaagatgaatctggaaaaactcagcaagcctgaactcctgacactatttagtattcttgaaggagagcttgaagcaagggaccttgttatagaagccttaaaggcccaacacagagatactttcattgaagaacgctatggaaaatataacatcagtgatcctttaatggctctacagagagattttgaaacactgaaggagaaaaatgatggcgaaaagcagccagtctgcacaaacccactctctattcttaaggttgtgatgaagcagtgcaagaacatgcaggagcgcatgctgtcccagctggctgctgctgagagcaggcaccgaaaggtgatcctagaccttgaggaagaaaggcagcggcatgcacaggatacggctgaaggagatgatgtcacctacatgctagagaaggaaagagagaggctgactcaacagttggaatttgaaaaatcccaagtgaaaaagtttgaaaaagaacagaagaagctctctagtcagctggaagaggagcgctcccgccacaagcagctctcatccatgctagtgcttgagtgcaagaaagccaccaacaaggcagccgaggaaggacagaaggcaggagagctgagcctgaaattggagaaggagaagagccgggtgagtaaactggaagaagagttggcagctgagagaaagagaggcttgcagactgaggcccaggtagagaagcagttatcagagtttgacatcgaaagggaacaactgagagcaaaactgaaccgagaagagaaccggaccaaaaccctgaaagaagaaatggaaagtttaaagaagatagtgaaggacctagaggcttcccaccagcacagtagccctaatgagcaattgaagaaaccagtaaccgtgtccaaaggcacagcaactgagcctctcatgctaatgtctgtgttttgccaaacagagagttttccagcagaaagaacccatgggagcaacatagccaagatgacaaacactgggctgcctggtcctgccactcctgcttactcatatgcaaaaaccaatggccattgtgacccagagatacaaactaccagggagctgactgcaggcaacaatgtagaaaaccaagtgcctccacgggaaaaatctgtggcattggcccaagagaaaccagtggagaatggtgggtgtcctgtggggattgagactccagtcccaatgcccagtcccctctcttccagtgggagctcactgtctcccagcagcactgcctcctcctctctaacatcctctccttgctcttcgccggtactcactaagcgtttattggggtcatcagctagcagccctggctaccagtcatcgtaccaagtagggatcaaccaacggttccatgcagctcgccacaaatttcagtcccaagcagatcaggaccaacaagccagtggcctacagagccctccatccagggatttatcccccaccctcatagacaactctgccgccaagcagctggcccgaaacacagtcactcaggtgctctccagattcactagccaacaagggccaatcaagccagtctctcccaacagctctccctttggcacagactatcgaaatctagccaacactgccaatccaagaggtgacacaagccattcacctactccagggaaagtgtccagtcccctgagccccctgtctccaggaatcaagtccccaaccatccccagagctgagagaggaaaccctccacccatcccacccaagaaacctggcctcaccccttctccatctgctaccactccattgaccaaaactcattcccaggcagcctctttgaccactgcagaagaccttgccagcagctgctcttccaatactgttgtagcaaatggtaaggatgttgagttacttttgcctaccagcagctagtccctaggagggagtctccacgtttgacattccatcagatttcgtccaaaagctcagtcagacttctgagtcagattatgttatttattttgatagtagctgaaaccatctgtataatacatttagtatatttcaccatgttggccaggctggtcttgaactcctgacctcaagtggtctgcctacctcggcctcccaaagtgctggaattacaggcgtgagcatcacgtctggcctaatttttttaatcgaatttatttttgtaatgatagatgcttgtcttattcctagggaaatatttgaagtaattgagatgctgtcacctaaaataatcaaaaggctcctgattcagttaaaagaattcatttaagtacagagtgtaagcgagctacaccaaagaatggtgattagcgctcccagggtggggaaaaatgaggattgtttatataggcaaaatggaggtgccaaacagaattataacattttcggaactaaggctcatttaaagatacaaatttgattggctactattgattacacttgaagggatttgtttaacttccttttgtaaagaagtaacagtcataaggatctctcatctcccagtcatttagtctagttttgaataaagaatagggggtctggttaatatatacatctaaacacaaaagtcagaaagaataaaagtagtgatgttacacgagccagctgtcagtgcttaacttttccctttggcctaatgcatttggaaggtcctgaaattgtattttctttttacattgcctatgtatgtgtaagtcttcttcaggtcagttcacgctgttaaatatacgtgcgtatacatacatactatgtatgtgcgtttatgtgtgtctgtgtgttttttttttaacagacgaagcttcacaaaagatgtctaagatcatgccactgcactcaagcctcaagcctgggtgaatgaaaccttgtctcaaaaaaaaaaaaaaaaaaaaaaaaatccaggcatttacagtgtaacattcacaatgtctaatgtctaatagaaaattgtgtggcatcaaagaaacaaaaactgtacataatcaggagaaaaagcaggcaatagaaacagatccagaaatgatagaaatggatctcgatggcaaagaagaactctattacttaaaggaaagcatgaatataataagataaaggaaagatacaacagaaaaccaagtggaacttctaaagattaagatacaaccgaaataagaaattttcatgataagcctgacagcacattatacactgcaggagaaaaagcacagtagaagcacagtaagggaaaagctggaaaaaaaaaagaaattgaatgtgccctcagtgtcctttggtacattgtgaacagtctaatatatggattatattcacagagaagacaggaaagcaaaaaaaaaaacttgaaaaaataatgcctgggaatggtccaattttccagcaaagtttataattgccaggtaacggggtaccgagcctg

SEQ ID NO: 498054 - DNA, 993 bp, Homo sapiens
  misc_feature (192)..(192): n is a, c, g, or t
  misc_feature (336)..(336): n is a, c, g, or t
ggacgagtctaccgcctgtccatgtacctgataggatcacgcattggtcaataaatctgcagcttacgagcttcgcttgacctgtagcgacccatggcactgtgcgagcgcgatgtgcccaacccatgtgcagcagggagcctttcactatggtgtcgccatcacaccgaccaagttggacgtgtacaagcntgcgacgcacgctactgagtcgcgtgtcgctgtgagcgtagggccgcgaacccataacccgttgcgtggttgtctcaattgcttgagaagcctctcatacatgttcgattcatatcgtatgctggggagatcgcaaaaacttgngctcagactcatgcgtgatatccaggtcaacctgggttacttgtgccatggcatgtactcttcttctcctgcacagtcgaaagatgctgcagcattacttacaggaacaaaatatggggactggccatccccttcagcttgttgcccagcgatgtccatgatggccaccgtcatgcatgcttctgctggcccctctctccgtccaagcagcaccgctgctgacacatgaggcatcagagcagcgaggcgcgttgcatcatcagatccagtatggccttctcaagatcctcagcaagacgctggcagccctgacgccacttcaccccagatgtctgccagattctgctggatcagtccctggaccttgctgaatacaacttcctgtttgccctgagctttaccgactcccacctttgactccgaagtggacccctccttcgggacccttctggcacagtgaatgtggccctcaacatgcttggagagctggacaagaaaaaagggagcccctcacccagtgcagtggggctcagcacaccaggcagaagggaccaggacgttcaaagtcctccctgatgttaccattggaaaaactgcttctacctggttcatctctcaaggcgaatgcggtaacttaggggaaccggtgttgagccc

SEQ ID NO: 498055 - DNA, 188 bp, Homo sapiens
  misc_feature (2)..(2): n is a, c, g, or t
  misc_feature (5)..(5): n is a, c, g, or t
  misc_feature (142)..(142): n is a, c, g, or t
  misc_feature (168)..(168): n is a, c, g, or t
ancanctacatctggtacgctgtatgttcacaggacatgtctgttattcgactcagaatatatttgtcaaccaattatcgtactaaaatgtcttgtgctgtgttataataatttacgcaatgagtttcatttcatgtaattnacctattccagtgtgatgtttctcancccaactttggcagcacaag

SEQ ID NO: 498056 - DNA, 390 bp, Homo sapiens
  misc_feature (47)..(47): n is a, c, g, or t
  misc_feature (55)..(55): n is a, c, g, or t
  misc_feature (81)..(81): n is a, c, g, or t
  misc_feature (91)..(91): n is a, c, g, or t
  misc_feature (93)..(93): n is a, c, g, or t
  misc_feature (96)..(96): n is a, c, g, or t
  misc_feature (104)..(104): n is a, c, g, or t
tttgccctgaagtcctaaaacccactttttaaaaaccctgaaaatanaagggaanccttctgtggccccaaagtctcccanattggccccnanaanactggccnggcggaggaatttgcgttggcttgcctttccaggggttagcctacaagattccagctttatatcctctgttgcttcttggcccagtgtagtcaataagggtcttctttaacatcctaagatagaggtttggttggccgggcgtggtcgcttactcctgtaatcccagcactttgggaggcccagtgaggtgggagaattgcttgaacccaggaggcagaggttgcagtgagctgagattgcaccactgcactccagcctgggtaacagagtgagactcttgtctca

SEQ ID NO: 498057 - DNA, 191 bp, Homo sapiens
gaggactatgccgtcattaacccgaccctggactactccgtgatctgacaccacagactcacgtacgactatcatctgtatgaacaaacgaaactttaatagcagtgctgcacaatcgggatgtcctgatccaacatcgatgtgtcgtaaaccctattgtatgatatggactctagaataggataatgcgc

SEQ ID NO: 498058 - DNA, 352 bp, Homo sapiens
  misc_feature (68)..(68): n is a, c, g, or t
  misc_feature (70)..(70): n is a, c, g, or t
  misc_feature (152)..(152): n is a, c, g, or t
  misc_feature (173)..(173): n is a, c, g, or t
  misc_feature (195)..(195): n is a, c, g, or t
  misc_feature (236)..(236): n is a, c, g, or t
tttaagaacaagatagagacaaaactggaatgagagtgagtcggatgaagccaaatgaatcccatccnangtgactatgccatccagtggaggagcctaatggcattggtggggcttgaaggtacagcagtagggctgacagcagcaggaangagacaaccactttcacaaanaaattcttcttggtgtactganagtggtttagtgttgagtctactcttttttggaaactctanaattaaaagcctgctgattttaaaaattcaggctggtggtttacccctccccccagctgatgtgtgggtctgtattgttctttcagggtaaatgtcaaaaatactggcaaaaaaaa

SEQ ID NO: 498059 - DNA, 356 bp, Homo sapiens
agttgacgagatgtcagacataagcgctgctccgacaggcccccacctttacaagctgctcctccagcccaccaccaaccctcatacctcggacaggcacgaggccttgcgtccatggggatgtaggcaagccttcagagccagcctctgaggagggctctgagtcggaggggagtgagtccagtggacgctcctgtcggaatgagcgcagcatccaggagaagcttcaggtcctgatggccgaaggtctgcttcctgctgtgaaagtcttcctggactggcttcggaccaaccccgacctcatcatcgtgtgtgcgcagagctctcaaagtctgtggaaccgcctgtctgtgttg

SEQ ID NO: 498060 - DNA, 281 bp, Homo sapiens
tgtctcaatgtcacagtggaggaccttcatattcacgcctggatcttgcaagggtggagttactgtagagggatgtcccaagcttgttttccaatcagtgttaagctgttagaaactctcctgtgtcagtgtgtatgtccgtagagtgtgtgtgagagcacaatcagtgtgtgcaggctgtgtatccccatttctctcctccctggagacccatcattgaagaacaaatgtaagaaatcccttcccaccagcctcgctgccttccaaggccctctgcgggg

SEQ ID NO: 498061 - DNA, 395 bp, Homo sapiens
  misc_feature (7)..(7): n is a, c, g, or t
  misc_feature (79)..(79): n is a, c, g, or t
  misc_feature (325)..(325): n is a, c, g, or t
  misc_feature (339)..(340): n is a, c, g, or t
  misc_feature (346)..(346): n is a, c, g, or t
  misc_feature (351)..(351): n is a, c, g, or t
  misc_feature (370)..(370): n is a, c, g, or t
gcttttntccaggtggaaaagggcggtgtgtagtgcgcttgagattgcgtcatctggggatctgttggagcggtatgcntattggagtgggtctagggtttccgggatgataatgttgatgtgagtcatcaccagcctttcaaagcacttcatggttaccgacgtgagtcctacagggcggtagtcatttaggcaggttacctttgctttcttgggcacagggactatggtggtttgcttgaaacatgtaggttttacagactcggtcagggagaggttgaacatttcagtgaatacacttgccagttgattcccgcatgctctngagtacacatcctnntttatntggtnttgggccgcatgccctttntgaattgttgaccctgttttaaagg

SEQ ID NO: 498062 - DNA, 196 bp, Homo sapiens
  misc_feature (67)..(67): n is a, c, g, or t
  misc_feature (122)..(122): n is a, c, g, or t
  misc_feature (136)..(136): n is a, c, g, or t
  misc_feature (141)..(141): n is a, c, g, or t
gactgaggacgacctgggtagctagctgaggaacaggagtgtggtgatcacaggaagagcaagccgngcagaagccactctgcaaaaacaccgggcttcagtgtccagagtatcagtgactntgagaaatttaccnagggnatggatgaccttgggagcagtgcggacggacggaccgaccgaaagaacgtggcct

SEQ ID NO: 498063 - DNA, 756 bp, Homo sapiens
  misc_feature (154)..(154): n is a, c, g, or t
  misc_feature (206)..(206): n is a, c, g, or t
  misc_feature (216)..(216): n is a, c, g, or t
  misc_feature (223)..(223): n is a, c, g, or t
gagaaagggggggtcttggcggccggaggaaggagtaggtgcgggtgaagatggcggcagcgaggccggaactgcatcatggaggtgtcctgtggccaggcggaaagcagtgagaagccaacgctgaggacatgacatccaaagatactacttngactcctacgcacactttggcatccacgaggagatgctgaaggacgaggtgngcaccctcanttaccgnaatccatgttcataaccggcactcttcaatgggacaagggttgtgtgcttggacgtcggctcggggcaccggcatcctctgcattgttttgctgccaaggcccggggccccgcaaaggtcaatcgggatcgagtgttccagtaatctctagattaatgcgggttgaacgatcgctcaaaggcccaaacaaagttagaccacgtggttgaccatcatcaaggcggacacgggttggcagggacggtgggaggcatcccagttggcagaagtgtgtggaccatcatcatcagcgagtggatgggctacttgcctcttctacgagtccatgctcaacaccgtgctctatgcccgggacaagtggctggcgcccgatggcctcatcttcccagagcgggccacgctgtatgtgacggccatcgaggaccggcagtacaaagactacaagatccactggtgggagaacgtgtatggcttcgacatgtcttgcatcaagattgtggccattaaggagccctagtggatgtcgtggaccc

SEQ ID NO: 498064 - DNA, 819 bp, Homo sapiens
tgtgctagtgtctgaggcccgtgtggttaatcagtgcacgatgccaaaagagcaacagaattgctgaatgccactagaaccccctgaatgtcatgccaatgccatgtgccatgtgagtgaatgactgtgacccctagaaggtgcaaatgtgtcaatggtgtgccatccacatgcctgaactgtgcaatatgtggaaatgatgaatgaatgtgctgcctgcctcttgcttggatgtgtgtgtgccccacttgctgacttgaatgcccctgtgatgcataccacgatgtttgtcttgtgtgatgcatgcatgctctactaacaatgtgatgatcacctgagtgcctgctgtgtgtgctccatgctgatgtgccaatgatgtgtgctgtgaatgcccttgcataatgcatttgccactgtgaaccctgtgacttgtaatcatgattgctgccactggttctagtacctttatctacgtgagtggtgtgtcctgtgttgaactgtggttcagcaacaaccttggccctactcatctaacctagattgctgtatgtgttgaaatgctgcttgattggcacaacccctactgctctaatctatgaaaaatacgtaccatagagcttgatatccatgcttgtgactgacctgctatacgtgagcagacagttttgtgccttgcgaccagattgtggacaatcactggtgcactccgagactttgcttgccctgcctggtggcccagatcttgcaagcattttagcacaaccactaacaacatccagtcccggatcaccaagaccttcaacaagagctgggtgggag

SEQ ID NO: 498065 - DNA, 107 bp, Homo sapiens
ctgccctacaccaatcagaagctcagtgcccaatgggccactgttttgactcggaatcgttgtgtgcacctttgtcaaatttactgtaaagtgatgagggatgtgca

SEQ ID NO: 498066 - DNA, 1309 bp, Homo sapiens
tatcagctgtatacatagtatcttgtccacagcgaagacgtgtttttttctcgggtgactattatagttcatcattttctacacagtcttatagtcgtccctctgtatgtctaaccgagatgggctgtgtgctgttctacgcgctgaacctaatcatctagtatctttcaactctttctgttggcgtgtattgttaggaaactactccccttgggaaataaatcataatgttgtatgacacgtgatggtttggtacaacggccttatccttggtagctcctcgggaaatagggcttcgggggtccctttctggaaatctagcgtggaccttctgtcagggtcacgctccatggcctgccttgccatagcgtttgtgtgagtccactggtattaagtccagctttgggcgtgccaagtacaagggggtgacagtactttccgtgcataagtaccagtgaaataactggcttggtcctggctgattgatttagacgctgaaatgccatggcattttccatccatccgtctagcgctaggcacggtgtttccaaagcagacagcagctcaagctgattctgaaggccatctaccagttacttcgtgtcttacgtatgtcctcttccagtcaatacggtgtatcttcgtgctttgggacagcgagagctataggcatctatgtgcaggcaatgccctaagctggacgtcctaactaggctgagcaactgacagaaccatctgcaccatgtaccccatccttgcagctttataaagatgtaacaacagagtcccctttcactcctatctgggaggtgggacccctttcatttgtcagattttgctcatctagggaaaataaggctttggtttccagtttaaattgcttttgtgaccttctaaaatgttctttatgcctagcactgactagtattggcattactgttgttaagcactgtgttccagaccgtgtctgacttagtgtaacctaggagattttatagttttatgtggcaatgaaatcccttgagtagacgctacagcagtggggagcacagcgtctctttacctgtcaccgaagccaggaagccccgtttgtaagcgtgtgttatggtgcgtattattggctacactcgctccacgtggctgttctttttacatcataatgttctgtctttggtttccaccctctcagaacaatcatgaatttgctacagacctaattgtatctggattaacttctttgtcttagttcgattggatttgagaaatgaaagatgtaataaggcgaagcataatcctggggcttaatata

SEQ ID NO: 498067 - DNA, 293 bp, Homo sapiens
cagcaaagctcattgaaaatttcaggatattagtatttttctgagtttaattagcataacctaaagttaacttgtaggctttgggtttctaatgctttttactgagtggtaaagatgagcaaccttttttttgtttaatagccagatactttttatactccgaatacaaatattgaaaaaaatgaaaggaaaaccccctagatcaaacttggtcaatccatggcctctgggctgcatgtggcccaggatgactttgaatgcagcccaacacaaattcataaactttcttaaaa

SEQ ID NO: 498068 - DNA, 211 bp, Homo sapiens
ttcagttacggcattgtggctggatgacacagcttgacggaggtgcctgtgcacccctcagcatctgcccaccctacaggcgctgaccctgctctcacagttcagatcctgactttcatttaccaacctttcaacgcttggtagtcttcatctccataacacatgtcacaagactcttaataggccatatcacttactttctttcgtcact

SEQ ID NO: 498069 - DNA, 254 bp, Homo sapiens
  misc_feature (30)..(30): n is a, c, g, or t
  misc_feature (38)..(38): n is a, c, g, or t
  misc_feature (87)..(87): n is a, c, g, or t
  misc_feature (99)..(99): n is a, c, g, or t
  misc_feature (242)..(242): n is a, c, g, or t
  misc_feature (251)..(251): n is a, c, g, or t
gcttaattgaacttcaagggaaagcggatnccgggganggtcgggaatttggggttgcccgggggcgaaacttttttcccaccacgnacgaacatttanttggaggttccggggcaaatgtgtgtgtgattgttggggggttgtctccaccggctttagaacccatttgaattgaataagaaaatactgaattggctttttgtcttgatgtgtttttatagtctaaacattaaaaaagtaantaagtcatnagc

SEQ ID NO: 498070 - DNA, 859 bp, Homo sapiens
tatacccaggttctatttttaatagggaaggaaaaagttacggctcagggccccatgaatttgaaacagaaagggaaaaacttcagccccccctcttgggaacgggaaataatgtatgggaaagggagcccgggctcagggggggaaagaagggctcaggggggacagtggggggtgggggtgctcctccccacctccttcacattagtgccgtacacgaacacagacacagtgcaggtgcctggcagaaacaaagctcgagggttcctaccgaaggtcacaaggggaagggcgaggacacaactcgggcctctaagtcccacacagggcagcgtgtctcacacttatacacgcggggagagacacactcgaaagccgctgggcacgtggtcacgggctgtgcagaccgggaggtgtaacccccgtcgctttcaagtcggagctctctcctccctaccaactttcagggacgcgcgagcacatggtgtccagggatcacaggctccagggagaaccaggccagcaagtgactgcccacgaagggggatggcggggcggggaagacgagcctcccatctacaggggtggtggggcatggggcacaacccctaactgcgtgaccagtggcaaggtgtatctcaggacccctcatccagaaaggggaccaacaaagaccgccacactttgtgggaagggttgccaatcccccatgaagggacgaggtctccacgaaaacccccgggaccgggtctaggacaccccaacaccagtagcaaggtctaatggaaactcccagggtaaaagcccgggcccacacctaggggtccagagcagaaaggggggggcacaaaaatctggg

SEQ ID NO: 498071 - DNA, 100 bp, Homo sapiens
attctgtatccagcttagagctgatgaggagaatcacttgacgggagaggaggttgactgagccaagattgtgccactgcacttcacctgggtgacagag

SEQ ID NO: 498072 - DNA, 302 bp, Homo sapiens
aaggaaaaaaaaaaaaaaaatcccccccctttggggcaaaggccgggaaattgttttaaaaccctaacccttttttccgggggggggggggggggggggggaaaaaccaaaaaaaaaaaaacccccccctttcggttttttcctggggggggtggggggcctcccgggttttttttggaccatttaaaaggggggcttccccccctgaccccccccaaaaaaataaaaatgggggggcggttgcccctccccggggggggggcccggttggggggaaaaaaaaagggaacctgttttcccca

SEQ ID NO: 498073 - DNA, 163 bp, Homo sapiens
tgctcgtcccattaggcgcgtctgcgtgcacaaagaccttcaggttcagaggcttgccttgtggcctggatttccggtggcattcggtcagagcttcatctcagcaaactggattgagtgttcgtggcccttccagtggacccagttaacgccctgactgtgg

SEQ ID NO: 498074 - DNA, 142 bp, Homo sapiens
tgtgaccaagccgctccctcgcaccttaccccgagtgtcagtgaccacctgccttcaaagcctccatcctgggcaaaggcagaaagaatgggtatcttagttttttttttctttatattttgggtactacgctttggcaggt

SEQ ID NO: 498075 - DNA, 447 bp, Homo sapiens
gctgctgtttactttttatacgtaatcccgtttccaacgaaatcctccaagctatccaaatatccacttgcagattccacagaaagactgtttcaaaactgctctgtcaatagaaaggttcaactctgttagctgcgtgcatatatcccaaagaagattctgagattgcttctgtctagtttttatgggaagatatttcccttttcaccgtaggcgtcaaggcgctccaaatgtccacttccagatactacaaaaagagtgtttcaaacctactctgtgaaagggaatattcaactctgtgacttgaatgcacatatcacaaggaagtttctgagaatgcttctgtcaagattttatatgaagatattcccgtttccaacgaaatcctgaaatctatccaaatatccccttgcagattctacaaaaagagtgtttcaaaactgctct

SEQ ID NO: 498076 - DNA, 660 bp, Homo sapiens
gtattctaacattatctataaatttatgaagtatattaagtaacaaattaggccagacgtgatgctcacgcctgtaattccagcacttttgttgtacaaactccctcctggttctattcctgtcaacataaagcatcaggtttccaccactagatgaaaaggggaaggttctgttatctttctcctacatttaggaatttctcccttcttacatgtgaaagtgctgtactgtttcccagctcagttaaatgctgtttcccagctcagataaacctgttcttgacccatgttctctaccaccctgttcctctgccccttttcacagtcacgttcctgaaaagaattggcagccctggctgggtgcgatggctcatgcctgtaatcccagcactttgggaggctgaggtgggctgatcacaaggtcaggagttcgagaccagcctggccaacatggtgaaaccctgtctctactaaaaatacaaaaattagccgggcgtggtggcgtgtgcctataatcccagctacttgggaggctgaggcaggagaatcgcttgaaccctggaagcagaggttgcagtgagccgagatcacgccactgcactccagcctgggcaacagtgcaagactcagtctcaaaaaaaagacgaattgcagccctgt

SEQ ID NO: 498077 - DNA, 159 bp, Homo sapiens
atgacaaaccctgagaacaagaacgaaaatctggttcgcttcatacattgcccccacaagtcctaggcctacccgccgcagtactgatcattctatttcgcccgctctatagatccgccacgctccagagatatctcatcaagcaaccgcactaatcac

SEQ ID NO: 498078 - DNA, 1067 bp, Homo sapiens
agcggacatccgcctgcgcgctgggcggggcggggcgggctggggcgggctgtgagcggaccgcgagcgctgggcgggtccgcggcgcggtcggtcggcgcctgttctcgggctgtttggcggagtgagtgtctcgccggtgtaccccgcacaagttgtgggccggccctcccgaggagctgcgggggacgcgccgctcgtcccatactctcgggcggtggtcggctggctctggggtgccggcggggcggtgtgggggaggggcggccgagcccaggctcttcggcacttatcgtgggctcccccgtcccgggcggtcctagtgccggcgacagtggctccgacacgggcaggcccgggcgcgggagtggggattccggtgaccccttgttgacctgcgggaattcctctgcactgtcgtcggtgctgggcctcggggcgtcgagtgcggtcgaggtcgggaggtttggtgcttggagggaggatacaggtttaggcccgacaaacacttagagcttgtgtggccatcttgtctttcccgacaaacacttagagcttgtgtggccatcttgtctttctaacggtgccatttcctccctgaggcgtggaggactggccagcccccaaacctccaagcccatcggctggatgccgtggataagcgaggggagagcgactaggccctgtctgcgggtaccttcggcgaggagaggcgacgaaggtctgcaccagcgaggcacggacaggcagcagggggtagggtatagggttggaggccgccgagttggcccggggatgaggagcaaacctgtggcttccgtggtctcagtggagtcccaactgtgacctggcctactggcccagacaaacctggcttgcttttttaccttttcggtctaattcttgtcagtgccaccagaccttgtcctctctccgcggaaacacacgaaccaactacactgaacttcttgtagttcaaacttctgcacctttggccattgcccaaactcttaaatctggctacttcccaccttaaatggcttctcttaactagtctgtgcttgtgg

SEQ ID NO: 498079 - DNA, 143 bp, Homo sapiens
ctgtgcaggatgtgctcacactgtatctcagtactcggaggtgggaggagatgctgaaccggagtgagtgagtgagcgagacacgcatgcactcagctggcgacagagcgagatcggttcaaaaaaagctcctcatgaaaaag

SEQ ID NO: 498080 - DNA, 114 bp, Homo sapiens
ccggctgaccctgccggccacaccgtgcctagccgctccgtccggcacctgccccgtgaagcactacacgaatcccagcccggatgcgactgtgccctgtcgggctactcgggg

SEQ ID NO: 498081 - DNA, 1340 bp, Homo sapiens
ggtccagtttaattcgtgcctgcctgcggcggctcgagtgcagcagatagtgacgtgacagctttgtagcagatatgctggcgggccctgtcagttatcgggtgtgagcgcagtcgcgcagaagtggtctgtgaggggaagtgggttctacgtccatgtgcagactatgaccggggggatagtcatactgtcaggtggacatcgtggtgttgagctatatgtgcaaatagtatgctggaggtggccatgtaggttggctcggtgcgagggttatctgtggtgagtcatcgtaatgacctcagtacttgcccaatagagttggtgactatcgccgacttttctgacgcggggacatatgtttgttacgaaggaatagatatcccagtgacccgtttaagcatacaatgtaccgaaagagtttcgtttcggaagaaagttgggttgcgtttgaggtacccttggcattgggttttacataatgtgtgtgtcccatttattagccacaagaagaggagacagttcgggaagtctacaaggggtccggggagggttcccgcagcttgacatagagatttcgttctgtaaggattgtaaatcagagaaaaagggttaaagatgagaggaacggaaagttcgttagaaaagtagggtcgtgtggtatttcagacagaagttttaccagacaaagagatcccaacatagggggggaaggaaataagcgatacccatagggcggtttcctagggcgcaaaccgagggcgaaacgcggtggaattaaccccccgttggatccggggaattcccccccacgggaaccccccgttggcacaggtagtctcacaggggccccgttgacaggaggacacacacttcgttttgtcacaagacaagaattcctttgcagatttcctaactcactctgttgttcagtagaacttcggcgcactggaaaaaggggtgaaaaaaaagccccaaacaaagcccttgggcagacgattgtaccccacggttaacagagtcccacttcccctttcccattctttttccttaattcaacgggggcgcaaggacgtgtacgccaaacccgtttgtaaaacgaacaacagtattggaccaagacgttccgggccctttatgggctatcgaaaaatccaaggggaaagaggaagtccagtgggagaaacgaagaaggttttaaagcagagtttgtgaagagtccgtccgtataaggcgacagaagtagaaggcctttttaggaaagacggaaattggcatccgtggaagatggcacaaagaggttgtgcgaaaggttggttcgaaccatccttgtggtaaggggc

SEQ ID NO: 498082 - DNA, 851 bp, Homo sapiens
  misc_feature (851)..(851): n is a, c, g, or t
caggcacgagacatcaaaccactaactatcacgaacactctatatcagagcactgaagacacgtagcaacagaacgaccgacttaccagtgtgaactcagatctctggctcactcacagtaccaactcaccagtgaattgacgctgcttactgcacagacacaggacgatctcttcacagccaacttgatctggcaatgtgcagacacaaactacacactctcaagtgagcactacacagaccgtgccgcccgacaattgactactacaccactcgcccccactacacagcacttcccgccttgattgcattgtaatctagagccatgtgaaaccacaccacctgtgtcagtgtgactgtgatcttgaccacatgtcttgccacagagcccctgcactatggccacttctctacctgactacccacaacttgggaacaataaatctcgatcgtacccttgcagcaacagcatgcaaatcaacggacgacctgtcgaatctggcacgcattgctgcactctctaatggattgcacacaacaatccaatcctatgcaacatacaccactgtgtggcccatccatactgagtgcacactctccattgtacctgcatcactgcattagaactatctcatcacacgacacattgacgctgcccttattgcccatcaactgagagcactcgccccaccaaccagatcacagccactttggagtttaagaacacacctgtctaataatataatgaagatggtcctcgtgtccgtctaccttcccatgctaaccaaagataacgcgtccaaacaattttccaatcaggcaactgacctacactagtctttgctctccgn

SEQ ID NO: 498083 - DNA, 319 bp, Homo sapiens
cacatcaatcctaggtatgtagtcaagagagagaattttctatgtccatgcaaagacttgcaccatgcaggttcacagcagcttattcctaacagcccaaagctgagaacaacccagatatccatgagcatcaacaaggtaaatggatgaatggcggcatattgatcgaatgaaaaaaaaaaaaatcagcaacaaaaaaaaagggacccacaaattaccacattaccacagattaactcctctcaaaattttgaccctgcattgaaagcagccagacacacaagaagcactaactcttaaccccatttattttgaattt

SEQ ID NO: 498084 - DNA, 106 bp, Homo sapiens
attgcatccgggccggggcaacagagcaagacctaccctcaaaactaacaaacaaacaaaaaaaacagaaaaccccacacagcacaatttgtaccagccagccgtt

SEQ ID NO: 498085 - DNA, 252 bp, Homo sapiens
aacatgtggtacccgtggtgggaggcagctactaggacaaccaacacaactaagccaacttcaaaggtccagactgctactgagtgccaccaactgcaccctacacaccacggtagttcttgggggtgccacttccccggtgtctcaagcaggggaacactgtgcttgtgcctgaactgggtgaagttccacacctggggaccaccctgggcccattggtgcccctgccctgcccctctgtcctcccaccac

SEQ ID NO: 498086 - DNA, 282 bp, Homo sapiens
tgtaccctgtacattcgtgtcattaatccccggtccacccgttatctattctaccatctttgcaggcacactcatcacagtcgctaagctcgctactgatttgttacctgagtaggcctataatataaacatgctagctgttattccagtgctaaccaaaaagattaaccctcgttccacagaagctgccatcaatgtatttcctcacgcaagctaccgcatccatgatccttctaatagctatcctcttcagacaatatactctccggacacgaattgtca

SEQ ID NO: 498087 - DNA, 159 bp, Homo sapiens
cacgaggaggatttgtgcttccaaactgggtcgaatttgttggaatactgtgctcgccgctcgtgcacatctcaagcggattccaaaagggttattctacagatcatccaatcggtcagaatggttgtggtgattcagacgggcttatcgatgccagtt

SEQ ID NO: 498088 - DNA, 155 bp, Homo sapiens
  misc_feature (73)..(73): n is a, c, g, or t
  misc_feature (106)..(106): n is a, c, g, or t
  misc_feature (125)..(125): n is a, c, g, or t
ggcacagggtcacgagagacaatggaaaatcttggacttgctcaaaattgtactatctctattcaggattatnaagtttttcgatgcgaagattcactggtggaangaaagataaaaggggtcantgagctcaggaagagcttactgtctgcctt

SEQ ID NO: 498089 - DNA, 382 bp, Homo sapiens
  misc_feature (49)..(49): n is a, c, g, or t
agagactgtgcgagatggtgtgagaaaggaaaagaccacggattctgangcctgcatgaactgtgaggtgtggaataggcaatgaaaaagtgcactcaaaaagcagagttggtccaggcttggaacaagaggtttgagctggagagtctgtgcagtggcagccataggaacctgaggcagtgggactctctgtggatagactgattcttgtttagaaacaacagcgaaaagaagaaggcaggaaagaaactccccggctcggaggaatgtctctgtgatccccattcttgatggagggagtgaaaaggggcctgggcttcgccccgttggtctcctgacagaaacagtaagtgacaccaggacagaaggcaggagcccttag

SEQ ID NO: 498090 - DNA, 188 bp, Homo sapiens
  misc_feature (32)..(32): n is a, c, g, or t
  misc_feature (40)..(41): n is a, c, g, or t
  misc_feature (43)..(43): n is a, c, g, or t
tgagactgtctcaaaaaaaaaaaaaaaaattnagttcctnntnttactgctcgttgataatgtgtctggtcacccaagagttctgatggagatgtacaaagagattaatgtttttatgtctgctaaacaacatccattctgcaggatccattactccatgggtcaaggagtaattttgactttcaagt

SEQ ID NO: 498091 - DNA, 814 bp, Homo sapiens
  misc_feature (313)..(313): n is a, c, g, or t
ggaggaaatgcggtagtgaccctcgggcctcgccatgaagagccgctgtagtaaccattgacctgccgcgccgtactcgcggagctgaatgcgtagcgtgcgtagagaatgcagaagatagacaaatgtttatgtagtggtggaatacatagagtacagtaccttattctgtcgttcaaaagaccgggactgttaaggcgtacagctttaatcttggaatggtggcaataaggaatgtcatacaacagtagatgttgagtggccagtaagtaatatgcatgcgcgtcctagttttgctgatgaacagatgccngaaaaaacaattttgtaagagtgcggagattacgtcacgtgcaaagaacagcttggtggtggactacgaattggtcagatcttccaacttgggagaacgtggattgaaggtctgacttacgcagtgtataatgcattgaagctctatgatagggggaacatggttccttgacagattgatgagtacgtagattttcaagagtattcctaaaggttagcgagactggattggagggcggatgatgttaagattggctggtcgtgaaggctatccacttgatcatgctaagaggtgtgaaggcttgtgcttacttttggacaggttgactgaaactagtagccagggtacctgaagggttgaagtactgaagagggtgttaaagcattatttccctatgggagcagtctcattggaacactgtgttttggaaagggatcgcggggtcatggtcggagtggggtgacaaaattggacgaagcgtctggaagagtgactgggcag

SEQ ID NO: 498092 - DNA, 182 bp, Homo sapiens
  misc_feature (24)..(24): n is a, c, g, or t
  misc_feature (30)..(30): n is a, c, g, or t
cctgaatatcaattaacacagtantataanatcctctgcatctgcactttgaaaaagcatcacagggctgggagcagtggctcacgcctgtaatcccagcactttggaaggccaagacgagtgaattacctgaggtcaggagtttgagaccggcctggtcaacatgaagacaccccgtgtct

SEQ ID NO: 498093 - DNA, 230 bp, Homo sapiens
  misc_feature (53)..(53): n is a, c, g, or t
  misc_feature (101)..(101): n is a, c, g, or t
  misc_feature (222)..(222): n is a, c, g, or t
tgaagtgtgctggggccagcgaggagaggacggcatgtgtatggggcccctgngggacctgccctcacttttgatgactgctgctgccgccaaggccgcgnctggggtaccagtgcagaccgtgcccgccacgtggcacccgggtcccagtgcccgacttcacagagtgagagcaattcattctgggacacaagcccccctgctactggggaagtctccgcnagacgaag

SEQ ID NO: 498094 - DNA, 339 bp, Homo sapiens
  misc_feature (339)..(339): n is a, c, g, or t
tctacattctgtctctatggatttgcctgttttggacattttaaatggcatcatacaatatgtggcctttggtatttggcttctttcatttagcgtaatgttttcaaggttcatccatattgggacatgtatcagtacttcatttctttttgttgctgagtaacattccatagcatggctataccacatattatttattcatttaaacacggggtgtttgccaatttttttttctttggggcccagactttattaaattttagtcagtcaaaggaaacaaatcaatgctttcttagggggcaaggtattctcatctatgagcagtgcccagacagcggn

SEQ ID NO: 498095 - DNA, 171 bp, Homo sapiens
aaaaacccggaaaaaaattttgtaatttggggccgcggtggtttttttttttaaaaaaccccccccccaggtttttttatttggcccccccagaaggtttttttttccccttttttttttttaaaggggttccccttttttggggtttaaataaggggtgggggtgcccga

SEQ ID NO: 498096 - DNA, 242 bp, Homo sapiens
cttgagacagagtctcattgtctgtcgcccaggctgaattgcattggcgcgatctcaactaactgcagcttccacttccaaggttcaagtgatctcaatgcctcagcctcctgagtagctgggattactgccatcatggggttatgccatgggatagctgccatcatgcctggccaatttttgtgttttttagtagagatggggtttccccatgttgaccaggctggtctcgacctcctaac

SEQ ID NO: 498097 - DNA, 1119 bp, Homo sapiens
gcccgctcccacgtgcttcccggcgcccccgcgggcctcccgctctattctccccctggggagggctccctgcgcccgggccggcacggccgcggtagtggcacctcgggggcagagcgctacaagggccggcgcgtgcgagacacgggacgacggcacggccgagaagcagagagagcacgagagagcaagcggcgaagagcgacaggcacacagcggaaggagccaagacaagaacgagaagacaggagaagaggcgaagacaacaacgaagagagcgcaacacagagcgcaagagcgcgccacaaacaacagtgagcgcaaaggcgcagagcgggaacaaccaacacaacaggaggaaaacacgaaaaagcgcggcggcgaaccagcaacgaacgcagcggacacgcagagaagaacaagaacgagacaacgaggagaagccacagaaaagagacacagacgacaaaagaagacgacagcacgagcgccagcacacacgcaggtgagggcggccacacgcacagcgggagacacagcaagagcaaccgacgacacgcacagggaggaagagaaggagacgacacccatagagagcggggaagggagagataacacggaagagtgggagcaaaaccaccagcgagaacaccgagcggaacacacaaagacccgagacagacaacagcaggaggacgcgaggccgcacaaacagaaagagaaacacaggagaggaatacaacggaggagagggagccagcaggcaaaacaaggccgcatcacacacgagacaaaacggcgcaaaaacagcagacaacagcgagcagccgacgaagggcgaagacgaaagccaggagacacacagcggacaccgcacgagggagataaacaacacatcacacaccagagaggaaaaaaagccgagaggagacaggaaaagagacaaggcaacaacgagctcacgaagcacaacacagaaggaaacacacacagcgacagcgaggagaaagacccaaagcggcagcaccagagagcaacccgaagacggagacaacacagaagaagcagagacaagccacccgaacaacaagacagaaccacccccagcacggggagaca

SEQ ID NO: 498098 - DNA, 150 bp, Homo sapiens
gatctagaggatctcatccccggctctgggtactagcaattcccctgctcagcttcccgagtagctggaataacaggcacctgcaccatgccggctaatttttgtatttttagtagagacaagattttgccatgttgtccaagctgatct

SEQ ID NO: 498099 - DNA, 263 bp, Homo sapiens
ccgtgcgtgagtggcaaggggatcaaatgagctgctgtggggcggggtgccccaatattccagcagcctgtgaggcccgcccagagccgatgaaagcagggtgataggcagccctactccgttaaccaccgtgctgcatggggacctgctcaggggggagtccctataggagctgccatcatcagcaacaggagagccgacccctcccgggacccctcccggatgggcggccccacagacccgttggaaccctgcagcggccg

SEQ ID NO: 498100 - DNA, 261 bp, Homo sapiens
  misc_feature (4)..(4): n is a, c, g, or t
  misc_feature (156)..(156): n is a, c, g, or t
  misc_feature (175)..(175): n is a, c, g, or t
  misc_feature (192)..(192): n is a, c, g, or t
  misc_feature (199)..(199): n is a, c, g, or t
  misc_feature (231)..(231): n is a, c, g, or t
  misc_feature (240)..(240): n is a, c, g, or t
  misc_feature (255)..(255): n is a, c, g, or t
  misc_feature (257)..(258): n is a, c, g, or t
  misc_feature (260)..(260): n is a, c, g, or t
cgtntttttactggagacagagtttcaccatgttggccaggctggtctcgatctcctgacctcaggtgatccacctgccttggccttcccaaagtgctgggattacagacgtgagccaccgcgcccagcctagaagtgatttttgtcaggagacanaagacctttagtgattggngtcaagcaggtggagtntgaagancagctctgccctttagctgtggaaccttgagnaagcacctnacctttccagggctntnntnt

SEQ ID NO: 498101 - DNA, 133 bp, Homo sapiens
gaaagagagacatcttgtcgtttgataaaatcaaagaacaagagggagagagagcgccagaggcagcgggaacgggcagatccgcgaaacggagaggcggcgggagcgcgagcagcgggagcgggagcaacgc

SEQ ID NO: 498102 - DNA, 154 bp, Homo sapiens
gtctagatgtatcccttcgattgtggactcagaggataagatggcatcaatggacttcagtggagatgaggagcagcagggagaatggagtatcttggattcagtggaaggagtcgttgacatgtacttatgacgcggcaactgtgatccaatg

SEQ ID NO: 498103 - DNA, 473 bp, Homo sapiens
cgcagtggctcatgcctgtaatcccagcactttgggaagctggaccatttgtgagtcaggaggttcaagaccatgcctgcaccaacatgtggtgacatcgccaatcttcacgtatctctaccctgaaaaccttagccgtggctactggctggtgtactgccgtggtacagtcttgagcatacctcaaggaggctttgcatgtacggcagaagcgggacagttcaagcttgggaaaagccccccatggggcacgggtgcccaacaccgcaacttcggctttggttttaggaacagggtctggatgcaaaccttcaatggttgcatccccgataggcacagcatcgcttacatcagcgatcgattccgcacatacgacacttcgacaacatcaaatgtgtgtgcagcagcgcgtcactcctgtgcggagtctacccaacacgaatagcagccgctcgctcccgaccccgtcacct

SEQ ID NO: 498104 - DNA, 477 bp, Homo sapiens
  misc_feature (21)..(21): n is a, c, g, or t
  misc_feature (69)..(69): n is a, c, g, or t
  misc_feature (362)..(362): n is a, c, g, or t
tttgaaacagttgaaggtctnctgttagggaccgtgcctaatcctagggaattgtactgaactcgtggnagcatgttagtatcagatgtgtgcccttgtcccgtcttgcttgtaggaagaacaagagacgagacacagcaaggtgatgatgggtatgtgaagcaggataaagaaaaaaacaggacaggcattacaggcttaagtctgtaatcccagcactttggaaggccaatgcgggtggatcacctgatgataggagttcaagaccagcctcaccaacatggtgaaaccctatccctattaaaaatacaaaaattaacaggcatggtggcgggcatctgttgttccaggtactcgggagnctgaggcagcagaattgcctgaactcgggaggtggaggtagcagtgagctgagatggcaccactgcactccagcctgggcaatggagcaagactctatctaccccccacccccaa

SEQ ID NO: 498105 - DNA, 246 bp, Homo sapiens
  misc_feature (237)..(237): n is a, c, g, or t
  misc_feature (241)..(241): n is a, c, g, or t
ctcagtaccagaagagacggatgtgaagacccaagagagcacgcttttcatagttggatatatttttgtgtggtgtgtggtaatttttgcttcttttgtgatacaatttgtcctctttttataatagttggggatttttcactgacatgtgagtaagataaatgtatacaattggggatttaattgggaaatgtgctttcacttgtgagtttcagtcattttctggtacgtcgggtntcantgtac

SEQ ID NO: 498106 - DNA, 366 bp, Homo sapiens
  misc_feature (1)..(1): n is a, c, g, or t
  misc_feature (345)..(345): n is a, c, g, or t
naggcccatcatctcaaggtaacggcacattcttattaccacatgcattaatccatttctgcactgctataaagaatacatggaactgggtaatttataaagaaaagaggtttaattggctgacagttctgcaggctgtacgggaagcataacagcttctgcttctggggagacctcaggaaacttacaatcgtggcggaaagcaaaggggaggtaggcacatcttacatggctgaggcgggagaatctcttgaacccggaaggcagaggttgcagtgagctgagatcgcaccactgcactccagcctgggcaacagagcgagactctgtcacacaaacacacanacacacacaaagaaattacca

SEQ ID NO: 498107 - DNA, 1909 bp, Homo sapiens
  misc_feature (1661)..(1661): n is a, c, g, or t
  misc_feature (1759)..(1759): n is a, c, g, or t
  misc_feature (1909)..(1909): n is a, c, g, or t
gtaggcgagcacgaggcttagtcgagacagccagtagtagctcgacagagtgatgacgtcagtcaaggggccagtagcagatgttgcagcatcttgtgagagatctgacggagtagtgaaatgagcagcccagggcagacggatgcagaccagagttataagcctacgcactcagtactaactcaacgcgcgactctattcctcgctcactgaacgtgtcctgccatcaattccaaatgttgagagataacagctgacacagtgtagggccaggtcagaaagcacagaggacgtctgaaagcagccccgctgtgagactagctacggacaggagacataacgcataatgtgatactgagtcccttatagaggagtgagtcggacaaccacggataggttcattggtggggccacaaagactcaattgttcgggggaatatgcgatatatgaataagcagaggttagggcaaggggacaggaaactacatagcttcgtcaaactcctgggaggaactcgtaagcgactatgcaggttaacgtcacggtcagtgttgtgcgctccttctattagggccatgagaggcacctttcccatctccaaggctctggcaaatagccctatatggagaaatttaaatgtctaggccaacttccagaccaaaccgaagaggaggcgcccccttccggtggagaattaggtggacaccgcttctagttcttcggattggcaaaagaactcctcatgcaacaggcggtccgtgtggtaaaccggttggcgtccgcaggagatacgggggaaagagccaacagcgaatgtgccaatatcctatggttgtggggaaaggctaaaacctaaatgcggaaaccccaccgaggacgaataacccgttattgttcgtggaacggcaaagggcagtgcactggctacacacgtcgccgacagaactggctcttcatcaacttaacgcggccccaaagtataaagggtgctaaaaagcaggtgtgccgcctggttcacgagagcaaacaggggcgcacacgagggcctaaatctgctggggatgctattttttcaaattcgtgataggaagcacagcccaggatgcttaacactaccagggagacggggtccggattatcgtcaggggcaacccaatatgattaagcaacgatttgaaggaccaaaaccaataccttccattacagaagataccttccgtttaaatacgaacgtaatgccatagggaagatgcccccctctagacgcaagcggcccccaacaagttatatggcgccaaatttgcaacactgttcggttaaattccgagggcccgccattaattgtgacaggcacaaatttatacatggacctcaagaggatagggatatataggcgcccataacaatgtgcgatcgcgaatgagaatgcccccgtggttgggaacagggattttcatcgcctcgttggtgttcgcaccgctaatcaccggaacagaccttaaatatgtgccccttgtgggacgccgggaacaacggagcacacctctcttatcgtgggacaaatcgaaccgcagtggcggatcatttgcgacagtctggccattctggcacgctctcgaaagcttactcgcatacagtcgcgcgccctctttgagggagnatttacgaaagtcttctcaaaaacagcgagagagtgttcaccaccaagttgtccctcacaatcgttggacacaacaaccgagctctttcggcaggttnttaataatctaggaagaatcgcaccagcggttgtacgctattaggcggatggcagtaccgaagatcgaaccagccgcagctgattgggagacagcacatcggatttcgtggcaccgattatgtggctcattcctgctcatcgtcaacagn

SEQ ID NO: 498108 - DNA, 216 bp, Homo sapiens
catctccaacaaataacatcaacataattcaacatcaacacaacagcagttcagcaggtcataacagttcaacatggtgtttgcaggcacattcgtgcaatcagtccaggtcatggcgtcagcagggtcagccatgtctaccagtgtggcatttgaggcaacacagcatcacactcgcaaccatgttgcagcaagcccgccatccactcatcaggc

SEQ ID NO: 498109 - DNA, 186 bp, Homo sapiens
ccacgaagattacaggcgtcaccgtttattcatcatggactggcttattagatactggcctggcgtcaatacatccgtccttcatgatagaagctccctgcgctgaatgactgcatccctctctagctgaagtgagacaagatggatactggtgaaccaagccaccacatactgtaaatacactac

SEQ ID NO: 498110 - DNA, 1306 bp, Homo sapiens
tggtctagaattttatgtttacgggttcttcgattgtgtggtagggtggggggcatccatggtagtcactccaggtttatgggaggggttcttctacttattaggacttttcgcttcgaagcgaaggtttctcaaatcatggaaatatttattaattataactggctggtaagaaaaatggatatggagcctacgcgtgaaaatgtggcatctccgtggtgaagctccttcaccttcatgtgaaaacattcgtggagggggattcccaccccattttccgtgggggcaggccttcgaaaaccattcacatgtgaccacattagcgattgaggccactgtgcgtgctttcttccatgggccaccctttttccgcgagtgttattgcagcttattcgtggttcaaccctcctgtggaccattttttcacagctcattttaaaacgcatttgggtgagattcgcagtgtgggaacagagggctcgtggggggaacttattgaatttgcccccagcgtgggccgcggtgacagaacttcctgtggaggacaagcgtggtccctctttcggtgcaccttgggggggacattcctccttgagaatttttccgggtggttttcggcgtggaacccaggccccaaagatgtgttttcacggctccggggggcacgaaccttgggaccagaatcaaaggcctgggggacgaacacgcgggcggccaactttttttcgcaaaaaataaaatttcccgggggcggtagaaaggggccccggggataaattcacctcaagggggggataacccgcgctggttcacccacgggaaaattacacacaggtgcggattagaacatattttcccccaaaagaggggcgcgttttcacacccgtgggcggaaacaacgcactcctcttataagaaaggcaaatacaaagaggtggcggcccattatttctttcaaactctcctatacgtctcttcgtcgcaacaaggggtcgtgggcgtcgcccgccgttgtaaaaacacccatctgcttgctggagaaaaaaccgggtcgaactcagcgagcacgctcctcaaaagagagcacaccaacagcaggggggcaaataaaaaacataagtggcggcggacaaaaagtgagtatagaccgtggtgatacacgctccacacaacgggcgtgtaaaacgcatcatgagtctcgctaaactaactgagcctgggagcaaacaaagatagatctaagaactaacactacgtcatggagcgtcgttagacaacgatgatgctagggcgcatacagttcatc

SEQ ID NO: 498111 - DNA, 1184 bp, Homo sapiens
aacgtcctcagatcccacctacgtatgatgggcggggttgctactacgcgtctcccgtcatcaacctcgatcgcctgcctcctatgcttggctctgtcgtagcccctgtagtgcgtgtcgctctccggtgaactccccgatgggacgagactgtaggccctggtttgcatagccgcgtaccgcgtgtcggtcgagaaatacgtctaagcgtctccggagatgtgactcatggatcgcatgaccatggagaactcgtcctccgctgagtacaagctggcccacaggagtgacaatcagtacgcctaagtcgagtagagtatcacctcgcaccatcgaaccactccgtcgagcacctccctctacagatcccgaagaaccgcggatctcccttgtgcaccgacctacaattccgcgaaccgtgccgtattgcaagccagctcggactagatccggattggaaccgcagtccgggtgactgcgaactcatctcctccatcctggctggttcgaaggctccgagttcccggcgttcgtagccacaaggcctacacctcggtctcggtgcctctgccttccaacggacctacgctgcattcggcactcagacggaacgcgtcgacttcgagcaaagacagtagctttccgaccttccacaccatggtgggccttgacaacccgacacggccccccgaacatgttgggacaagtgcaagggcccggcggccgaaattgcaagcctggccgtgccatcgtcggagcaagatgctgccgcgcaggggactttcgaaacctcaccggtttggcaaaaaccgacaaggttcgggtcacccaaaaacccattgaacgggcaagcttgccacgaacccttttcggacgccgcggttcacccatttgattgcccccagaaagaagtttcattggggccccagttcaatgcccaggattgactggggcctaacgcaagggggcccagaattgatgcaccactgggtcacaaccaccggggctcccgagctgtgggtgcggcaatggaacggttccgtcgttcccaagccccgtgggccttaattcgggcttccgaaccgaagttccctcaaccccagaacccgcgggacaagggcactctgaacccaaatcttttagaaacttccaaacctgtgggtagggagaaattgcgcacccgt

SEQ ID NO: 498112 - DNA, 166 bp, Homo sapiens
gaggagataaaaccattgtttttgtggaacaaaagaagatgtgatgagcttaccagaaaaatgaggagagattgggtggcctccatggggtatccatggtgacaagagtcaacaagagcgtgacttgggttctaaatgaattcaaacatggaaaagctcctattct

SEQ ID NO: 498113 - DNA, 700 bp, Homo sapiens
  misc_feature (278)..(278): n is a, c, g, or t
ggacgctccggcccatccgctgtccagagcgcgcgaggttcgggtagctcggacaggctgctggtacgcggcgtccagccggcggacaggctgctttggtttgtgaccagtccaggcaggacggcctactcctctccagatatgaaggatctttctgtgccacgtgctgcgatggcctgtccattcgtggcgttgtggagccgagctcaagcatcgcttgaatgtgcttatctccctgctatgtaaccagatagagcgaatctggtactgcgctgaangccgagcgatctgtgtccgatccaggaacaaattacatgcagtcgatcctgtcgtcgtgacgtagatgaccggctactctgggaactctctgtgagcagtttggcgcacacgtcatgtagccataggacgcgtggttccaccgggcgcgtgttctccatcaccagtagaggcagtcgaattgtttggttcgtggcgcttccagtgggacacttctagctgcgtgacctagaggtctttcctgtgccagattttcatgttgcgcgcacgtgatggccgcggcgtgctggtgcaacgcagtcagcccctgtcttggcgtggccggcgtcctgcgtagtctgtagaccttgcttgcctggctcgcctgcttgcagggtttgtggtcaccatgacctgtgcaagagcgcttgtcccctcagaatcc

SEQ ID NO: 498114 - DNA, 384 bp, Homo sapiens
ggcaagcatgtggtgtttggcagagtgaaacaaggcatgaatatagtggaggccatgggagcgctttgcgtccagtgaatggccctaccagcgaagatacgatcaccattgctgtctgtggagcgactcgagataagttagacttagtgtattatcttcaaccaccagtatcattccttctgtacgtctcagtgagagcacccctccaccccatttgcttcgagagatatccttagtaatctttgtgcgcatcgcttgaagcttccccttgggctgtccatagattttcctttgttccctcccatgcactagctgggattgtggagattaagtgtatgatgtatgaaatagaaactatgataacaagagaaaaaaacaaaaagg

SEQ ID NO: 498115 - DNA, 115 bp, Homo sapiens
catctcaagctctcacaaaaatggctgattactatgcagaaaagcctgcacccatcaaaggtatgtgctggcaaacagtgaaactaagggctgccggtgtcacttatttattcta

SEQ ID NO: 498116 - DNA, 219 bp, Homo sapiens
tcatgggggcatatttttcatgaatggtttagcactattctccttggtacagttctaacactagggagtgtgttctcatgagatctggtcatttaaaagtatgtagcaccccaccccttgctctcttgctcctgctttcaccatgtgatgtgactgcttcccctttgccttccgccataattggaagcatcctgaagtctccccagaaacagatactgc

SEQ ID NO: 498117 - DNA, 160 bp, Homo sapiens
tattagagatctattgctcctttagcattctgcgtaaaggcgtgacttgggccccaagccaggacagagatgagagcagtgtcaagcccagagcaaccgggctcaaacacacgaagaagtcagggtccgactggagttcttaggcagtggtccctgactg

SEQ ID NO: 498118 - DNA, 476 bp, Homo sapiens
gtgtttgtatgccatgccccctcaccccaccattgtttccacttatttctcattcttcaccttaccagttgaagaactggatgccatggcaaaggcccgcatagctttgctgccatggtagagccaggattcacactgagctccatctgattcccaaagtgaggccagtgccacagtgctgcctcccgtgacgcaagactaaggggatttatagcagattcagatacagctattctagtgaagcagttccgcaaactagagttcataaaaatagtctttggaagagaaataggtcattttaatctttttactttctcacaaaaataggcttttctaaagtgaatttgtaaaggaaagaattattgagtgcagtgcatgatgagaggttttttttttatttttagtctatgacaagatagtctcatgattttttattgaaataaaatgtacattttggataatgcacaatcataaat

SEQ ID NO: 498119 - DNA, 351 bp, Homo sapiens
  misc_feature (40)..(41): n is a, c, g, or t
  misc_feature (76)..(76): n is a, c, g, or t
  misc_feature (93)..(93): n is a, c, g, or t
  misc_feature (111)..(111): n is a, c, g, or t
  misc_feature (156)..(156): n is a, c, g, or t
  misc_feature (169)..(169): n is a, c, g, or t
gcgggtggtggggggtccgtggggggggttgtgtgtgttnnttagttggtggagctttgttgggatggtttggtcngtggggtggccctcctntatatgttcttgggagcntttgggggtgagaacacaggttctcggttgagaattagttggtangtgtggggggccncatggtgggttgggccgaatttgcccttcacaagttttcggaacgtaaggggggggtctcccccgccccattaacaaaataaaaccctcattcacagggggaaacaccctcagggtaaaacacctatcccccattttcctcctatccctcaaccccgacatcattacgggtttttcctttta

SEQ ID NO: 498120 - DNA, 586 bp, Homo sapiens
ccacgcgtccgggcaaatacttgaaatggaactcactccttccactttccccctatttcctgggacagaagaaagggggaaagtggaaggagtgagttccatttacgtatttgttcggtcgcagtgaaataatcatctttgaaagataagaactaaaggagaaaaactaaaaccataaaaatacaactgtagatagtcactctcacagacgaacacgacccccacgcaccagccccaacatcggagcacacaggtacctcgaggagaacacacatcacccggcgcgacgcacgcacgggatgcgaatcacacgactgacgcgcagatcaacaaccatacaacgcagaggagtctctgatcaaggacgaattgaatctgccaaggttgcaaaacatcagcaggattttacacagcatgatggcaacacgaccaaagacgcactacacgtagcagaccgcgcagaattcgcagaacagaaagcacacaactaccacaaacgaagcacagagtagataaaaacaacagtaatgcgtactagaagaaaaagagactctcagcggatggaggactatccacatcagcgcct

SEQ ID NO: 498121 - DNA, 302 bp, Homo sapiens
ttgtcccctataacatttatgtgactcttctctcttacctgaacgttgcccaaaaagagattgtgacatatatttgggcccagcaccaaggtgatgtaactctcctcttcagccgggccttgccaacaagaagagagaatgacttattcctgagtttagcatacaggtgatttgattcttctgctgactcccagaagtcactgtaacatatatctgggtccatcgctgagactgtgtgactctcttctccctgggacctgtccacagtggggattgtgacgtattgcttggccaagcagtcg

SEQ ID NO: 498122 - DNA, 1358 bp, Homo sapiens
tacccattctattcgcattggcatatcctaatggcttaccgacagcgaacataattctaggctatatacaactacgcaaaggccccaatcgattgtattgcgccctgacgggactactacagtcttgcgttgacgccataaaaactcttcatcctaacagaagtccccataaaacccgccacgagtgtagccagtcaccctcgtacactcaccgacgccgggaccttagtctctcagccactcggcgtcttctagcgtatagaacgcgcgcccctccccacataggcacgaccccccttggtcgaacggcaacgcgtgagggcctcctaataaatgctagccgaccggcggaagccttagccaagttttacgtgcgaatccgtgcgtgatcgagagagcttgaagctatcaagacgtgtctgtaagcctatagcctcgtggactcaggcgtgacccttagcgaagccatgtaaaccccaaacatcaaggcgtcatttattgaaaagtcatccccatacgtccgaatccaatttcgtgagttaatccataacattagcttaattgacaggtggcgacgtccctgtcaaaaggctcttcgtggcgcaacaccgtgtaattctattggagcatcagaggagagcgagccattcgtggaactccaggtgccctgcccgagttgtcaattgaaccttgtgagccaataaagtcgtggaatattgaatcctcacgagcagtaggccagaagaaccaaaaccggaaacccgccccttgcgaaacacttgtccgaaagaggggaaaggtgccggaaaacgtaaatcctccagggcttccaagcaatcgagaatacggcccgacagggccccccagagagaccccctaattgcctgcaataagcccgcgaaactacacacaaaagcacttgatttactaaaatagagagacaacgcgttgagccaaggtaggaacaacattccgcaaaaggaaacagacccaaatggaacgggagactcatagccgcggagaaacgcgagaacaaccaaggcatagatggaaggtgacgaaccccaggaagacgcctaagcgtgctaaaagagcctacaacaggggacgggcgagaaaggcaccgtcgcgagaaggaggcaagagaagcccgcgggaatagacgggggatggagaaacgaagagatgaatgagacagccgagcccgtaagagtaacgaaagagagctcgcgaaaggcgacagcgaacacaggagcgacgagtcgagcgacgagagggagaaggaggagcgccggaagacacgcatagaaggagggaccgaggaagcgcgccgagacgaagagcgtcagaaagagaaa

SEQ ID NO: 498123 - DNA, 1209 bp, Homo sapiens
  misc_feature (444)..(444): n is a, c, g, or t
tactttgttttgtttttgtgtttggtgatgaggaggggggaggggggggggaggagaggggcgaggagggactcattaagatgagtgagttgagagactcttttgtggtgttccgtgatgtatatgtttgttatgacgagtggttggccttgtgtgtgttcgtctccgcgcctcccggctcggtgcgcgtgcgtgtgttgcgttggtccgccgcgctggtcccagtgaacgaggagggcggccaggaaagccctgtccgattgttgtctcttgtgttcccgccgcacgtggcccgccaggcggcaggcggggaagaagagggtgtccaccagggggacctgcgggaacccgcgcgggggccgccagaggccagagccccatgacctttcgccgtgtcggagtcgtccctccagggcaaaaaagtggagaggtgcccctttaggnccctccctcaataggtgttcttccggcatgacacgagacgccgaagccgcgatatgtggctcgtggggggccccgaaagaaactcgagactattgtggttgggaccccaaggaatggttcgcggcccacaactggatactcggggacccaccacgcgtgcgggttataaaataatgaaggggcccatagaaggagggatgccacttttccaaaaggcttgagattgtaatggtgttttcacgaagctataatttatagaaggatgttgtttcacggatgccacaaagactggggtgacccccctttgtttgtgtccgaagtggttctcatatgcggccaacttcacttgcgcgcttccccacgcgattttcctagaactcggggtaatataagggtgcactaattgtgaatatgttctccacctacccacaatgaactctgaggtgccacgtgggaattctccatttaagggttttagaaatatttcacgggatcctctaatgttttgatattttgtttttctggaattggattttattttattttattcttataatttcacggttcattttaattgtgtgtttctggaacacagtggaaggttgactgtgaccctttgagatcgttatggagagttcagccgtgtatgtctctctttaccccgtggggcacctaacttgtgggatttttatactctaaaaagtagaatataagactattttgaagaatttgaataaagtgatgaaggttgccattaccccctcc

SEQ ID NO: 498124 - DNA, 112 bp, Homo sapiens
agctcggtaccccttcactttttacaccaatttgggacccggttttcacattctcagcacaacagtgcacttctgttgtcatatgttttcccatctgtgccagtaacagctt

SEQ ID NO: 498125 - DNA, 126 bp, Homo sapiens
gcttgatgagctgccactgcaacatattttcacaattctctaataaatctgcccttctttacctacaactatcttggtaaatggctttaccacctgcaaaactgaccctaggtgttgctacccaca

SEQ ID NO: 498126 - DNA, 509 bp, Homo sapiens
taaacagactttgcaggtgctcaaaaggtacatgtggtctagatggatacggatactacgacagtagagctactagcaacattgccattacaagtaggaagttcgattcggcagttagacctgaggagtcttccagtgagggtattctgcaagtctttaaatcacaccacagttaggaacgtacacttaggactgtaacatgtcctgaatatacacactagtatgtgctaggatcatcggcaaggtaagcggatgcaacaagacgaatcctgggcattaccatttggctggtgaaataaaagcttctcaaaacaatacctacacttaataaagtgcaacaccctgatttttctatcttatccactttctttcttccatttaaagaaatttaaatgttgggcttgcccactaactcatgtactcagaaggatgaagctgcaatagctgaaagtaacaaatgtctgggtgtctggagactttgacaaatcttgctctggcggtaaaagctt

SEQ ID NO: 498127 - DNA, 358 bp, Homo sapiens
cctattgtctagttgctctcagcccacaatgccacacctctgtctatctcctgtgtcgggacagcgcgagactcaaagtcagagctctacgaaacctgcaggacagaaacgaagcttagcaggcctctcaaagacgaggcccagagcgggcacggtgactcacgcctataatcccagcactctcagaggccgaggcaggtggatcacttgaggtcaggagttccagaccagcctggtcaacatggtgcaaccccgtctctactaaaaatacaaaaaattagccgggcgtggtggcgggcacctgtagtcccagctactcgtgaggctgaggcaggagaatgacgtgaacccaggaggt

SEQ ID NO: 498128 - DNA, 580 bp, Homo sapiens
gactctagtagctgtacagtaactcttaacatcatatagggcaattctttccactttattgattgatatcctcagaatggctttagcttttcttgccccttgcctttccataaaaattcaaaatatgcttgtaagtgtctacacacaaacctgccataattttgataacaatcaaagcagaggtgtccaatcttttggcttgcctgggccacagtggaagaagaagtgtctagggccacacataaaatacacacacacccacacacacacacattgactctcacacacacacacacaaatggtctgagtatagtttttattatatatctaccaccacagattagcaaaaatgtccttgcgtaataatcctaatgatgcactgccccattcagagggtctttcaaaatcattgaacaggttccaagtttgcaatctctgatacagaaaatgttcatatgtagctaaacgttactacttttttgatattttctattataaaagaaaatagaacctcttttaactagtggggtacttgacattgtttttgaaaaactaatccatcaatttttggctaggtgga

SEQ ID NO: 498129 - DNA, 352 bp, Homo sapiens
caggaccgaagcactggggacacaggagccagttcttgttgacacaaggcctctaagctaacactggagcatattaccatttgctgtgtggcacccagcttgggactcaggatccagttcttgttgacactaggcttctaagctaacactgcagcatattaggcattctgctgtgctggctgaggggcttgaggtcctactacggatgtacaccgtttccttagtatgattcacccttctttcccagtgcttcagccccgtgcctcacagtcctcgagtcccgagctctactccttactctatgctcgtgctttctcctgtgtgactaccctgccattcttgggggtcccgc

SEQ ID NO: 498130 - DNA, 562 bp, Homo sapiens
  misc_feature (312)..(312): n is a, c, g, or t
  misc_feature (444)..(444): n is a, c, g, or t
gcttacctcgaactcttaccttgtcggggacggtaacgcgggacccggtgtctgctcctgtcggctgcgcctcctaatccctaggccatgatgcgtgagtgcatctccatccacgtggggcaggctggtgtccagattggcgatgcctgctgggagctctactggcctggaacacggcatccagcgccgatgggcagatgccaagtgagcaagaccatagggggaggagatgactccttcaactagtcttcttcagtgagtacgggcgctggcaagcacgtgccccgtggctgtgtctgtggagctgggaanccgcacagtgcagttgatgaagattcggcactggacaccgtagccgacagactacttaccagccctggagacagtgtcaatcagcaggacaagggaagaatggctggccaagtaacgtgatgcccgtagggncgacgtagcactcagttggacgaaggggaggactcagtgtgatccctctgatgctttggaacgcgtaattcgcgacacgactggccatgaaccgagttgtcaaccggatccttcaggg

SEQ ID NO: 498131 - DNA, 1002 bp, Homo sapiens
  misc_feature (1002)..(1002): n is a, c, g, or t
aataatcttcttcatagtcatacccatcataatcggaggctttggcagactgactagttcccctaataatcggtgcccccgatattggcgtttccccgctaataaacaacataagcttctgactctatacctcccgtctctcctactcctgcctcgcatctgctatagtggaggccggagcaggatcaggttgaacgatggtctaccctcccttagcagggaacgtactcccaccctggagcctccgtagacctaaccatcttctccttacacctagcaggtgtctcctctatcttaggggccatcaatttcatcacaacaaattatcaagatataaagacccctgccgataacccaagtaccaaactgcccctctgtcgtgctgatccgtcctaatcacagctagtgcctacttctcctatctctcccagtcctaggctgctggctatcactatactactaacagaccggctaactcaagcatcaccttcttcgagcccgccggagaggagaccccattctataccaacacctatgctgatttttcggtcaccccgaagttatagttcttatcctaccaggcttcggaataatctcccatattgtaaacttatactccggaaaaaagaaacatttgcattcataggtatggtctgagctatgatcttcattggttcctagggttatcgggtgagcaccccatatattaccagtacggaatacacgtagacacacgagctttttacctccgtacataatcatccctatccccacgcgtaaagttaaactggatcgccaactcacggacacaatgaatgactgctcagtcttgagcctagattactactccacggaagaccctcaggaatgttacaacctactactagccacgccgtgactgaaccccagcccaagacaatacacagagacgacatacaacacacacccactatacgatatacatcacacctaccccaatccacagcgaccaacacgagacgn

SEQ ID NO: 498132 - DNA, 215 bp, Homo sapiens
tttttttaaaaaaaattcccccttccccacttggtcctcccccttcccagggggccaatttttaaccgcaaaagggactttggggttgtttgtttagttttgggaaaaaatggaatgttggggaaatgccccccccctgggcgggggggttcctttcccttttccccgggtcagggctattaatggaagcaggcccagtaagggccctttgttta

SEQ ID NO: 498133 - DNA, 465 bp, Homo sapiens
  misc_feature (32)..(32): n is a, c, g, or t
  misc_feature (84)..(85): n is a, c, g, or t
  misc_feature (97)..(97): n is a, c, g, or t
  misc_feature (113)..(116): n is a, c, g, or t
  misc_feature (143)..(143): n is a, c, g, or t
  misc_feature (178)..(178): n is a, c, g, or t
  misc_feature (199)..(200): n is a, c, g, or t
  misc_feature (210)..(211): n is a, c, g, or t
  misc_feature (247)..(247): n is a, c, g, or t
  misc_feature (284)..(284): n is a, c, g, or t
  misc_feature (308)..(308): n is a, c, g, or t
  misc_feature (341)..(341): n is a, c, g, or t
  misc_feature (416)..(417): n is a, c, g, or t
  misc_feature (431)..(431): n is a, c, g, or t
  misc_feature (440)..(440): n is a, c, g, or t
  misc_feature (453)..(453): n is a, c, g, or t
  misc_feature (457)..(457): n is a, c, g, or t
  misc_feature (462)..(462): n is a, c, g, or t
agcacagtgttaataaccatcttcagaaattntacagtattaaacatgtcttcagccaagctccaacactcagaagacaaaagnnttggggtcaaangctattaatccctttnnnntttttttttttaagtgtcctcgttttntgggggtgggcgaccggggcttgtgggcgttttgntgggggtggttttttcggggnngttccggggnngggtgttcaatccccggtgcatcgggggggggcccnatagtcgatgtgtattcgggggtactttttttggtcnccttttttttttgggtcagggaangcctgccataggctgggcaaatacttgattgtncccatgtttccctggggtgggcagcggccctgggtcacacaatgggggccacacttccttttccaccttcctggnnacctgtttgttagntaaggccangggtgggtggctnccgnatggnggt

SEQ ID NO: 498134 - DNA, 173 bp, Homo sapiens
cagttttttgattttttatttgggtaggttttggggtccaggcccttttttttaccccttggaggaaataagatgagggagaaaggaaaagggggggaaacttctcccctccccccttcccctttagctttttgaaaatgggcccctgcagaataaatctgccagtttttata

SEQ ID NO: 498135 - DNA, 620 bp, Homo sapiens
gggggccaaacggttttctttccctttggatttccccccctttccccgccatttggggaggtttttaaaaaaaccagaccttccctccaaattcccattttgggttttttttggaaacccagggggcttttaaaaaggcggtttttaaaaaaaccaggggtggttttggtcggggatcaaaatttgggtggttacaaaaaaaaggaccccccctggggaaacaaaaccgattttaacctttaaaatttggttcccaatttcccggccctatttttggaaaaaaaaaaaaaaaaacctttttttaaaaccaaggtttcatttaaaatttttcccaacaaaaaacaaccgggggttaattaaatacccgggttttccctaaaaaggcgggtcggggaatttaaaaagtgtttaataaggggcctggagttaacaaaaggcatgggggggttttatttggggtaaaacccccggaaaaggtcaccaggaaaaacactggtgggggcggtggcccggaccccccaggaggaacccggcctccggggagcaccttctggaccccctaaggggtttcttaaaaatttccaccctggggccaaatcctgggacgcggggggaaccca

SEQ ID NO: 498136 - DNA, 258 bp, Homo sapiens
cgtactctaacattatgtctggggctagattcacacccacgtatgaaaaagtcagttttacaagcctaattgtgtagttttttttttatatcaattaacgtaaaaatggcatcaactatttaattcatgaggatctttcatattaaaatttaaccttaagattcaacggccaggtgcttttataaaggaaacattttttagagacgtctgagctcacttttacatgggggtgcctacggccgttaaggttagagatag

SEQ ID NO: 498137 - DNA, 712 bp, Homo sapiens
tcttcagttgagatccaggctgctctgagcaagatgcaggatgacaatcaggtcatgggtgtctgagggcatctactacttacctacatctgaggaggcctcgatctctgaacttgggttgtgccgagagagttcgttctgtgtttcccaccctctcgcctgacccaagtcttatgcctctactcccttaacagtgtaagaatatcaactggaaggcgaggaatgttggtgatgaagctgactacaggactcggcggatccttgggaatgggctcatgaatagctgccgatggggtgaggaatagaggagacacgtgggagaggacaatgactattgcatctttcatggcaaaggctactgggcgtcatccgaccgtatctatccaccatcaccaaagcagagaacccaatggtgaaaataacatagtgacttgctgagatacgttgtagggggacacgaactgtgatcaggtcggtagcaggtgggtagtttctttgtctccagagcactttggtctagagtaggcttgggtggtaccgagtggtggacagaagctctgcacggcacggtcactgcgggtcaaagaaagctgtcttgggaggctacgcaccagtaaaggcgcagtatgttattgggctcccaagatgcagacccaaatatccacggtgaaatatcgcgcatggttgcagtaaactttggccaatttcggtg

SEQ ID NO: 498138 - DNA, 1351 bp, Homo sapiens
gttgtgtttttttgccgttcgtgttcctgccgggcggtggtctttttattcttgtgactcgttgtccccgcttgtcttggtctccttttttctgttgtgtctctcctgtcggttgttcttttttttttgttcttgtattcctgtgggccttcttcgtgttttgtttttcttttttgtttcgtgttttgtttttcggtttcgctgcgtcttatccctggcgttagtctttttttcgtgttcttgctgctttctgtcctttgttgttgcgtgttgtctttctatggcttcgtgcgtttctctctttctggtgctgttgtgctttctcattgtcgtgggctgtattttttgcgtgttgtcttagtgtttttttgttcattggatttttcggttctttcttttcattcctccttgtctgggtttacccgtttttttccttctacctgtcctggccttgcttccatgtatctgggggggcagcccgtcccttgcctctttgtgtctcttcattttgtttttcgggctcgtctgggttcctcttttgcgggggctgtttgggggtagtctgtttttttatccttggtgtccctcgttttttatgtggtatccctggttttggttgtgggctgtctcttcgtgggtgttttttcatgtcttggttctcctgttcttgttgtttatgccatggttgtcatgcgtttgtccccttgtctccgtttgttaggttgggctgggggtcgattgaagtcttcatgcatatgatcgatgaatgatctcctgattgtgatgtcttttatattctttatgttatggtcatatatccatgtaacctcgtgatctatattcccatcatgggtgcctgtttatctgacccattaatcctgggcaagttagttttatatgttttcgtgtttgggtgctgagccttcggagtcatgtatctcctattccgtctcgaggcatgtattcattgctaatgatctttcatccagtgctaatgctgaactgatctatgatctgtcatatttgatttccatatatatcttgatcctattcggttacatagttaccctatgggataatcagcgcaatcctattctagagtccatatctactatagggtttatcgacctcgatgttggatcaggatcatccacgatggtgcagccgctattaataggttcgtttgttcaatcgtatttaaagtcctacgtgatctgagttcatgatctcggagtaatttcaggtcggtttctatctatcttcatattccttcctgtatcgatataggatcatagtgtaatataatggcactactgtcatcatagtcgtaaactcctccggggtaatggat

SEQ ID NO: 498139 - DNA, 437 bp, Homo sapiens
  misc_feature (10)..(10): n is a, c, g, or t
  misc_feature (35)..(35): n is a, c, g, or t
  misc_feature (74)..(74): n is a, c, g, or t
ccacacccgnccactgtgaaaccccctaccccaangggccatagaagagggaaaagggacacagtcctggcccnttccacaagttccacagtgtccaggagcccaaaccccatttccattgcctaggtcccgcagtatgataacacttgaccctttcaaatgaatttatatcagatttaaaaaaatacctatttgagaagtgaatttccttgaccctgacaggcattaactacttcttccttagtagttatgcaataaatgcagacttggttcaagttaaaacatctagaaaagtttgctgctccttttctggggtcttaaaatagtgtgacagcatgaccaaaagttaagcttattcattgttccattgtgctttgtgtatatctctctgtgatcattgtgttttatattttagttattaaatatttgtttctctc

SEQ ID NO: 498140 - DNA, 227 bp, Homo sapiens
taatccgatttttccaggtacctgtggagctttaccacggtttccggagtgctgatgggttactctggctcaagggccatcggaagttatccatagtaactgctagagagttcattgaactcggcgtcaatggtctcatcctctaggtcaatgagatccatcttcttgcggatggcttgcagagcagtctctgagcacagggctgctaagtcagcatccacatagcc

SEQ ID NO: 498141 - DNA, 195 bp, Homo sapiens
caattagtttctgtgacactgtatgaaatttggaatctttaataaaactttgtttatttattccgtgatgaatacataccacaacaatacaataaaatacaatactgcagcagctagttccggtgtaaggctgcggatattgtgtctctctccccctcggcatttattattattatttgtgtggtgtaacctgat

SEQ ID NO: 498142 - DNA, 92 bp, Homo sapiens
  misc_feature (7)..(7): n is a, c, g, or t
  misc_feature (27)..(27): n is a, c, g, or t
gcatgangcggcggcggcggcggcggncgaagctgaatgaagatggcggacggcgtggaccaataagacatttacgcggatgtcggcgaaga

SEQ ID NO: 498143 - DNA, 261 bp, Homo sapiens
tcgggcctaactgagcgatacatagagatcttcacctcgtctggattagctgtatcctaggtatttattcttttttgtggctactgtgaatgggattgcattatttatttggctctcagcattgatattgttggtgtatagaaatgctaccgaatttcatacattgattttgtatcctgaaaatttgctgaagttgtttattagatcaaggagcttttgggcagaggcaatagggttttctaggtactaggtataaaatca

SEQ ID NO: 498144 - DNA, 124 bp, Homo sapiens
cattctcttaagcacccggtgccctccgaggctggcggaatggtggtgccacggggttgggcaagggctcaacaggacctcaacgggcaaaattgtgcacactaaaatatcaaatcaaggtgct

SEQ ID NO: 498145 - DNA, 459 bp, Homo sapiens
  misc_feature (84)..(84): n is a, c, g, or t
  misc_feature (218)..(218): n is a, c, g, or t
  misc_feature (455)..(455): n is a, c, g, or t
  misc_feature (458)..(458): n is a, c, g, or t
gaaatacccttccaaaaatatccacactgaacaatgtttaaggttacaaaatagttgaaaccgggaatggcctaatttcccctntttcctgaccataatccaaattataatgaccagcctattccattattaaagatcccctaacctaaaaagatattgaatttattataaaaagtggttaccctgtgcccttttcagtacttgtagggtggaggtgntcggtcaaagaccttctttatgatatcaagaaatagacatgtaacaaccatgaggattatggcaaaccaagcagaaccacttgacaggagctgaataaacacaaaatacatattctgggagcccaaaaatggcctgcaaaaaaagaaaatgtgcttaataaaagtggaaactgaaagacttaaatcaggacatcatataaagacactacagttgaaagtaacaagtactccaagaanttnt

SEQ ID NO: 498146 - DNA, 123 bp, Homo sapiens
ttcggcacgagggtgaccagcggcgggtcacgtgacgcggtgcctggcgcgagctcccaagatggcggtgtgcatcgcggtgattgccaaggagaattaccccctctacattcgcagcacccc

SEQ ID NO: 498147 - DNA, 455 bp, Homo sapiens
actagctcacggttggctggcaggctttgagatcagtgtgggagtgatggcccatgtctgtggccgggaagacctttgagatcagtgtggagtgatggtccacatcggtggccgggaagacctttgagatcagtgtgtggagtgatggtccacgtcggtggccggcaagacctttgagattagtgtgggagtaatggtccatgtctgtggccgggaagacctttgagatcagtgtgtgagtctgatggtccacgtcggtggctcggaggacctttgagatcagtgtgggagtgatggtccatgttggtggccgggaagacctttgagatcagtgtgggaagcggtgccagcctgggtaatggctgagttcagggcacctgggaagaggatgggcataggagagagggagtggcggatgccccgtagccaaccgtggactagtgggtaccgagctc

SEQ ID NO: 498148 - DNA, 291 bp, Homo sapiens
tgactgctatgctgtccagaggatcccatcaaccctaaatttattatgcttcaataaactaagacgatatggaagacaaaagaaaacataaatgggacttccacaaaatgaaaaactttggtgcagcaaaggacgttattaagaaagtaggcccagcgcagtggctcatgcctgtaatcccagctactcaggaggttgagtcaggagagtcacttgaacctggaggcagaggttgcaggcagattgtgccactgcactcctgcctgggaaacagagcaagactctgtctcc

SEQ ID NO: 498149 - DNA, 150 bp, Homo sapiens
ctcagctcggtaccccgcggttatgtcttacggattcctttccactgtgcatgatgggaactcagcaaatgagttatagttctatcactgctccgtttcccaaatgaagggcttcgtaagacataaccgcggcgtaagacataaccgcgg

SEQ ID NO: 498150 - DNA, 397 bp, Homo sapiens
ccgaatttacgcaatgccttgtgcatctagcggggacctcagggggttggatgaaagcgacaggccactatcttaaaacgccacgcgaaccttgagccagagatttattgaccagacagactggcggccatggtctacctttaatcgtcacatcaccttcatattaaggtcagaacacctacacggaagttgtatatgaacctactcaaggtattgctgaccggggcctgcggtcgtatcggcaagacgtttttccaggcgacgcaacaccaatacgactttgttctcgccgaccgccaccatccggactttgccatcggcgagcaccgctttgtccgcctggacatggctgagaaggaagagtcgacgcgcccgcgaatttagtagtagtaggcgg

SEQ ID NO: 498151 - DNA, 315 bp, Homo sapiens
gtgagcatgcaatgtgtaccagatgctcagctgtacactttcagatgcatttcctgcatcagctaaatattaccaataagtaggtatcagtatccctaatccatagtcagcaaatgatgtagtagaaaggttcattatggttggaatatctcagtagtcaagatctctatgtgaaatagtagccacatcatatgttccaacagcattaggaatctagtagtgtaattggcaaagcttccatattgaatgacaaagtgattcgtgacagataaaacaagaagtcctatattcagagtgcatggtaattattgtatg

SEQ ID NO: 498152 - DNA, 289 bp, Homo sapiens
  misc_feature (7)..(7): n is a, c, g, or t
  misc_feature (15)..(15): n is a, c, g, or t
  misc_feature (34)..(34): n is a, c, g, or t
  misc_feature (54)..(54): n is a, c, g, or t
  misc_feature (92)..(92): n is a, c, g, or t
  misc_feature (95)..(95): n is a, c, g, or t
  misc_feature (102)..(102): n is a, c, g, or t
  misc_feature (114)..(114): n is a, c, g, or t
  misc_feature (133)..(133): n is a, c, g, or t
  misc_feature (136)..(136): n is a, c, g, or t
  misc_feature (140)..(140): n is a, c, g, or t
  misc_feature (147)..(147): n is a, c, g, or t
  misc_feature (176)..(176): n is a, c, g, or t
  misc_feature (186)..(186): n is a, c, g, or t
  misc_feature (221)..(221): n is a, c, g, or t
  misc_feature (237)..(237): n is a, c, g, or t
  misc_feature (254)..(254): n is a, c, g, or t
tattaanaaatggtntgaagtgaagtggatgtanacagggagaatgagaaagtnaatgcgagggaagggagtgaattgggagtaaagctctnagnttagggnagaatgagactncactccacactgtacaganctnaacncgctaangcactgtgcgcacgagacgtggcacatgncacgacgctntgctgctgctacacggcacacgcacacgggtgganactggggacacggggnccctttttctgccaccngacgtgttactacgtgcttctgggaccgctgacac

SEQ ID NO: 498153 - DNA, 127 bp, Homo sapiens
atacatcgagctcggtacctgtggagacggggtctcaccatcatcatcactgcatacttgatagactcattgatttccttcattgaagtcatctttcaaaccattctcgtagcctgcagctatgact

SEQ ID NO: 498154 - DNA, 379 bp, Homo sapiens
  misc_feature (287)..(287): n is a, c, g, or t
  misc_feature (292)..(292): n is a, c, g, or t
  misc_feature (346)..(346): n is a, c, g, or t
gcactttgggaggccgaggcgggcggatcacaaagtcaggacgagaccatcctggctaacacggtgaaaccctgtctctactaaaaatacaaaaaaaaattagctaggcgtagtggttggcacctatagtcccagctactcggaaggctgaagcaggagaatggtatgaatccaggaggtggagcttgcagtgagccgagaccgtgccactgcactccagcctgggcaacacagcgagactccgtctcgaggaaaaaaaaagaaaagacgcgtgcctgcggtgaggnagctnggcgctgttttcgagttcaggtgaattagcctcaatcccccgtgttcacttggntcccatagccctcttgatggatcacgtaaaact

SEQ ID NO: 498155 - DNA, 120 bp, Homo sapiens
gtactgttcctgtttgccgagtgtgagactggtgttctcaaacccggtatggtggtcacaccttgctccagtcaacggtacaacgcgaagtaaaatctttcggaatgcaccactgaagct

SEQ ID NO: 498156 - DNA, 155 bp, Homo sapiens
cccgtcagtttattcatctacggccggctttttctatgtcatggcggagagatagggattcgaaccttaggtaccggtgaagagtacaacggatttcgaatccgtcccattcggccgactctgtgcatctcatccaacgcgcgcgccatcattac

SEQ ID NO: 498157 - DNA, 785 bp, Homo sapiens
gaccatccgtcttagcaaggagctgagcagcacagaagcccagtctgcacgatgcccagtgagctgctgcagtgagtgagaccagggctgaaattggccttggggtccctggtgtgcgaagccatggacggtgcatgagtgcaggcggtgcttgctgtgatgcatgctgggaggaggaggctagcatgccagggtgaatcggtgctggggcctgtgagactgcttgactgcccagtgcaccagctttcctgagtgtgcgtgctgtgcgccaggaccgaggagtgcagggtggccacctgggacggtgcagtggcgacgtgacgggacaccggggggccaggagcgagccccggggcaggtcctgaagggcccgtgaactcccaggcgacccatgtgtccagaagtaacagtaaactcgaatggacgcgctgcgcaattcgggcttgcggaggcggggatggtcccgtcacgagccaggggcattgtagaccaaggggaaggcttggtgaagctgcaactggacaccaggactaggttggaagccccatagggaacgccaatggcattcgccgcgtgagcaagtcgctctaggtggaaggcccaactccccgttgggagggaaaacgatacggcaagcctgtccatcagggttaatatgagacccatagcgcttctccttggcgccacgaacggggacggacagaggccaccgcgataggtcatcttttccgaggcagccaagtcattgcgcacggggagacccgggttgacaggccgtggggaga

SEQ ID NO: 498158 - DNA, 598 bp, Homo sapiens
  misc_feature (63)..(63): n is a, c, g, or t
ggggcccaccactcaaggttggtggttgtcaataggtggagattcaagaaggcgccgctcctnttgctctacagacccaagatggacttgctgtgaatggtgccacacagcgcccccagattgggccctcgcacccttgggtgctcccggcccccgcgtttaaaaacattgcctttgggtgtcatgtggcccagacttttgaatagagaatatttataacttttgtatgagagggaattcccccccaccaagcccctcccagccccccgtttacaggggatgaaaacccttcccggtctcccagagccgatggtcctctcccccgcccccccccgggtttcacccttgcagggagagtgatgctccaggcaacccggttttgagtccccttttgacccgggcccccttggcttgctttccgggtcttgaaaatctgaatccccccccgtttggtttatgaattttgggtttcatgataaccccccatgggggtggggcttttattgaaccccccctaagttattgaaaaaatgtcttttcagggggaatgccaatatttatgtgccccttagcttcttgaagatttagaggttttata

SEQ ID NO: 498159 - DNA, 134 bp, Homo sapiens
ctggtaattaaggaacacctggccaccttgtcatgctgacaggtaggcggcccacagcagcaagtaatacaggttggcgcagtgagctcagcagcagggctcccaggccactagtgcacccagcaggctcagca

SEQ ID NO: 498160 - DNA, 355 bp, Homo sapiens
  misc_feature (104)..(104): n is a, c, g, or t
  misc_feature (110)..(110): n is a, c, g, or t
acaacgtgcaggtttgttacatatgtatacatgtgccatgttggtgtgctggacccgttaactcgtcatttgcattaggtatatctcctaatgctgtccatacnccactnacacagcccacccggctacttttttaaaaattgtttttgtatagacgcagcctgaccaatgtgatgaaaacccgtctctactaaaaatacaaaaattagccgggcatggtgacatgcgcctgtaatcccagctactcgggaggctgagacaggagaattgcttgaacccgggaggcagaagttgcaatgagccgagatcgcgccattacactctagcctgggcaacaaaagtgaaagtccgtctc

SEQ ID NO: 498161 - DNA, 344 bp, Homo sapiens
  misc_feature (151)..(151): n is a, c, g, or t
cgacctgtctccgcggaactgctccatccgagatagtgctagtgtctccgccgctgacggcgagactagagccgccgctggcgtaataacgaagactagcagcacagtaatccccgcgcgatgccaggacgcgctgtctctacacgtcagncgaaagctacacgaatgacagaggtaatggctgactgcagcggctggcgtgccgaacacgtgcgtccatgtcgccgtctcgccatgggccgtgccacccattcgccatcccgacgtctcagcgtcgggtcgcgacacatcccgcatctcatccctggctgcacatataacccagaataccgcatcgcagacgg

SEQ ID NO: 498162 - DNA, 157 bp, Homo sapiens
gtagataggctgtgtcctgtcgtatccagccgtggccctgatggtgtaatcctgtctctactcagtaactacagataattagccgggcgtggtgtccggcgcctgtagtcccagctacttgggaggctgaggcaggagaatggcgtgaacccgggag

SEQ ID NO: 498163 - DNA, 278 bp, Homo sapiens
  misc_feature (56)..(56): n is a, c, g, or t
cacggtggtttgaggatgttttccaagatgggattcccacccctccctgaggagtncacttcctccatctcctgcctcaaactcctgagtagctgggattaaaggtgcccactggcgggcacgatggctcacccctgtaatctcagcactttgggaggccgaggtgggtggatcatcaggtccgggagttcaagaccagcctggctaaggtggtggaaaccccgtctctgctaaaaatacaaaaattagccgggtgtggtgcacgcctgtaatcccag

SEQ ID NO: 498164 - DNA, 321 bp, Homo sapiens
ttagcggaacccatacccgctgtggattatgagcaggtttatcattaatttcatgaactatgcgatgatgacatacattcggatgtttcgctcgatgatcctaatactttaatcattgaatatgcgctaaacgtcaaatatgtttcagtcccctattccttaagggaatttgttgaggttcataaatctaaccgctcgtttgatgatctcgacgaaaatccggaagatttttcgtcagcggagagcctaactgctatgatgagggacgctcacggaatcgcacctaaatgatcattattggaaatcctcagtcggaaggtg

SEQ ID NO: 498165 - DNA, 263 bp, Homo sapiens
  misc_feature (152)..(152): n is a, c, g, or t
tgtgctgctcatgggaagaatccaacagatgacatcttcagagatctggccattaacttctcaccacacatggtgaggacacatggcgaaacgagggggcctggagcctcattcatcatggcatctagatactcatcagttggatacttccncaatgaagcaagcatatcatgcaactcttccttgtcgatgaaaccatctcgtgtctgatcaatcatgtggaaaggcctctttgaaaccccttgaattgagcccaaagggga

SEQ ID NO: 498166 - DNA, 287 bp, Homo sapiens
ctgactctagcggatcttcgtcgacggtaccaacaaattatcatccaacctatacttaaaaacatatggtggcaggcatggtggctcacgcctgtaagtgctagcactttgggaggcgaggtgggtgaagcacctgaggtcgagagttcgagatcagcctggccaacatggcgaaaccccgtctccactaaaaatgcaaaaaaaaaattaaccgggcgtggtggcaggcatctataatcccagctacttgggaggctgaggcaggagaattgctcaaacccgggagg

SEQ ID NO: 498167 - DNA, 313 bp, Homo sapiens
  misc_feature (80)..(80): n is a, c, g, or t
  misc_feature (200)..(200): n is a, c, g, or t
  misc_feature (216)..(216): n is a, c, g, or t
  misc_feature (266)..(266): n is a, c, g, or t
  misc_feature (277)..(277): n is a, c, g, or t
cgcctcccgggttcaagcgattctcctgcctcagcctcccaagtagctgggattacaggtacctccccaccatgcctggntaattttttgtacttttagtagagacggggtttcaccatgttggccaggctggtcttgaactcctgacctcaagtgatcctcctgcctcagcctcccaaagtgctgggattacaggtgtnagccgccacacctggnctttagtgtttttttgttaagagactgggtctcggctctgtcaaccaggntggagcaagtncagtggtacaatcctagctgactgtaggctcaaatt

SEQ ID NO: 498168 - DNA, 521 bp, Homo sapiens
  misc_feature (432)..(432): n is a, c, g, or t
  misc_feature (467)..(467): n is a, c, g, or t
  misc_feature (490)..(490): n is a, c, g, or t
  misc_feature (521)..(521): n is a, c, g, or t
gctttttacatgcagacaggctggaatatagtggcatgaccatatcacacctgcaacctcaaactcctgggctcaagtgatcctctcacctcagcctcccaaggaggtgggactacaggtgtatgccaccacactcagctattttttttttcatttttgtagagactgagtctcatcatcttgcccaggctggtctcaaactcttgggctcaagcgatcctactgcctcgccctcccaaagtgatgggattacaggcatgagccaccactcatgcccatctactttttaaaaactcagtgtatgattttaatatatcttatctgtatgctgctaaagtactaactggtctataagaattaagaatagccaatgatcaactgcaaaaagagtaacaaaacctatccatgcttttactttattccattctttgnttttttctttttctccctattttaaatggtactgnagtggataaatccttaattaagncgggcggaaagctttattcccctttaggttn

SEQ ID NO: 498169 - DNA, 968 bp, Homo sapiens
gcggcgctgggcggaacctaccatggcggccgatgagaaacgaccaaagttgtccaagagtctgctgcgcatgaagtttattgcacacacggggactggactcagtaacaccaagagaactaattacacagaagaagatgagaaacatcattagtgcaatgagcactggtacttggatttgccggagcttcaaggagaaagagagtcttcataataggaagacgcagtagtttcttactatgtgaggatcttctctatggaagaaatgtcacttcaggaggatcccaatcctgaggtttgatgcaacctgtgatgcttcagatgaatgctaagcagaaagcatgaagaatgttgaagatgaaaccagtagagcttgatgtgtcagatgagagagatgtgtagacagatatgagtaccttggtggggacaaatgggaaataagtttgccaggacagagagtaccatgccgagtcatgcaagaggatgacatatgcgctgacataagcagcaattcagaagcaatagacagagtgtgctctagaagccccaggacttcacgcatggcattgccttgaggcgatggcaccgaggggttgctttggaggcatcgtccatgccagggactttcttggaggctccaatcgccaaatggctgtctcctataggtacagttaatagctggtaagggtttaccttggtcaactgaagagtcactcatttccatgacaaccatggagctggtttatctgggaaacgcaaggatgggtcgctgaactagggcactcggtaggaaacagttcccctctatggggctgaccttagggggtaacttcaacatccccagagacgtggacggatatcccataggggcgcccttgagcagcttcacacagcttgcgtgaccaatctgcgtcgacagggagcgatagcatattccttcacaggattattttattaagcacccagtg

SEQ ID NO: 498170 - DNA, 190 bp, Homo sapiens
actaaatatcactcctgaactttatgaaatcttcctctcaagagcaaaagaacggttgaaaagtttcagtgaaacaagttcagagaattatacaagaggtgtatcttttgcttatcgagaagccagtcttggattaattaaggttggcatatcccgtacaatttcctctctctacaactcttcagaaggg

SEQ ID NO: 498171 - DNA, 1047 bp, Homo sapiens
acttgacgcttgtcctgttacgtatcctcgcgggtcgcggggtacacgagtgtggtttgccgcccgcagtggttaaccgctgcgactgcaagtggtcatccagtggggcccagcgcggcgggttcggtatgtacttcgtccacgcgtgtgtactgcaccttcgtgggccttgttgtcattggtggccgtcgggaggccgcggtgggggtacgggttgctgagacccgtggcgtcgcctcctccttgtgggtgcacaccgccaacacacaggtggctgtgaggcttctgtagcaggcgctcgcggtggggttgcctcgcaaactcattgctggggtgggggctggggcaccccccgcgtgttgaccaccggtggggggtggccaccaccggttacttccgcgatgttctacggggggggtagttgtcttcgtggtccctggaggggccgccgtcgagaggggcttcgcctcctttgtccggccgggcatcccgggtgcttggttcccccgcccccgctggagccccccacacgtgggttaatggttcgttccgcgggcgaggtttcgtggtgatacccccgggcgtggttagctgatagggcagtcgtggggttggttgagcgagggccgcttgtgccttagtggggtcgcctgtggtgcggcccggcctggagggtcctgccggccgcccgctgtcctctgggggaggctcccgttcgaggggctgctcgctcgacgcgcgggggggcccggtggtatttttgggtgggggtggaggagtgggcgcgccctccttcctttccctcgcgccttgggcggggcaacagcaggcactgctctcctctcctagggggattagtcgtgcggtgttgtgtgggtggctcccctttcggttgttccccgtcgggggtcgcctcttttttcccccctggggggccttggggaattggggaagtttggggggggggcccccccctcctgggcccccccccccaccggggggttttgtgtggacgctttttaaaaaaaaaaagggttggttgtttta

SEQ ID NO: 498172 - DNA, 147 bp, Homo sapiens
cttctttcctcccactccaacaagctcctaaactaaggcaaccaccgggacataaaaccccatcgccctccttcccttgcgcgcctgcttatctgcaagctaccatctcctgtttttcctttcaccatctaacatctcgagagtcat

SEQ ID NO: 498173 - DNA, 1200 bp, Homo sapiens
ttggtgcgtgtccttttttcgcggttctctctttgttgcctggggttggtggtgttgacgctttgttgtgggcgtatggtccccccgagggtggtgggggcgcctgtgcccgctgtggtgggggtgggcctgtggtgtattctgtgtgagtcctcgccctgcggggtgttgctcataagggggggcgactcttttatggtttttcggggtatacgggtgcagtatgcctcgtgggttcctcccggtcggtgtggggggatttgtcgcgcccgcggtgtgtgtgccgcgtgcttgggttttgcaatgtgcgcacttgtactaggtagttccgcgtgttatttgggagtacggggggaatgtgtattgtcacttaggtgagtgtgccccgcgcgcgttgggggccccagttggtttgtttaggcgccttttccctagggccagcggggtgcatttgtcgccccgccgtgtgcgcgggggcctcgcaggggatgtgtgtgtccccccaccgggtcgcacggcggagtttttctctccgttatgcccccctggtcttccgcccctcatgttgtaccctcgtgtctgtttgttgtgcgcagagcttttttgtggttcgccccctctggagactgggccgcagttgcctcggggcaccacttcttctgtccgcccgagtgtgcacaccgtataagagcgttaagtgtgccagaactttgtgaagaacacactggatatctcccccaagtatttgtgtcgcacataaagcgtgtgaaagtgccaccaccaagtaaaatggggatattgactcgttttgttcttgttaaaaggagtatggatatgttggtggtgttgttcttgtgattgttgttgtgtcctctaatgttcttgttgatacctctcaataagagaaccctcttgtgtgggtcttgggacctctttaaggaaatattgaaatacgcccggttgagagaaagaaccctaacacatgagaaaggaaaagggggccctcacatctcccagcacaacccggtcccttttgggtgaataatcaccctgtgcctgcttgttggctcacatggcacagagagcacattcacagtgcccccggttttggtgaaatccctgcataagtgactgtcctgagatcctacttagtatgatcctggctagaatgataatttaaagtatttaatttgaagcccc

SEQ ID NO: 498174 - DNA, 341 bp, Homo sapiens
tgggggggggggcccggttaaaattttttccccccccaaggccccaaaggcgggttgggaaattttccaaaaaaggttttcttggggccccgggatttccaccccgggggggaaggtgggttttcccccagggggggaaggggggttttgggttccttccaaaaggggttgctggttaaacctgggggggaccccttcccccggggccccccccaagggttggggccgggaatttttttttttttttttttttttggtttttttttttaaaaaacccccccttttttttgggccctaaaaattttcctttggctgggtggggtaggttttttaaaattcca

SEQ ID NO: 498175 - DNA, 1562 bp, Homo sapiens
  misc_feature (44)..(44): n is a, c, g, or t
gatgtgagtgcatggctgccgtcagatttaggtctactggatanattgatgagcgttcaatgaactccatcagcgaggttcatgtaactttgtcacttcggcgtttcagggcataacgtagggcacgtggattgacaccaatagagccggcatcgcagcattgcagatgcgtaataggcaccgccttatccatccatctcatagtgtggaacaggcacaatcatcttctgcgcacgtccagtgtggacgtcggaactcaaagaatatgcgcggctgcaaaagatgcgtgtcaacggacgacactgatcattaccccttgggaccggcgggaatgttgatgacttgtaggatcacctacacgagggaagcatgtggattcccaggtctcaaagacagtgctacaagacacaatgttgctaatgtggctacgcacgcattacgaagctatggtggaccacatatatgcgtggggcagatgcagcaccaaaaagaggtatgtcgataatcccatgggtgtccatggacatggtgcagtcgtatgcgggaccggttacattcgagtgacccgaaggaactcacccgtcgcgaatttgccagcctgtagacgccctaacagggatgaggacagcattcgaccgataacatattcctccacgtgtgagattcgacacgcaccataggctttgacaggggattccgtacagtacatctaacacaacatgtacactaacgcatatgtgcatacattcggtgcactcgcgtaaccaaccacagttggatatcacgtaggggcctttgcatacgtacctcgccgctacaaattaaacaattagacgtgacagtaaatatccaccaagagtttgacttcgcaccagctcgctgagggatgcaccagaacagagcctcttacggacagattggggacacatgtcaccaacaagaagtctacctaccctagatacagagtacaactggcacaaggcggtgtacagggtatacaaaaccaagggggaatacacagaccgcacatctaacaatcaagcacagcttacagagacgcggacacccgatagccggccgacacgtaactgcgcacacgcggggatacacacgagagggacctacagggcagcgagcccaaccaacgcgcctagagagacacagcacatcggcgaccaccacacgacaccaactcacgcgcggcccgcacagaccgacatacgcacaaaaccgaagacagcgacaaccaacaagagaagacaagagagggacaaccgagacaaagagaccaacacagcagacgacgaccacgaaacccacgagcacaggcgagagacgccccagacagaagcacaagcacgagacacgcgagcgcaaccacacacaaagccagccaagacagccagacgcgtcggagcagcacaccaagcgacgcagcaacgcagcggagacagccacccgaccagccgccggaagaagcaccacaggcgcgcggtcgcggaccgccaccgagcgccgccgccaccgagcgccacgcggccgacgcgcccgacagccgccac

SEQ ID NO: 498176 - DNA, 309 bp, Homo sapiens
tcacccccccggaatcgcacggaggtggtgaccccgctcatggcggcttacaccaggtggttgaggtccccgtaggtgggggcgagcagtttgagggtgcggaaacagatgtcgcagagtgcctcgttgtcgatgcagtaggtctcatccgtattctccaccagctggtgcacagacagcgtggcgttgtagggctccaccaccgtgtctgacactttgggcgagggcaccacgctgaaggtgttcatgatgcggtctgtgaactcctcgcggatcttactgatgagcagcgtgcccattccggacccc

SEQ ID NO: 498177 - DNA, 140 bp, Homo sapiens
tctagaggatctccactgttgttcatacctggtcgctgtatcggggggggcgggggaggtatgaacaacagatgcaagtatgaacaacagtgcaggtatgaacaacagtgcaggtataaacaacagtgcatgtgatacct

SEQ ID NO: 498178 - DNA, 337 bp, Homo sapiens
tctagagaatccccccgtgagacagactttgataaaggtcatgttactgtccagggtgaaaacaaacacatcaaaggtaatgtaactattagtgctgatggtaaatttggtgctgataacactaatggtgttaacaaattagaaggtaatgctaacactaatggtactgctactgttaaaggtcaaaacagtattgttaatggggaagttactttaaatgctaactctaacgtttctgctggaaaaggtaagaagactactgcaggtatagatgctgagggtaaaggtcatgttactgtacaaggtgaaaacaaacacatcaaaggtaatgtaacta

SEQ ID NO: 498179 - DNA, 1031 bp, Homo sapiens
tttgactcagagaggacccccagagggtgtaccatcttcgcctatttattgttcagcccttgagggcttattgcccaatcacaggatggcagcacgagcggcccgttcctactcttagttagattcactcactgttcgtaccacttggcacaagagaacctgtcatacggtcataaggtattcagcactcctggatggtatagagctaaaaggatgaccgctctttctgttatcaggcgtcctaacattgttccattctagcatcagtggctggtgctagatcgcccctcctctgtccggtactacttgatcgtgaacgaatgatccccaacgaaggaagtcccaaatgagccccgcatccagactcgcatgcccactccgctgccgcgcactgcgccatcgacgcaaccgcatcagagcacgcgccgcgccacacactcgcgcaccgccgcacacacacgcgtccacagcacatgccgccacacacggcgctcgctgcacccagcacattcgccaccaagccccgccgcgccccacacatcgcgcacacaggcccggaacaccaacgcacagcgaacacagctccaccccagcagcacgaggtcgctaccaaaaaaaagcaccaggcacggcccggtccaacccatcgcacacggcgccgacaactcaccagaccgagtccaggccattccgtgcagaaacttccagtgccaattctggaacccgccccgagatatccccaggtcgacactcttgcctgccgcgccagaccgtgactaaatggccccgcgcacgactcagcaccacgaacggtcctataagacactgaacgcactcacgggacacacgcgagggctgagcgatcgcacatccccgcgcgaactaacagcacccgctgctccactcgggcagaccctacccagcaccgaccctcagagagtcgaacatcacgaatgcacggaactcacttgacagcgcccagcaccagacggcgcaagcaccgaccctgcgcgacgcacctggcgacgcga

SEQ ID NO: 498180 - DNA, 709 bp, Homo sapiens
  misc_feature (24)..(24): n is a, c, g, or t
  misc_feature (28)..(28): n is a, c, g, or t
  misc_feature (30)..(30): n is a, c, g, or t
  misc_feature (33)..(33): n is a, c, g, or t
  misc_feature (35)..(35): n is a, c, g, or t
  misc_feature (40)..(40): n is a, c, g, or t
  misc_feature (49)..(49): n is a, c, g, or t
  misc_feature (64)..(64): n is a, c, g, or t
  misc_feature (77)..(77): n is a, c, g, or t
  misc_feature (79)..(79): n is a, c, g, or t
  misc_feature (83)..(83): n is a, c, g, or t
  misc_feature (86)..(87): n is a, c, g, or t
  misc_feature (89)..(89): n is a, c, g, or t
  misc_feature (91)..(91): n is a, c, g, or t
  misc_feature (112)..(112): n is a, c, g, or t
  misc_feature (119)..(119): n is a, c, g, or t
  misc_feature (132)..(133): n is a, c, g, or t
  misc_feature (135)..(135): n is a, c, g, or t
  misc_feature (138)..(139): n is a, c, g, or t
  misc_feature (145)..(145): n is a, c, g, or t
  misc_feature (159)..(159): n is a, c, g, or t
  misc_feature (162)..(162): n is a, c, g, or t
  misc_feature (175)..(178): n is a, c, g, or t
  misc_feature (182)..(182): n is a, c, g, or t
  misc_feature (197)..(197): n is a, c, g, or t
  misc_feature (199)..(199): n is a, c, g, or t
  misc_feature (217)..(217): n is a, c, g, or t
  misc_feature (223)..(224): n is a, c, g, or t
  misc_feature (235)..(235): n is a, c, g, or t
  misc_feature (237)..(238): n is a, c, g, or t
  misc_feature (241)..(241): n is a, c, g, or t
  misc_feature (244)..(246): n is a, c, g, or t
  misc_feature (265)..(265): n is a, c, g, or t
  misc_feature (381)..(381): n is a, c, g, or t
  misc_feature (383)..(383): n is a, c, g, or t
  misc_feature (391)..(391): n is a, c, g, or t
  misc_feature (395)..(395): n is a, c, g, or t
  misc_feature (411)..(411): n is a, c, g, or t
  misc_feature (426)..(426): n is a, c, g, or t
  misc_feature (464)..(464): n is a, c, g, or t
  misc_feature (470)..(470): n is a, c, g, or t
  misc_feature (550)..(550): n is a, c, g, or t
  misc_feature (699)..(699): n is a, c, g, or t
tattatatctttttgtttttttangttnanttngnatttntttcatagnaaaatttttgttttnttatttttttttntntttnttnncntnttatatttgcttttttgggtnaggtttntggctatgcaggnntnctnntttttnccccctatcttttngcnttgtttggggttnnnntttncttcttttctgattntnatcctggctcggcctgangcctanngctggcttgangnncanacnnngtccagattttttcacggngagttacaagtgccacggagaccagggtttctgacacaggatgtggaggatgcttctctgcaacctagtgcaaggcttcccctgcctttccgagaattctatggatctcacaggtngnggtggggngagnttctttctagtgtggnccagaggtgggggcnatgagttaacatcttcactgttatgtttttggtgtttncccctnagggcttgaggtctcggcatcgtgtctcagtcagtccttggcgatgtcccctcagacgcactcacagacttgcatacgtnatttagtaacatgcatcaactatcctagaacatctacagggtgcaaaggaaccaccactcagagaatcatggagccagtggagttagaagtggaagggacagaacaagacaatgctaaaacctgtggttcactaggaagggggaatganaacaccaggc

SEQ ID NO: 498181 - DNA, 372 bp, Homo sapiens
gctcgacgttcttctctacaaggcccagaaaccctccgaattcaggtcaaggagagtagtagtatcgtatactactacacccatctctctctctctactactagtctacacacagtctctctctacatctcactctctcctctcttctcccccctaacttttatttgtcgttcaagcaataacatttgcgacgattgtgaccatatgtgacacttgtgtacgtgcgtggttcatgtggtagactatattctctcacctggtctatatcctatctctgttctgataaaaacgtgtagtgttatcttcctgaagctgtctctccttccacccctcctccctcaagcagacttccgcgtccccggtacatgcaag

SEQ ID NO: 498182 - DNA, 110 bp, Homo sapiens
  misc_feature (45)..(45): n is a, c, g, or t
gacttacgaatgaggtctgacgcgacgaggctctcgctcccaggngtagccgcgctcggacatgtacagtcgtgccttcgcgactcagacgcatcctgggcgctggcaag

SEQ ID NO: 498183 - DNA, 338 bp, Homo sapiens
gctcgactaatcccagctactcaggaggctgaggcagaggaatcgcttgaacctgggaggcagaggttgcagtgagccgagatcatgccactgcactccagcctgggcgacagagcaagactccgtctcaaaaaaaaaaaaaaaaagaaaaagaaaaaagaaaaaaaaaataatcagattaagccagaatcggttgttggaaacagtggggtttcatttcagcaggtgtggtgactcacacctataatcccagcactttgggaggccgaggcaggtggatcacgaagtcaggagatcgagaccatcctggctaacacggtgaaacccccctctctact

SEQ ID NO: 498184 - DNA, 228 bp, Homo sapiens
  misc_feature (134)..(134): n is a, c, g, or t
aggactggcagcatcggtcaatttactctctctacaggttttctagtgtcaagagctgtcttttgactacagtaattacaagggttagagggtctgtgggcaattaaagttaactaagattctatcttgtgcancagctatcacaggctcggtaggtttgtctgctctaactataaatcttcccactattttgctacatagacgggtgtgctcttttagcctgttctt

SEQ ID NO: 498185 - DNA, 237 bp, Homo sapiens
ttgaatgttctgctatccttgccttatgcctgtacttgacctgagacttcaattccattgtgtttccttgctacttgatatctcgaaatatggtccgaaactatcgcatgatccgtgcacctttgcttgtgcatatatcatagctctcttatagagagtgtgcacaatctatttcatttgatgtaatcaacgattaatatattgtatagataaaaataaaatacaactttaaatgcg

SEQ ID NO: 498186 - DNA, 517 bp, Homo sapiens
agctactccaaaggctaaggcaggattgtttgtgttaaagttcatagttcactaaaatcttataaaactttgttaacttatttttaatgtaaattccagaattttagtgcttacataatatttagtgttatatatgtatgtgtgtgtgtgtgtgtgtatatatatatatatatatattttttttttaatgaatcagaacctctcatctagtgcttggaaaaaaatggaacagtcaacttttttaaaaaaataagttctaatgtgaaactatttcagtgtattattatagtgatttgcaatagaacctagagaacatatttgtaacactggtttcataggcaatatgattattagtaccaattatcagtctaattagtaccaatgatcagtctaatacataaacattagtaatataacctgtttgtattttggagggctttagaacttttcaagagtttagtaatgtgtttatatgcattaatttaaaaaaatcagtagatatataagaaaaagaggt

SEQ ID NO: 498187 - DNA, 533 bp, Homo sapiens
ggtttctcggtctggaggcgtagttttgaaagtcacatcacccagtgtgcagcgctgaggacgtgtgatctctggctcgtgcctgtgtgggggcactgcaggacggtggccgagtctcatgacctctgtcctactgctggctgtgtgtgtgcgcacatgagcgctcgacctggtgcctgacgttggctgtgcccacggaggtccgctgctcctctcaggtcaaagtgtaacacacgtccgatggacactgtcaatcgtggtaagcacttccactgctgtgccaacggcccaaggctatcgcgttctgaagaaccaaatgtccagtccgttgcgcaggtcgggacgttggtcgaccggttgctggcaagaatgctccacatgcctgtctgggccccgctggctcgggttcgccttcttgtttgagtcggctgacgactagtgttaccgcagcttttggggtggtcgctcgacggcgtcccagtgggtgccgaggagccgacttgggacgagggtgaggctccgcagacagctgc

SEQ ID NO: 498188 - DNA, 172 bp, Homo sapiens
gaacatattacattagccttggtggataggtcgaggaacagctattccaacggctgacaaactcctctatgcagctgtatcgaaagctgggtgtttcatgacagttgaagaccagattacagctgtcagaaaattcatagaaatgggtttcattgatgaaaaaagaatagcc

SEQ ID NO: 498189 - DNA, 229 bp, Homo sapiens
cgtctcgtgaactcgtgcaacgtcactacttagttttttaactgtatgttacaagtttttctgaatgcgtttagtttggttcgatactcttcgtcgttgcctccaaagtgtttgacaaacttctcatatcgtacttcgggtttttcctcctttaaaaaagcatcaatagcatcttgtgataaaaatatgtccgtaagatgttttgtgcggtcgtcggtgttttcagggt

SEQ ID NO: 498190 - DNA, 381 bp, Homo sapiens
gtgttctgaggattccgacggaggtcggttcatccgtatcatgatctgagatcctcatgtttttatataatagttaatctgtctataagctattattctccatgaaactgtagatagtaccatagaccataattttattactcctcacaacacatctgtgaggtagtatggggtgaggtcaatatgaaagcatcagccccattttagagatgaagacacagaagtgcagggagggcaagaagtttcactggggccacaggacaggcacacacaaagttgaatcccggtcttatcatcatctgccgacgatgagacgaaaagaggcggcttgcgtccctcctgctctgacattctctctaaagtgttatgactagcactatc

SEQ ID NO: 498191 - DNA, 152 bp, Homo sapiens
gaccataagctgggaaggtggcacgggcttctagatcccagccactcaagaggctgaaataggagggttacttgagtccaggagttccagtccagcctgggcaacatagtgagaccctgattctttaaaaagaaacacaaataaataaacat

SEQ ID NO: 498192 - DNA, 268 bp, Homo sapiens
aatggctgaatccaaagaaaggtttacctctgtgagatgagcgcacacatcagcatgtcagataggtttcttctatattgtatattgggatattcactttttcaccattggtttcaatgaactcttgaatgtccattcacagaatggacaaaaacagtgtttccaaactgatgaatccaaataaatatttgaccttgtgagatgaatgtccacatcacaaagcagtttcttagaaagcttctttctgttttttatctgaagtcgacgc

SEQ ID NO: 498193 - DNA, 343 bp, Homo sapiens
gaggctattgtgggttttaagtaattttacaatatataggtacttcaggtgccaattaaattatatatatacacacacacaggattttgttatatacatacatataacacagccatataatttccctatttaattaacagcattcataaaagaaaattacttacagtaaaaatggggtactaactctactgaaacaatttcaacagaaaaaggttattaattgccatatatcaatagttgtattaaatccaaaatccctactgccagcaattttatatttgtctctctcagagtttccagatggatgctgggtgagatgaacttgtgttttacagaggcaatt

SEQ ID NO: 498194 - DNA, 725 bp, Homo sapiens
gagcagcagcaggaggaggcagagcacgagtcaatcgtcgggaaccatgactcagtctcaggtccacgttgcagtcctttctctaggccagaacgccgaccaaggaaaaactcacttacctagtgagaattgcgagtgattttgcttttgctctccataggctagtcacctggtgtccataccagattgaagacaggctcgattcgtggaaggttcttgaggaacacacgcagactttacaacgagatacctcgatgatgactgtgggcaacatgggctacatatgccttgacccagtgcgttcagaagtcaggaatactctcatagtccgccaacatggaatgcttgtgttccatctgacctgaataccatgtgacttgtaagacagatgagatcgcttccaatgtacagtccaacagataagctcaggaaccacatggggattgactaatggtagtagcatgaacgatcgtatggagtgagtcaattgtagcgcaacagacccagtgacatgctcaattggaacgttccgaataaccggaacattcctcgcaatcgcattcgtaacgattagatctaccattggaatcgcaattgttcctcaagccacaaagttgcctggattggaaggtaccgttccaaacgcgaggtacctgggagtgggaagattgccttggacttgcacatcttggctcccactgtggactttttgcccccatccggga

SEQ ID NO: 498195 - DNA, 149 bp, Homo sapiens
ttcgagctcggcccccattttttgtattttttagtagagatggggtctcactgtgttgaccgggctgatctcgaactcccgacctcgtgatccacccgcttcggcctcccaaagtgcgcctggcctgatctctgggattttcgaaactt

SEQ ID NO: 498196 - DNA, 592 bp, Homo sapiens
  misc_feature (41)..(41): n is a, c, g, or t
  misc_feature (81)..(81): n is a, c, g, or t
  misc_feature (102)..(102): n is a, c, g, or t
  misc_feature (148)..(148): n is a, c, g, or t
  misc_feature (172)..(172): n is a, c, g, or t
  misc_feature (365)..(365): n is a, c, g, or t
  misc_feature (409)..(409): n is a, c, g, or t
  misc_feature (544)..(544): n is a, c, g, or t
  misc_feature (581)..(584): n is a, c, g, or t
acttttgaataaattcggtaattttagggattggcaatcangtgggatcattaaataattccttaggaaatttaaaatttngcatggcatttaaatatatangagagtatagtttcataatttcctattccattaactttcatcatanttgaaatcagatcactgaaaaacntatgcaaaacatattttaagtgctattttttggtgggtacagattcaccaatgtcactttgtttgcatatcatattttattattattagagcaatggctttatctgaaacatgaaagataaacttttttggctgggtgcagtggctcacgcctgtaatcccagcactttgggaggcgggtggattgcctgacntcaggagtttgagaccagcctgggcaacggggtgaaaccctgtntttactaaaatacaaagaattagccgggcatggtggtgtgtgcctgcagtcccagttacttgggagggtgaggtaggagaattgcttgagcccgggaggctgaggttgcagtgagccaagattgcatcactgcantccagcctgggtgacagagtgagactccaactccagnnnnaaagaaac

SEQ ID NO: 498197 - DNA, 145 bp, Homo sapiens
  misc_feature (10)..(10): n is a, c, g, or t
  misc_feature (72)..(73): n is a, c, g, or t
  misc_feature (88)..(88): n is a, c, g, or t
ctgccctggngaactacggttactgtgacttacggacgtacgggttacggactgacgtgggaccgaccgacnngacgacggaccgtanacgtttaccttactggccttttggaggttgacggtgactgactggacgagtggacga

SEQ ID NO: 498198 - DNA, 355 bp, Homo sapiens
  misc_feature (1)..(1): n is a, c, g, or t
  misc_feature (283)..(283): n is a, c, g, or t
ngaaaaatgcaacagttcagactcggaaggacacaggtagaagtggaaactacctgtcagataaacatgctggatgggattaatgacagattagaatccgtaagagaaaagtttaatgtcctcgagggcacagcaatagaaactatcaaaaacaaaacacagaggccaggcacggtggctcacgcctgtaatcccaggcactttgggaggccaaggcagctggattcgcttgaggccagggagtttcaaaaccagcctgggccaacatggcgttaaccccttnttttattaaaattaaaaaatttaggccgggcttcgtgggtacacccctgttagttccccaggttccttcagg

SEQ ID NO: 498199 - DNA, 150 bp, Homo sapiens
ctgtaacctctcttgtaatagcatcttctggggcatcatcggcatcttggtaccttggttcttccctaggggtcctacccggaaagttatcttacccttgttggtaacctgtacggtttgctgcattctcttttggctgttgcttctggc

SEQ ID NO: 498200 - DNA, 335 bp, Homo sapiens
aaaaatatctggtggcccgggtgggagtgcagtgacggtgatcatggctcacggcagccacaaccttccatctcaggtaatcctcccacctcagggctccccaccctgagtagctgggactacaagcatgtgccagcacaccaccaggcgtaggctaagggttggtattcgtgggagagatgcaggtttccctaagtggcttaggcttctttggaactcttagactcaaataatcggccggcatgggcctccccaagggcgggaattacaggccatctaaatcttttatctcagattggcctggtgacaaagggaggggtacttgttctgacatg

SEQ ID NO: 498201 - DNA, 628 bp, Homo sapiens
  misc_feature (1)..(1): n is a, c, g, or t
ncccaagcactcttgtaaaagtaggtttgcgatatgttcccaccactcgatgtgtccatactcttctgtcgttatctcacagcattcacttcatgagttcagtggtggaccgcatgattgtactgctcgtctacccattggtagctcaggtgacattcctgagtggtagcgctggacgcaattcggtccatctcttgtaattcctggttcgcaagagatttcgaatacctctcctgctctatactggtctctcccgcgatctcgatctaagtgtacatctatatgagtacgtgtgcattctcgttcataccctatgggtcactcagtccacccatcgtaccgtcacggtatggaatcattggtgcctccagtattgcgttcttacccatcgtggcattcatagtcctatgtgtcattcagctcagctcatgtggagtcattcttagttctagccctcataaactctcggatatcacaagctgtaatgcacgtgggttcagctgcccatccatcttttccgcatgtcattgatcctgatgtttcaccatctagagagagagagagagagagagagagagagagagagagagagagagagagagacagagagagagagagagagagagag

SEQ ID NO: 498202 - DNA, 432 bp, Homo sapiens
  misc_feature (42)..(42): n is a, c, g, or t
gagaatttcattttcatgggtgacttcaatgccggctgcagntaggtccccaagaaggcctggaagaacatccgcttgaggactgaccccaggtttgtttggctgatcggggaccaaaaggaccccccggtgaaaaagagcccccactgtgcatatgacaggattgtgcttaaagggcaagaaatcgtcagttttgttgttcccaagtcaaacagtgtttttgacttccagaaagcttacaagctgactgaaaaggaggccctggatgtcagcggcccctttccagttgaatttaaactacagttttcaagggccttcccccacagcaaaaaatttgtccctttaaggaagaaaacaaaaagccaacgctcctagacccaagggtttcattttattaacccttttttgcctttaaataaaatgtttttaaca

SEQ ID NO: 498203 - DNA, 297 bp, Homo sapiens
cacgaggagattccggatcgctgccatccgatggatattgcttcacataccagactcagcctgtgacccaatcaagaaacgccttctgcagatcaaggagcactttctaacacactctcggtacaatcccaggatcctcttccagctgctgttagatagtgcacagtttgagtttatactcagagagatgttcatgcaaatgctttcagaaaagcaagccagatgggagcattataagaaagagggttcggggcggatgactgagcttgctgatgtcttttcaggaggtgaaacccc

SEQ ID NO: 498204 - DNA, 348 bp, Homo sapiens
tgagaacaggtgtcgtctctgtaactcatatggtaaccgtagttacagttttcactgaagttagactccttgtggagccccacgtcctccatacggacactcaagtttgaacggttcgtccaacaataggaaacagtaccgtgcgagcggaagtatttggacttattcgtgtggtccgaccaacagtcttatccatcacttccagacacagacgaaccatccttaccaccataatgcgaactactcctgtcagtactgaggtggtcgtcaaagttatggttccctttctcctcactgtaggttctcgtcgtttagaacttgtaagagtctgaacagaggtctgttcta

SEQ ID NO: 498205 - DNA, 364 bp, Homo sapiens
aggcactatacaacacgttgcaggtgtgtagactcaatcctaactatatgaataatcacatcacatgtacatagtctgaatatcctaattcaaaaacagagattgggctgggcttagtggctcacgcctgtaatcccagcactttgggaggcagagatgatattttcattttttctttttttcagctctaactccaatggatgcatcttttgtaaagacccaaatcatacttctaaagcatgaaaaatcataatcactaaggtgaaaaaaccagtggatgcgatgaatggcacattagcaccattgcagcacgggccacagatcagtgacaccttgcagacagcgccctatattatccaaaata

SEQ ID NO: 498206 - DNA, 365 bp, Homo sapiens
cactgcagcaccatgggtacggcgaccagccacaggcgtttcagctcggccacggtcatgtctttagggttctttacgccattgatcgccaatacccatgcgtctggatcggcgacgatctgctcggacggaggagcgacgttattgcgcacgaacaagcggtccagcggtgtgatcagacccgaaccaaacgcgctgcgcttggtttctatggtgttggcactgtgcacgatcaagctgtcggcatgtttccaggatgcaaaggctggcaaggctttagcctgcgtttttgccttttcctgggccagtgcagctgacaagggtgtcaggcttgccgtccccgcgtaaaagcgcacgcgaattta

SEQ ID NO: 498207 - DNA, 140 bp, Homo sapiens
gattgtgaaagaaagctgggaagagctccgcggccaagttagcaggacactctaacaagtgactgcgcggcccgcgcccgtttttttgactgcgttaagccccctgggtccccgcgcggcgcatcccagcctgggcggga

SEQ ID NO: 498208 - DNA, 5146 bp, Homo sapiens
  misc_feature (5140)..(5140): n is a, c, g, or t
ctccagacctacccagaaagatgcccggatggatcctgcagctccgtggcttttctgggaagcagcggcccctgctctcaagagaccctggctcctgatggtggccccaaggttgccagctggtgctagggactcaggacagtttcccagaaaaggccaagcgggcagcccctccaggggccgggtgaggaagctggggggtgcggaggccacactgggtccctgaaccccctgcttggttacagtgcagctcctcaagtccacagacgtgggccggcacagcctcctgtacctgaaggaaatcggccgtggctggttcgggaaggtgttcctgggggaggtgaactctggcatcagcagtgcccaggtggtggtgaaggagctgcaggctagtgccagcgtgcaggagcagatgcagttcctggaggaggtgcagccctacagggccctgaagcacagcaacctgctccagtgcctggcccagtgcgccgaggtgacgccctacctgctggtgatggagttctgcccactgggggacctcaagggctacctgcggagctgccgggtggcggagtccatggctcccgacccccggaccctgcagcgcatggcctgtgaggtggcctgtggcgtcctgcaccttcatcgcaacaatttcgtgcacagcgacctggccctgcggaactgcctgctcacggctgacctgacggtgaagattggtgactatggcctggctcactgcaagtacagagaggactacttcgtgactgccgaccagctgtgggtgcctctgcgctggatcgcgccagagctggtggacgaggtgcatagcaacctgctcgtcgtggaccagaccaagagcgggaatgtgtggtccctgggcgtgaccatctgggagctctttgagctgggcacgcagccctatccccagcactcggaccagcaggtgctggcgtacacggtccgggagcagcagctcaagctgcccaagccccagctgcagctgaccctgtcggaccgctggtacgaggtgatgcagttctgctggctgcagcccgagcagcggcccacagccgaggaggtgcacctgctgctgtcctacctgtgtgccaagggcgccaccgaagcagaggaggagtttgaacggcgctggcgctctctgcggcccggcgggggcggcgtggggcccgggcccggtgcggcggggcccatgctgggcggcgtggtggagctcgccgctgcctcgtccttcccgctgctggagcagttcgcgggcgacggcttccacgcggacggcgacgacgtgctgacggtgaccgagaccagccgaggcctcaattttgagtacaagtgggaggcgggccgcggcgcggaggccttcccggccacgctgagccctggccgcaccgcacgcctgcaggagctgtgcgcccccgacggcgcgcccccgggcgtggttccggtgctcagcgcgcacagcccgtcgctgggcagcgagtacttcatccgcctagaggaggccgcacccgccgccggccacgaccctgactgcgccggctgcgcccccagtccacctgccaccgcggaccaggacgacgactctgacggcagcaccgccgcctcgctggccatggagccgctgctgggccacgggccacccgtcgacgtcccctggggccgcggcgaccactaccctcgcagaagcttggcgcgggacccgctctgcccctcacgctctccctcgccctcggcggggcccctgagtctggcggagggaggagcggaggatgcagactggggcgtggccgccttctgtcctgccttcttcgaggacccactgggcacgtcccctttggggagctcaggggcgcccccgctgccgctgactggcgaggatgagctagaggaggtgggagcgcggagggccgcccagcgcgggcactggcgctccaacgtgtcagccaacaacaacagcggcagccgctgtccagagtcctgggaccccgtctctgcgggctgccacgctgagggctgccccagtccaaagcagaccccacgggcctcccccgagccggggtaccctggagagcctctgcttgggctccaggcagcctctgcccaggagccaggctgctgccccggcctccctcatctatgctctgcccagggcctggcacctgctccctgcctggttacaccctcctggacagagacagccagtagtgggggtgaccacccgcaggcagagcccaagcttgccacggaggctgagggcactaccggaccccgcctgccccttccttccgtcccctccccatcccaggagggagccccacttccctcggaggaggccagtgcccccgacgcccctgatgccctgcctgactctcccacgcctgctactggtggcgaggtgtctgccatcaagctggcttctgccctgaatggcagcagcagctctcccgaggtggaggcacccagcagtgaggatgaggacacggctgaggccacctcaggcatcttcaccgacacgtccagcgacggcctgcaggccaggaggccggatgtggtgccagccttccgctctctgcagaagcaggtggggacccccgactccctggactccctggacatcccgtcctcagccagtgatggtggctatgaggtcttcagcccgtcggccactggcccctctggagggcagccgcgagcgctggacagtggctatgacaccgagaactatgagtcccctgagtttgtgctcaaggaggcgcaggaagggtgtgagccccaggcctttgcggagctggcctcagagggtgagggccccgggcccgagacacggctctccacctccctcagtggcctcaacgagaagaatccctaccgagactctgcctacttctcagacctcgaggctgaggccgaggccacctcaggcccagagaagaagtgcggcggggaccgagcccccgggccagagctgggcctgccgagcactgggcagccgtctgagcaggtctgtctcaggcctggggtttccggggaggcacaaggctctggccccggggaggtgctgcccccactgctgcagcttgaagggtcctccccagagcccagcacctgcccctcgggcctggtcccagagcctccggagccccaaggcccagccaaggtgcggcctgggcccagccccagctgctcccagtttttcctgctgaccccggttccgctgagatcagaaggcaacagctctgagttccaggggcccccaggactgttgtcagggccggccccacaaaagcggatggggggcccaggcacccccagagccccactccgcctggctctgcccggcctccctgcggccttggagggccggccggaggaggaggaggaggacagtgaggacagcgacgagtctgacgaggagctccgctgctacagcgtccaggagcctagcgaggacagcgaagaggaggcgccggcggtgcccgtggtggtggctgagagccagagcgcgcgcaacctgcgcagcctgctcaagatgcccagcctgctgtccgagaccttctgcgaggacctggaacgcaagaagaaggccgtgtccttcttcgacgacgtcaccgtctacctctttgaccaggaaagccccacccgggagctcggggagcccttcccgggcgccaaggaatcgccccctacgttccttagggggagccccggctctcccagcgcccccaaccggccgcagcaggctgatggctccccaaatggctccacagcggaagagggtggtgggttcgcgtgggacgacgacttcccgctgatgacggccaaggcagccttcgccatggccctagacccggccgcacccgccccggctgcgcccacgcccacgcccgctcccttctcgcgcttcacggtgtcgcccgcgcccacgtcccgcttctccatcacgcacgtgtctgactcggacgccgagtccaagagaggacctgaagctggtgccgggggtgagagtaaagaggcttgagacctgggcagctcctgcccctcaaggctggcgtcaccggagcccctgccaggcagcagcgaggatggtgaccgagaaggtggggaccacgtcctggtggctgttggcagcagattcaggtgcctctgccccacgcggtgtcctggagaagcccgtgggatgagaggccctggatggtagatcggccatgctccgccccagaggcagaattcgtctgggcttttaggcttgctgctagcccctgggggcgcctggagccacagtgggtgtctgtacacacatacacactcaaaaggggccagtgcccctgggcacggcggcccccaccctctgccctgcctgcctggcctcggaggacccgcatgccccatccggcagctcctccggtgtgctcacaggacacttaaaccaggacgaggcatggccccgagacactggcaggtttgtgagcctcttcccaccccctgtgcccccacccttgcctggttcctggtggctcagggcaaggagtggccctgggcgcccgtgtcggtcctgtttccgctgcccttatctcaaagtccgtggctgtttccccttcactgactcagctagacccgtaagcccacccttcccacagggaacaggctgctcccacctgggtcccgctgtggccacggtgggcagcccaaaagatcaggggtggaggggcttccaggctgtactcctgccccgtgggccccgttctagaggtgcccttggcaggaccgtgcaggcagctcccctctgtggggcagtatctggtcctgtgccccagctgccaaaggagagtgggggccatgccccgcagtcagtgttggggggctcctgcctacagggagagggatggtggggaaggggtggagctgggggcagggcagcacagggaatatttttgtaactaactaactgctgtggttggagcgaatggaagttgggtgattttaagttattgttgccaaagagatgtaaagtttattgttgcttcgcagggggatttgttttgtgttttgtttgaggcttagaacgctggtgcaatgttttcttgttccttgttttttaagagaaatgaagctaagaaaaaanaaaaac

SEQ ID NO: 498209 - DNA, 144 bp, Homo sapiens
cagaggatccccatgcggtctcataccttccaaaatcattatctatactattaagattactttcctgtgagacccttaaatgtgtttgtatatttattttatttgagacagagtttcgcttttgtcacatccagccatggagag

SEQ ID NO: 498210 - DNA, 3719 bp, Homo sapiens
ctccagacctacccagaaagatgcccggatggatcctgcagctccgtggcttttctgggaagcagcggcccctgctctcaagagaccctggctcctgatggtggccccaaggttgccagctggtgctagggactcaggacagtttcccagaaaaggccaagcgggcagcccctccaggggccgggtgaggaagctggggggtgcggaggccacactgggtccctgaaccccctgcttggttacagtgcagctcctcaagtccacagacgtgggccggcacagcctcctgtacctgaaggaaatcggccgtggctggttcgggaaggtgttcctgggggaggtgaactctggcatcagcagtgcccaggtggtggtgaaggagctgcaggctagtgccagcgtgcaggagcagatgcagttcctggaggaggtgcagccctacagggccctgaagcacagcaacctgctccagtgcctggcccagtgcgccgaggtgacgccctacctgctggtgatggagttctgcccactgggggacctcaagggctacctgcggagctgccgggtggcggagtccatggctcccgacccccggaccctgcagcgcatggcctgtgaggtggcctgtggcgtcctgcaccttcatcgcaacaatttcgtgcacagcgacctggccctgcggaactgcctgctcacggctgacctgacggtgaagattggtgactatggcctggctcactgcaagtacagagaggactacttcgtgactgccgaccagctgtgggtgcctctgcgctggatcgcgccagagctggtggacgaggtgcatagcaacctgctcgtcgtggaccagaccaagagcgggaatgtgtggtccctgggcgtgaccatctgggagctctttgagctgggcacgcagccctatccccagcactcggaccagcaggtgctggcgtacacggtccgggagcagcagctcaagctgcccaagccccagctgcagctgaccctgtcggaccgctggtacgaggtgatgcagttctgctggctgcagcccgagcagcggcccacagccgaggaggtgcacctgctgctgtcctacctgtgtgccaagggcgccaccgaagcagaggaggagtttgaacggcgctggcgctctctgcggcccggcgggggcggcgtggggcccgggcccggtgcggcggggcccatgctgggcggcgtggtggagctcgccgctgcctcgtccttcccgctgctggagcagttcgcgggcgacggcttccacgcggacggcgacgacgtgctgacggtgaccgagaccagccgaggcctcaattttgagtacaagtgggaggcgggccgcggcgcggaggccttcccggccacgctgagccctggccgcaccgcacgcctgcaggagctgtgcgcccccgacggcgcgcccccgggcgtggttccggtgctcagcgcgcacagcccgtcgctgggcagcgagtacttcatccgcctagaggaggccgcacccgccgccggccacgaccctgactgcgccggctgcgcccccagtccacctgccaccgcggaccaggacgacgactctgacggcagcaccgccgcctcgctggccatggagccgctgctgggccacgggccacccgtcgacgtcccctggggccgcggcgaccactaccctcgcagaagcttggcgcgggacccgctctgcccctcacgctctccctcgccctcggcggggcccctgagtctggcggagggaggagcggaggatgcagactggggcgtggccgccttctgtcctgccttcttcgaggacccactgggcacgtcccctttggggagctcaggggcgcccccgctgccgctgactggcgaggatgagctagaggaggtgggagcgcggagggccgcccagcgcgggcactggcgctccaacgtgtcagccaacaacaacagcggcagccgctgtccagagtcctgggaccccgtctctgcgggctgccacgctgagggctgccccagtccaaagcagaccccacgggcctcccccgagccggggtaccctggagagcctctgcttgggctccaggcagcctctgcccaggagccaggctgctgccccggcctccctcatctatgctctgcccagggcctggcacctgctccctgcctggttacaccctcctggacagagacagccagtagtgggggtgaccacccgcaggcagagcccaagcttgccacggaggctgagggcactaccggaccccgcctgccccttccttccgtcccctccccatcccaggagggagccccacttccctcggaggaggccagtgcccccgacgcccctgatgccctgcctgactctcccacgcctgctactggtggcgaggtgtctgccatcaagctggcttctgccctgaatggcagcagcagctctcccgaggtggaggcacccagcagtgaggatgaggacacggctgaggccacctcaggcatcttcaccgacacgtccagcgacggcctgcaggccaggaggccggatgtggtgccagccttccgctctctgcagaagcaggtggggacccccgactccctggactccctggacatcccgtcctcagccagtgatggtggctatgaggtcttcagcccgtcggccactggcccctctggagggcagccgcgagcgctggacagtggctatgacaccgagaactatgagtcccctgagtttgtgctcaaggaggcgcaggaagggtgtgagccccaggcctttgcggagctggcctcagagggtgagggccccgggcccgagacacggctctccacctccctcagtggcctcaacgagaagaatccctaccgagactctgcctacttctcagacctcgaggctgaggccgaggccacctcaggcccagagaagaagtgcggcggggaccgagcccccgggccagagctgggcctgccgagcactgggcagccgtctgagcaggtctgtctcaggcctggggtttccggggaggcacaaggctctggccccggggaggtgctgcccccactgctgcagcttgaagggtcctccccagagcccagcacctgcccctcgggcctggtcccagagcctccggagccccaaggcccagccaaggtgcggcctgggcccagccccagctgctcccagtttttcctgctgaccccggttccgctgagatcagaaggcaacagctctgagttccaggggcccccaggactgttgtcagggccggccccacaaaagcggatggggggcccaggcacccccagagccccactccgcctggctctgcccggcctccctgcggccttggagggccggccggaggaggaggaggaggacagtgaggacagcgacgagtctgacgaggagctccgctgctacagcgtccaggagcctagcgaggacagcgaagaggaggcgccggcggtgcccgtggtggtggctgagagccagagcgcgcgcaacctgcgcagcctgctcaagatgcccagcctgctgtccgagaccttctgcgaggacctggaacgcaagaagaaggccgtgtccttcttcgacgacgtcaccgtctacctctttgaccaggtgggccgccgccacccggggtctgcccggggctgggggtcgcgctcccgcaggaaggggtgggagcggccgc

SEQ ID NO: 498211 - DNA, 120 bp, Homo sapiens
aggtgacttttaagctaaggcttaaaagtgtcagccttgggccagttgtggtggctcatgcctgtaatcccagctacttgagcggctgaggcgggagaatcgcttgaacccaggaggtgg

SEQ ID NO: 498212 - DNA, 354 bp, Homo sapiens
cggctataaaattttccctttggattattatattgggggaaaccttttttttccttttttattaagaaaaagggaaaccttaatatgggggttaaaaagggaaaaaatgtgatatttgccttatttaacccccttgccgatttaaagtttccagggttcccccttagggggttaaaggactgaaaaaaggttggggctatttccctctggaaaataaaaaaatttgtttcccgggtttgtcctgaaaagccaatgagaaaatggatataaaagccctttgttaattggtaaaggaggaccaatgggaggttttttttggtttgaagcataaatgtggattttatcccggtttga

SEQ ID NO: 498213 - DNA, 1237 bp, Homo sapiens
  misc_feature (68)..(68): n is a, c, g, or t
  misc_feature (1231)..(1231): n is a, c, g, or t
cagggatggaggccaggtgggagttgcgggggaggcagccctggtgtctcagaaccctgtgttcactntgttgtcctgcttgccaggacctgaagctggtgccgggggtgagagtaaagaggcttgagacctgggcagctcctgcccctcaaggctggcgtcaccggagcccctgccaggcagcagcgaggatggtgaccgagaaggtggggaccacgtcctggtggctgttggcagcagattcaggtgcctctgccccacgcggtgtcctggagaagcccgtgggatgagaggccctggatggtagatcggccatgctccgccccagaggcagaattcgtctgggcttttaggcttgctgctagcccctgggggcgcctggagccacagtgggtgtctgtacacacatacacactcaaaaggggccagtgcccctgggcacggcggcccccaccctctgccctgcctgcctggcctcggaggacccgcatgccccatccggcagctcctccggtgtgctcacaggacacttaaaccaggacgaggcatggccccgagacactggcaggtttgtgagcctcttcccaccccctgtgcccccacccttgcctggttcctggtggctcagggcaaggagtggccctgggcgcccgtgtcggtcctgtttccgctgcccttatctcaaagtccgtggctgtttccccttcactgactcagctagacccgtaagcccacccttcccacagggaacaggctgctcccacctgggtcccgctgtggccacggtgggcagcccaaaagatcaggggtggaggggcttccaggctgtactcctgccccgtgggccccgttctagaggtgcccttggcaggaccgtgcaggcagctcccctctgtggggcagtatctggtcctgtgccccagctgccaaaggagagtgggggccatgccccgcagtcagtgttggggggctcctgcctacagggagagggatggtggggaaggggtggagctgggggcagggcagcacagggaatatttttgtaactaactaactgctgtggttggagcgaatggaagttgggtgattttaagttattgttgccaaagagatgtaaagtttattgttgcttcgcagggggatttgttttgtgttttgtttgaggcttagaacgctggtgcaatgttttcttgttccttgttttttaagagaaatgaagctaagaaaaaanaaaaac

SEQ ID NO: 498214 - DNA, 521 bp, Homo sapiens
  misc_feature (397)..(397): n is a, c, g, or t
gggtgtctagagtgtacctcacacgcacttgggggaagataaagcagtttttgaagagagatctttgccatctcagaagaatcaagagaagtttccatttctaggaggatcgggttcctctattatgtgctttttgactatggatctctaagactgatattgaactatctgcatctttccctcaaaggggctgtttctatctcaagctcacctgttttcatacttgttatgacagaatattaaaggactcctgttcccattttccctacccgtgatgaatattttctggtgcccctttttttaaagggcaaagggggggggggctatagctctcttcctttgtctcataaaactttgtctctataggttctgtcttcaacaattttgggagctaccnctattcatcactacttctccatttaccagctgtttcccttcatgacccaaagcagtgattgtagagatccttttacaagtctctatcctctagtgtgtatttcatctttcaaaaactcttttgg

SEQ ID NO: 498215 - DNA, 576 bp, Homo sapiens
  misc_feature (478)..(478): n is a, c, g, or t
aacaacattacaccatccgggaggggggtcacggacgatcgggacaagggccacacggcagggcggctcgcggtccggccctacgagcggcggttcaagggagcccttaccggaataggtgcggtgggggacggagttttcaaagaaaacaggagactaccccagcctctcggccagggacatccaagtgctggcactcacataccagtgggaagcagagtgggtgggggtgtctcacctaaaacaagaaccacagaaggttaaggtgagctcatcgattcagcacccagaaacacctctgcacatgtcgggttcccatcggccctacaagcctaaacccccaaaagaaacagaaaagggacactcagttggtgagcctgagaaccgggaatttagttccttcatgtgcgggagaaatccttggcccaacatcgatcatgaccggcaggagcggtggatggacagaggtgaggacgtnccaagtgaggaggcggaggaggaagaaacggggttcgacgacagaaaagatgacagcgatgacgacgggggtggctggataccccccagtaacatcaa

SEQ ID NO: 498216 - DNA, 442 bp, Homo sapiens
cctctgtggtcttcctcccaataactcataacccgagtattttctatgaggaaagacgtcagacaaattccaatactaggcaacctataaaatacttggcctgtactcctcaaaactaacaaggtcatcaaaaataaagtgtgagaaattgccacatttaaaaagacatgacaacttaatgtaaagtggtatctgagatggaatcttggaacagagaaagggcattgaataaaagctaagaatctctaaataaactatgccattttaaaaataatgatgtgtcaatattggcttattaatcataacacatgtatcatactaatgtaaagtgtcaacgatggggaaactgaatggaaggtatctgggaactttctgtactgtctcctcagttgtttctgtaaatctaaaactgttctaaaaaataaagtttgttaaaaagaaa

SEQ ID NO: 498217 - DNA, 128 bp, Homo sapiens
agggagtagtccttgctatattatgcttggcataatgattttctttcccttgcggactatatctatagcgccagttcaattctatcgctatactttatctgggtaaatggtttggctaaggtagtctg

SEQ ID NO: 498218 - DNA, 901 bp, Homo sapiens
gacagagtggggacgtccgggtacgaagcgggagtgtacgtgtgtgccagcgaatatgaaaataattaaaactatgggtgatgttgagaaaggcaagacacgtatagcatgatgaatggtgttgcccagtgacatagcgtaagaaaatgggaggccagcatcacacgacttgggccaaatctccactggtctcttttgctcgtagagatagggtcatggctgccctggatactcttgacaccatgactccggtcaagtggatgaacgaacagggcgtcatcggggagatgacggataccctagaatggagtatgacggagaaatcccaaagaatgtagattgcctggatacactaatatgaatgtttgtcggcatttgatggatagtaacggacagaaaggggcaggacttaaataggattaatagtcataaagaagttactagatggagtaatatgttgggctacgtggcttatttattagcaaataccagaaatatgtttcatgagttcttggaatgtgtaccaatcctataagtagtagtcgtcatagagcaggaatgcagcatcatgacatgtagctgagagaatattaggtcggagcagtccgtgatttacagaagtagagactggataagtgggttgaaatgaatatgtacaggtttctgaatttatattagtcacctccgagtcatgtaaactggtatcaactgtttagcccttccaagagctgattagaggtcggaaaacaatggcaagtggaagcaaagcaggtgtgagtgcaatctttaaaattatgggaatggttggatagatttttcaaacgggaggaagttattgccggggaatggcgagggttaacacccaatctgtgtgggcagtaaaaccaaggacgggaaaaag

SEQ ID NO: 498219 - DNA, 147 bp, Homo sapiens
gaggtcgctctagccgatcgcttacttatgccgtggggggagaccccaattctataccaacacctatactagattaatcggtcaccctgaagtttatatatcttatacctaccaggcttcggaataatactcccatatatgtaacta

SEQ ID NO: 498220 - DNA, 467 bp, Homo sapiens
acaggtgctcaaatcctcagcagctgcattgtgcaataccgcagcattatgtattggtattggcttttgtcattgctggattttaagatgttgaaaatggctttttcatgttatttttttccctcagtggtatcaatttgaagttttttttgtttgttctctctttcttgaaatattcctgtttcaatgagaataatgtttgaagggtttaagatcaaaccgttgccctgtcatgtgtaatgcagtcaaagtgttttttattccagcagagttccacaaatgtttgaaaagttgccagtgcaatcgtcaagtagatattttttttcttccttttttcctgtaaatacttcagcaccatctctacttgatttttaaatggaatgtaactgcgtgcaaatcgttcacaatgcttcttttaccccttcattttaggggcactcaaaataaaaataaaggatttagacaga

SEQ ID NO: 498221 - DNA, 808 bp, Homo sapiens
  misc_feature (54)..(54): n is a, c, g, or t
  misc_feature (425)..(425): n is a, c, g, or t
  misc_feature (462)..(462): n is a, c, g, or t
gcgaagaaaaaaagaagaaaaaaaaaaagcatggtaaatatagaacagcgcttnaatacaagcaggctggtaccgcatccggataacccgggatatcgtcgacggagctgtaacaacgggctgtggcgcacggcgtcggttcgctgccttccagtacaccaggcgctaaggtcgtgggtgcgccgaggaaaccgctactggttaccggcgcgccggtcggatcttcgctttttagcgtcgaattactgaccggaagaatgtcaccctgcgggccagacactgaacttgttcccgcagccaccgcttaaatcgggaggtgcaggcagggcgtaagtctgtttggcgactgtggtacaagccataccaggaccagaaagcgaaccatcctgggcaacaataatcggatcgatacgaactttggtgtngtttgacgtgttaagacggtcagctgccgcgcgaganagtgaaataacgcggtcgttgccgtaagggccgcgatcattaatgcgcaccacgatcattcgcccgttagccaggttagtgattctggcgtagctggggatcggaagcgttggatgggctgccgtcagactgtgtcggatcgaatgcttcgccagaggccgtcaggttactgccgggttcggcatcatagattgccgacagtcccgcctggctaaatcgagacggatcctgcaccgattttggtagctattaaccgtcgcgctggtaatcctgattgccgcgcgttcagtgggttcgaaacgcgggtccgcccgctaatttcaactatagggccgtacataccgca

SEQ ID NO: 498222 - DNA, 129 bp, Homo sapiens
aggccactctgacgatcccaacactgtcgtgacgctatctggtgacttgtctacctacactcccggttgctggagagagcagccaaaatgaacgatgctttatggtggtggctccttgaccttgcttat

SEQ ID NO: 498223 - DNA, 756 bp, Homo sapiens
  misc_feature (373)..(373): n is a, c, g, or t
  misc_feature (410)..(410): n is a, c, g, or t
gcgtcggtcagattatattcgaatgcaaccaggggctgaacgtcattgactgcgctcgtagggcaatccgttattggttaccagttgcgcgcggatcggtgatcttcacctataagtggtcgaatcactgaacgagtacaccgaatgatcatcctgctgggtgggagcagcacatgataggtgtgcttcactcggcgtcgccccgcctgtaacattgcgaggcggatcgttgcgagggcaaggcgcgtacctgtcgtcgtttggaggacgaacatgataggtataactagacgtcgcaatgaaccatccgaactcaagagatagggagtccatcctgggcaacaataatcggatcgatacgaactttggtgtngtttgacgtgttaagacggtcagctgccgcgcgaganagtgaaataacgcggtcgttgccgtaagggccgcgatcattaatgcgcaccacgatcattcgcccgttagccaggttagtgattctggcgtagctggggatcggaagcgttggatgggctgccgtcagactgtgtcggatcgaatgcttcgccagaggccgtcaggttactgccgggttcggcatcatagattgccgacagtcccgcctggctaaatcgagacggatcctgcaccgattttggtagctattaaccgtcgcgctggtaatcctgattgccgcgcgttcagtgggttcgaaacgcgggtccgcccgctaatttcaactatagggccgtacataccgca

SEQ ID NO: 498224 - DNA, 134 bp, Homo sapiens
gaggaacgatgtcgtgaaaaagagatttttcagaaggttgtcagcgttcagatattcacgtaccatcgtgtcatctgggtctgttagtgtaagtgaccctcagtgcagtctgtcccagcagtttatgtcctatg

SEQ ID NO: 498225 - DNA, 774 bp, Homo sapiens
gcctggtgtgattccagttcctgcgcggtttgttctctggagcagcgttcttttatctccgtcacgtcttctctccatacctaagtgtcgtgccgtcatcccgatggaagattcgatggacatggacgatgagccctcctgaggtccccagaactatcttttcggttgtgaactaagaggccgatcagatagattatcgactttaaggtggatagatgatgagaagatgagcaccaggttatctttaagaacggtcagtataggggctggtgctataggatgagattgcactatgttgaatgcagaggcaatgaattacgaaggcagttcgcaattaaagtaatattggtaactttgaaaatggtctgtacagacaacggtttaccctgtggtgggctttgaacataacacacgacctagtggatctataagtgttgacacgtgtaggtatcagggcacagtgcattattagttggacagatacttagtgagctgtggaggaagatgcagagtcagaagatgaagaggaggaggatgtgaaactcttaagtatatctggaaagcggtcttgcccgtggaggtggtagcaaggttccacagaataaaagtcaaacttgcttgctgatgacgatgatgacgatgatgatgaacgaggatgatgatgaagatgattgatgatggatgattttgatgatgaggaagtgaagaaaacgcgcagtgaagaaatctatagagatatccgaggcaagaatgcagaaagtcgaaatgagaatg

SEQ ID NO: 498226 - DNA, 294 bp, Homo sapiens
gtttgccattttttatattcaaacgaaccaaatccatcaacatttgaatgtcactggtaggactgggaaaaaaatgttggtgatgaaggcaagggaaattgagaaattaaggcggtagtgggggtagaataaaagggaaagaaatttccccaagggaatgaactttaaaatttttaccagacccatatttatttattatcaatcccgatctagggatttatccctatgaagtatggatgtatttattttaaaaattcacactcaccttttccaagaatatttgatggcccatta

SEQ ID NO: 498227 - DNA, 318 bp, Homo sapiens
tcagttagatggaaatgaagaaaatggtgttggaagtaaagtgactgcccacgtcccatagctcaggtacgggggtagggaggacgaccaggcttcctgattcctggtccagtgggctcctcaggacaacacaattccttccgttcctaaggtttgatgaatcaagtcaattctgctgagagagactcataccatagcctgtgaagtctgcatcgggggaatggtatgaagctggtgctaaagggatctcttgtgaactgaaggagacctttgttgaatatttctgctgtttactttggccaccagcgaaagtcaacg

SEQ ID NO: 498228 - DNA, 89 bp, Homo sapiens
gttcctctccttaccacccgatcatttccttattgcacacagttacaggtggatgtgtctgtgataatgaaaagcatcagaaaagcttt

SEQ ID NO: 498229 - DNA, 121 bp, Homo sapiens
tcaggcattgaaaccagctggggcaatatagagagaccctcccccacaaaaaaatttttaaaaattagccaggtgtggtggtatgtgcctgcaatcccagctgttcaggaggttggggcag

SEQ ID NO: 498230 - DNA, 127 bp, Homo sapiens
  misc_feature (35)..(35): n is a, c, g, or t
  misc_feature (59)..(59): n is a, c, g, or t
  misc_feature (85)..(85): n is a, c, g, or t
ggctaatgtggcctcaatccgagctagcaagacgngtaaactatgctcgctgtcgtagngacatggtcggaggtctactaagcantggcctgggcactatagagtgcattggtgaactccctggata

SEQ ID NO: 498231 - DNA, 177 bp, Homo sapiens
tattcattaaactgataatatagcgctaatggttcacgagcacagattataaaggaagggctgcctacccacctgctctgacataaccagctgtatgattctgtatctatcatttgctgaagttgagataataatagtgtatgtacttcataaggctactgagaggattaaaatgag

SEQ ID NO: 498232 - DNA, 695 bp, Homo sapiens
cggtggtcagtttctgcgactggtgttggcgactgctgataggaaagaatgtcgttcaggagaatgctacacatatggtggcaccctgtgctccccggaactgtcaaagccactagctgttaatgccaagatgtgtcaagtttacaagattatcagccctgtcttgaacgtacaaacagggagacaaattatgtgggtgtctttctttttttaacccacgtcttgtgaactttccaacctctttttgtggttgggtggcctccgcacggggacggtaatccaattgtgcggtatttcaggggtggacttagtggggcctagcgacagagaaatttttacacggaaaaaaccgtccgaggagctttggccacaaagggtgtgaggtttgtggggtggacttctcccatgtgttatgggggaaatttttccttccgagcccattattccttggggttccagagatttcctttaacggccaaagattggcgggtgggttccaacagatatttaagctaatgggcctttaacagagggggaaatattgaacggcaacaggggggcaactgggtggaaacccctgggggggtaggacacccacccccaaattttgtgtgaaaaaacaccaaatgttttttcccatttttttgtggcgggtttacatttccaatagggaagccccaccgggtaattagggc

SEQ ID NO: 498233 - DNA, 149 bp, Homo sapiens
ccattgagcgtcaggagtgtgggacagcctcgacacgtgataaaaacctgtctgtactaaaaatacaaaacttagctgggtgtggtggcgggcacctagtatcccagctgctcgggaggctgtggcaggagaatcgcttgaacccagga

SEQ ID NO: 498234 - DNA, 147 bp, Homo sapiens
tattgatccctaaccagaatcccagaagtatccctagtccttctggatatggagaggcactaacaggatatatgtatacttaactagtttcacacacacacaacaaaaaatcacctgtatgtccgctcgggttaggggatggctggt

SEQ ID NO: 498235 - DNA, 891 bp, Homo sapiens
ggcgaggacaggtacgtcgcaggcttgtgcgggtcgggctcggacctgcgctgcctcgggatgtaaagtataacaagagggtcggcgatgggcagcgtatgcctgtgaggtctgcgggtgcccctgtcccccagctccccccgcatgccggctccgcagtggtccatctccggttgccgggtgcggattcgggttccggaccgatggctgtgtgttctccgccgtttacttgtggccccgataggccgggcttactgtggcgaccacgagatgcagctttggcgctatggatggagcccggggctacctcctcaaccggatttggggctgctcctggaggagctacgcagcgcttgtggcagcactgcctgaaggtatgagaccagattctaatctttatggttttccatgggaatttggtgagtctgtgcagctgttgtgggacttgtttggcgtgttctcttttgtgttcgtggacgccagttgtaacagtcgccctaggagtcggccttactgtggcaccgagtacgaacaggcttgcttctaattgctttctggacctagttgaacgcacagaaacgtaaactacttgaaacagatttagccttgtttcaccaagagtatgaaggctatgacagtagagtcatctttacacggactgccagctttgagaacggaggcaacagaagcacaaagtttggaggtacgaaaatcgacttggcatcctgtgaaaacgctgaacagggtccaacttcttgaccttgaacgatgaaaatactctgtcctagtaacaaaggacttacacagaccagaaactccaaacattcctgaacgcaggatggaattggatgcgggggatttttcacaacacggataacaggcttctacaag

SEQ ID NO: 498236 - DNA, 693 bp, Homo sapiens
ttgcccacgaaacctcccaccccggcgccaccacagagattacttcaaggttggggaggatttgaggaccagactgtggatgggagcccctctaagaccctggtgaaatgggagagtgagaataaaatggtctgtgaccagaagctcctgaagggagagggcccccagacctcgtggacccagagaactgaccgccacgatggggaacatgatccctgaccctgacggcggatgaccgttgtgtgccacccgggtcttacgtccggagagtgagtggcccccaggtagaacccccggccggaagccccccccctgccccatgcgtcacccgccctgcgttcactgccccctccgtcccaccccctccttctaggatagcgctccccttacccccgtcacttctgggggtcactgggatgcctcttgcagggtcttgctttctttgacctcttctctcctcccctacacccaccaagaggaatggctgccagagccccgatcaccccttccgggttcactccccgcctcccccagtcagccgtcctagcccccaacccgccccgagcagggtctcttctaaaggggacttgagggcctgagccggaaagactggccctttagcttttaccccttgtccccgtagcctataccgtttagaatatttatttgttaattttatttaaatgcctttta

SEQ ID NO: 498237 - DNA, 352 bp, Homo sapiens
gtgttggggagacacagaggcagacacaggagcaggatagggttggatgggtgcaaagaaacctcaggggcggggtaacaatcccagatcttgccactgcatggttcatgtgactctgaatgagtccctgacatttcagagcatttttcccaattgagtaggagctcctgccctgcctgaggctggaagctcttggtcccctgtgacgaccttggatgaagacagacccttgtgaggacagaacctggaagacagctgaaccggggccggtgctgaggccattcacctggctcctgtctccaaggcccaacagactcacaggcagacagctgcacatcacagggatggacag

SEQ ID NO: 498238 - DNA, 104 bp, Homo sapiens
cataagaaccagtagcgaaatcggacattggatcgctacaaatgttatgtttgacgatcatctgacatcagagaaaattccctgagcatttgtgtttatctctt

SEQ ID NO: 498239 - DNA, 143 bp, Homo sapiens
aagctcggtcccatgctagcaggaactgctatatatgtgtgcatatatatatatatgtctgtgtgtgtgtattgatccattcaatgtcaatatttttggaacccagacaattttctcattttctagtgaatggggcccaaatt

SEQ ID NO: 498240 - DNA, 557 bp, Homo sapiens
ctgaagtattgtaagattggtgccatgctactggacagtgtacaggtccaatgatattcatagttacccagggttccaaacttttccctcatgtcatatgatttgcagagaaggaagatgaagcttgtttatttgtaagcttcagtaacctacaaccgaagaaaggacaaggtttatatttaagacattgtgccgcatagtgccattggatagggaagaacttcagaattgtggtatctggccttgctagtgctcccgaaggtgtctcccatatgtaaccagcatctaggggctaaagatgcaaaggaaagcagcatgattgtctgtacaaatgtgcagcgaaaaggaatatgtttcgagtgtcagatcttcgagttgcttaagtgatttcttttttcttgatattttcttaatttctatatgtatagtgtaatagccttttgttaactaattttcttttttccttttagtaattaagcacgatcatgtccctttttaagccttacctgagaggaacaatgccttaaaataaaaaagcattaatgagaaaaaaaaaa

SEQ ID NO: 498241 - DNA, 494 bp, Homo sapiens
attatggccggggagcttagggtttttaggaatttaggaagctgccgcagtaattggagtctaaggactcgtgacaatcttcgggtgcccttcgagataaattgggaagatgccactgtactatgctgttcagtttcactatacgtctcatctctcttaccctcagtaccacacaatactaacccttcccctactctgatgtattacatcacctccgatgagatgaagtgttttcttcactggtatgccaattggtcagagtcacagcgcgaacgtttcctagaggacctggtagctaaggcagtgccagaccaaccaccttttatctttgagtgccagctacatctttgggatcagtggtttctaggctgggctgaacagggacccaatgaatttgtcagacagctggagttcaaagagccagaatttgcggcaaagttttaccaagcaatggctgctccagcttggtaggactgataagcattcaagcgagg

SEQ ID NO: 498242 - DNA, 172 bp, Homo sapiens
  misc_feature (123)..(123): n is a, c, g, or t
aaagtcgatgtaactgcaggttgcacagtaggtacaggtggaatcatggatatgacgccagccaatcttactctagagtctttatcttaactgccatgttgtactccagttccagcctgaatngtgctttcttgcctttgctcttgcttttctcttggccctctcccaacca

SEQ ID NO: 498243 - DNA, 734 bp, Homo sapiens
gctctctctctctctctctctctctctctctctctctctctctctctctctccagagtgtcgcgcgcgcgcccccgacatcgtgtgtgtgccaggtgcccctggggcgtgggaagaagagacgccgggcgaggacgccgaggacgaccgctgctcgcgagacgactgcccgtcgtcgctgcatcccgcgctgctgcggctgaggcacgcgcggcgcggctggtcatcagtcgacgccgtgtcatcaccttcggggaacgttgtcgtgctgctctgttgctagtatcttctccctcttatcttatctaatcactagtagctagatgctagcgaggcgtgcgctcgttgctcgctgatagctaacagagccgccctctgtccgtagagaagatagctggctaagttcgcaagcgtgcgttgagtgatcgatcccaactccctaattccgtccttttgtcgctacactagattcgtttcgtttagacaagagatgaagctgatgcgtttgcttttccgatctggcgaaccaatctatactatcatattctatcccgccaagctcggatagagagaaaagcgtggcgctgcgttagttccatagattagaatcgctaatccaagcgatgagcggagggaatgcttagccaggatagaagaggcgcggagcgaatgcttggtttagttaaagtttgttcgagcgaacgacaatcgaatttgagttagtcggttctttag

SEQ ID NO: 498244 - DNA, 242 bp, Homo sapiens
gctcgactgactccaggtaggcgacggtctgggcgaaaggcctctggtcgctccattacgtcccgagttctagtcaattgcttgtcgatcagccatttaggcgacgaattgaaagtccagagagaactaaatcaatcgtataaacagattgatttaaggcattttttacgctttttatcgatatctatttaatagatgatcactgccatcaaccaccggttaccgtcctgccccggctcctg

SEQ ID NO: 498245 - DNA, 138 bp, Homo sapiens
attcaacaatcctcacacaggcaattgtaatgaaggattgaagaatgttactgcaggtgctaatccaatggaccttaagcgtggtatcgacaaggctgtagctaaggttgttgatcatattaacggcttctgcagaag

SEQ ID NO: 498246 - DNA, 966 bp, Homo sapiens
ggctgtggtgcatgcgtgtacgcattagcctcttgctacgctaacgcctcccgatctctcagtgctggcctcccggcggaccgtctcccgttataaccgaagaacatgctcgttctctgtaagtgctagcagttctgtattggcgagatatttgaagttcatgtggtaaaacttgacaatgcacgtctgtgattatgcagaccatgtgtggggtggactccgggaagtggatgcatggacggagatccagtgacccacgtctcctcgtaccacacatgtgaggtgcgacaaatacttaaaatcaggtcatttcaggtggtgcacccaccacaaggatgaccctccttcctccctgaagatgatgagaacaaagaaaagcgaacagatgatatccctgttgtgggaccaagaattcctgaaatgttgaccaaggaacactttggaactcagttctggctgcaagactacgttagacatcaacagggttgcttgggtgtgacatgcaagactgtttgccaatatgaatcaaggggaaaacctcctgaggagattcgccaagaccttcaagtatcaaagagtgacttttactgaagaggaggaccccaggttacgccaaagaaggaaccagtggtgtgacgagaaggtgaacctgtagtgcctgcactgttaccctgtaggattgtccacatactagtgccctgctccgtcatctgttattcgaccaccgtgacacagcagcagcagtccttgtttaccgaattgtctcctgctgtgtgttgggcccactcccaacctaggcagttcctctcgttggggggcggtctttttggctggaacagacggcgtcctaaggggttggctcccttttggagagtggctttgccccttgcgctagtgtggtacccgcagtgcggccactttctctggggcgcaatggaatttccgagtgccgctatccgcggcgaa

SEQ ID NO: 498247 - DNA, 132 bp, Homo sapiens
tgctgttttggtcactatccagactctattccaccaatccaatgccacaccaccaaatggtggcaccaacatgctccctatatgtaacactagaacgatacccccgagtggtacctgagctcgcaattctgt

SEQ ID NO: 498248 - DNA, 308 bp, Homo sapiens
  misc_feature (64)..(64): n is a, c, g, or t
  misc_feature (219)..(219): n is a, c, g, or t
ttaaaggcttctcctttaatgtgtgtttttttaaggagccgggggaaaaacaagggaaacaaanttttcttctcttggagaatttttgttctcgcggccccaccccccacaccaaaaccccgcgcgggggaaaaattatattttgtagggcggggggggatataaaggaaaagaaaacacacaaattatttgttgtgcggccccccccccccccccttntgaggggaaggaagcctgttgccctttattaaatattataatacccccgcgggggggggggggggggttttttttttttttgggggggg

SEQ ID NO: 498249 - DNA, 83 bp, Homo sapiens
  misc_feature (39)..(39): n is a, c, g, or t
  misc_feature (57)..(57): n is a, c, g, or t
gcgcctttttctggtttccgaacccttgccggttaaccnggataccctggttcccgncctttttttcccttttggggaaaggg

SEQ ID NO: 498250 - DNA, 391 bp, Homo sapiens
  misc_feature (7)..(7): n is a, c, g, or t
  misc_feature (10)..(10): n is a, c, g, or t
  misc_feature (91)..(91): n is a, c, g, or t
  misc_feature (328)..(328): n is a, c, g, or t
  misc_feature (330)..(330): n is a, c, g, or t
  misc_feature (380)..(380): n is a, c, g, or t
  misc_feature (387)..(387): n is a, c, g, or t
aaatcanggnactagatccttaatcacatacaatatgtggaaagaggttagatttgggagactttgcttgaaggtccgtgtcggatccttngtgtgcacggccagagtattgcctccgttgatgttcatggcgcaagagccacagatgccttctctacaagatcttcggaaggttaaagtagaatccacttcattcttgatcttgattaaagcatccaacaccataggtccgcacttattcagatccacctcgtacgtctgcattcgaggtttatctccagtcttgtctgggtcccatcggtaaatggcaaattttttgattctgggnantgcagcagcagctgtctgtgcccctcgacaggcctgaaactgcaggccgnacatctncgag

SEQ ID NO: 498251 - DNA, 145 bp, Homo sapiens
tttgggttttggggggggaaatcccccttggggccacccccccttttttgggggggggggatccccggcccttggggttcccctttttttttttgggggggggttttttttgggtttgcttttaaaaaaggttaaagtttgggga

SEQ ID NO: 498252 - DNA, 191 bp, Homo sapiens
gcctttaccaccaatcccagccggctaaaagaatcaaaaccttctatgctctagctccgtgccacgtgaagtatacaaaaagccttataaacaaacttagattggatcctcaatccctcttcaagtttatatttggtgacaaaatattatacccacacaacttcttagatcaatttcttgctactgaagtg

SEQ ID NO: 498253 - DNA, 527 bp, Homo sapiens
  misc_feature (45)..(45): n is a, c, g, or t
  misc_feature (222)..(222): n is a, c, g, or t
  misc_feature (224)..(224): n is a, c, g, or t
  misc_feature (236)..(236): n is a, c, g, or t
  misc_feature (254)..(254): n is a, c, g, or t
  misc_feature (260)..(260): n is a, c, g, or t
  misc_feature (282)..(282): n is a, c, g, or t
  misc_feature (284)..(284): n is a, c, g, or t
  misc_feature (286)..(286): n is a, c, g, or t
  misc_feature (304)..(304): n is a, c, g, or t
  misc_feature (331)..(331): n is a, c, g, or t
  misc_feature (340)..(340): n is a, c, g, or t
  misc_feature (344)..(344): n is a, c, g, or t
cccgtgtctcatcccccttcatcgctcaggggtgtagacaccctntctccatcgctcaggggtgtagataccctctctccatcgctcaggggtgtagacaccctctctccatcgctcaggggtgtggacaccctctctccatcgctcaggggtgtagacaccctcccttcatcgctcaggggtgtggacaccctctctatcgttcggggtgtagacatcctntntccatcgctcangggtgtagacaccccctntccatngctcaggggtgtagacaccctntntncatcgctcaggggtgcanacaccccatctccatcacttagggggnggaaacctntctntatcactcagcaggtgtagataccctctctccatcgctcaggggtgcagacaccccatctccatcacttagggggtggaaacctttttttatcgctcaacaagtgtaggcacccccctccatcgctcaggggtgtagacaccctctctccatcactcaggggtgcagacaccccatctccatc

SEQ ID NO: 498254 - DNA, 268 bp, Homo sapiens
aatagaagaccatagaagaacacaactccatataatagaacgaaacgggatcaaacaagcccactaggaatcacctcccattccgatcaaatcaccttccacccttaatcacacaatccaacagcacgccctcggattcatatctcttccttctctccttcaatgccattaacactatactccacagcactcctcggcgcaccagacaattataccctcgccacacccttaaacacccctccccacatcaagcccgaatgctatttcc

SEQ ID NO: 498255 - DNA, 898 bp, Homo sapiens
  misc_feature (178)..(178): n is a, c, g, or t
  misc_feature (254)..(254): n is a, c, g, or t
  misc_feature (277)..(277): n is a, c, g, or t
  misc_feature (322)..(322): n is a, c, g, or t
  misc_feature (324)..(324): n is a, c, g, or t
  misc_feature (330)..(330): n is a, c, g, or t
  misc_feature (409)..(409): n is a, c, g, or t
  misc_feature (413)..(414): n is a, c, g, or t
  misc_feature (455)..(455): n is a, c, g, or t
gcggcccgccgagccccgccacctccctcgggctgcagctcccggcgtgccccgcactctccgctgcccacaccgtcgcgcctctctctccaggcacagagcgaagcgagcgcgcgagcacagcgaggcacaggctcgagtacaggaatgatgaagcatcaaagttaatgatatgaangtaaggaatctctacacaagaggagatcaaaagagaaagaagcagtctctctgtaagcgagacaaaagacaaatantgagaggaagcaaagcagatctnggtgggtgacattggtgatactgtagaggacccctacacattttngngaagtngctacctctgaatgatggccgatatgcttgtacgatgccaatagaaacaaaagagtctaagaaagaagacctagtattnatannctgggctcctgaaagtgcacctttaaaaagcaagatgattnatgctagctctaaagatgccattaaaaagaaatttaccaggtattaaacatgagtggcaagtacatggtgtggatgatattaaggaccgtcgacaacttggagagaaatgtgcgaggcaatgtagtagtttcacttgaaggaaaccattataaaatgacagtcaagtgccaccggaccaaaggagcatacaaaatacagcacagacatgaatagaataggataggataaagcagaagcccctatcacaggccaaccaaaaagaatgcagaatataaaataaaagccacagagaggcaaaatgggatcagaactaaaaaaacaagaagtccgaaataagcacactgataatcacagaaaaaaaaagaacacgaaaaacaaaagaaggagcaaaacggcacaaaaaagacaaaacgaacaaacgacaaagaaacacaaaagaagt

SEQ ID NO: 498256 - DNA, 294 bp, Homo sapiens
tgatcctgccattaaggctatgtgcagtctgccctcctgctccagtggccttgattttaggccaggaatcttctgctccatgtggcttaagccttccagctgagtgaagctaggcaaatggagtgggggcatgcatatataattgcccatatcatgctccacacccatcagtcaacactcatttgacatatcgagttcatttgcctatgagccatttctgttaccatcatatgctcatattgagtgatctgtttatacccctagctcttcatttatgaatcttgtctattttta

SEQ ID NO: 498257 - DNA, 350 bp, Homo sapiens
  misc_feature (82)..(82): n is a, c, g, or t
ctgctgtactgcagcagtctcattgcagagctgctgggaatacagcatgaagtgacaggagaaggatgtgtctactccagancatcttgaatacatattctccagaaaaggaagagttccctttgctttaggagttgcagactctgcctcaacttgtgatgaacccaaagcccacaccagcttccaaatctccctaagtgtcagttacacagggagccgctctgcctccaacatggcgatcgttgatgtgacgcatgtctctggcttcattcccctgaagccaacagtgaaaatgcttgaaagatctaaccatgtgagccggacagaagtcagcagcaaccatgtcttga

SEQ ID NO: 498258 - DNA, 188 bp, Homo sapiens
ttttgtattttttggagaatgaaatgttccccatcataggggattcttaagcacgtctccacgtatgcggcgtgctagctggatgtctttgggctataatggtaacacgttgggcttggatagcacacaggtgggtgtcttcaaaaaggccaaccagataggcctcacttgcctccggcaaatgtggg

SEQ ID NO: 498259 - DNA, 680 bp, Homo sapiens
gctggcgtcgcctggcctatatggtactgttcgagcgcattcgcaggatgtacccggggcccatgggtcctagccgtctgatgggagctgctctccttgtggactgatgcctagtactacgttcgtcgtcgaccgctactctggtccctggatatgtctgtgagaatgagccccatatccaactagcattacattatgtccgcggatatttgggtcgcctgtggtcctcaagtcctcagcggatcctcaagtcctagacggaacacgccgggtcgtgaaaggagacaatgacagaattgaatccattggacagtcaggtgctagcagagacgcggtccactgtgggtaccaggagcattaccaggaatcacgagcacccatccataggagacaccagacacatacagcagctcactgggaggacccagcatcagaacagatcagagagacaaccagacaaacaacaacacaagcgattgtgaagactagggactactggagagacggacgtacgcagatgcacccggaacgacactacacattgataacaaaagcacaagactcgagaccaataggaaaagacgaggccaggagagaagaaacgaccacatacaggtccaggacataaagcgacacgaagcaaagaaaaggctactaacgggttggaccacggaatctta

SEQ ID NO: 498260 - DNA, 162 bp, Homo sapiens
tcatcctaagacattgtcatagtccacaacttggtagggacttcagccagcacgctctttgccaggcagctggagatgcgtgtttgacgttcctgaagggcacgaactggacgatgtctcgaagaacaggctctcccttgggtgacctcagaatcccatgaa

SEQ ID NO: 498261 - DNA, 415 bp, Homo sapiens
ccgaggctgcggcgtgcgccaccacaatgagctaattttttcttttttttcctttgtagagacaggattttgccgtgttgctcaggctgatctcaagcgcctaggctcaagcaatcctcctgtcctcagtctcccaaagtgctgggattacaggcattatccaccacactagaacaagaaattagagtagggactctgccagggatcgtagctcatgcctgtaatcctagcactttgggaagccaaagcagaaggataacttcaggccgggagtttgagaccagtctgggctacatagcaaaaccccatctctacgacaaatttaaaaatcagctgggcatgatggtacatgcctattgtcctagctactcaggagactgaagtgggacgaccgcttgggcccaggaggttgagg

SEQ ID NO: 498262 - DNA, 307 bp, Homo sapiens
cctggtttgttgtcacttttcatctcctctttgctttctgagaacacttaaacgtttcttgcaggtccattttattctacttgaatgaccgtttactttctggttgccacatgtttttctttcttttctgctcatccattatactgctgtgcccttactgtgattgattttccaaactaaattaccttgagcagcagtttagcataatatgccttcagtggcattctacaacattgagtttccctctagcacagttctgtctagcaagtgcgtgtgagatgtgtgtgtatatgctgtgtattgtgta

SEQ ID NO: 498263 - DNA, 415 bp, Homo sapiens
  misc_feature (320)..(320): n is a, c, g, or t
aaaagacactccacccagggcctgggctcagggtctctggggagcaatccctgacttgggggctgggtggcccctcacagtctcaaaagagaaagggtgaccccttggtctccaggaaggagaagaagcagcattgtagccagtaggggcttctgagcaggctctctggggctgatccccaaggatggggctctggcatccgatgccccaaagcggtcaaaagcttcttctcccccagtgctgatcttgctgggccttagctttggagggtaggtgagggagaggaaggaaagggtggctgaatggggagggcaggaagngaggggcggggggtgggtgggtggggggcgcggatcggcagcagtgcgttggggccctcgtgtgtaattgtgaataaatgtagttgtcttggaaa

SEQ ID NO: 498264 - DNA, 305 bp, Homo sapiens
gcttggtggtaccctgccccgcctctaaaggcaacggataattggcagccacgtgtggaagatgacttggatgccatctaacactttatacaaaaatcaactcaagagggatcaaagacttaagtctaagaccttataccataaagttgtagaagataacatcagataaacacttctagacgttggtttgggcagagttcatgaccaaggacccaaaatcacctgaaataaataaataaataaataaataaataaataaataaatatataaaacctaattaaaataaaaagcttctgctctgttt

SEQ ID NO: 498265 - DNA, 299 bp, Homo sapiens
  misc_feature (148)..(148): n is a, c, g, or t
  misc_feature (154)..(154): n is a, c, g, or t
  misc_feature (191)..(191): n is a, c, g, or t
  misc_feature (210)..(210): n is a, c, g, or t
  misc_feature (231)..(231): n is a, c, g, or t
  misc_feature (234)..(234): n is a, c, g, or t
  misc_feature (245)..(246): n is a, c, g, or t
  misc_feature (252)..(252): n is a, c, g, or t
  misc_feature (261)..(262): n is a, c, g, or t
  misc_feature (286)..(286): n is a, c, g, or t
  misc_feature (291)..(291): n is a, c, g, or t
ccccttttttttaaggggggccttttcattttcatttttttttggggccccccctttatgtatgtagtccttggggggaaaatgaaccccccttttttatgggaaaactttgggttaaaagggacccttttgaaggtttttaactggngaaacnagcctggaataatgcccccaaagattgagtggaaatngccccttttgaaggggccntttttatgagccaaaagtttntcntttaaaagttnnttttgngggaaaaanntgtaaaataattttaaataaaggnatagnacccttta

SEQ ID NO: 498266 - DNA, 700 bp, Homo sapiens
tcatgatgcatttacaggcgcagcatagcggcccacagcaacgctgcactgtgggtgtccgcactgggcatcaggtctgtccagttatatccagtttcatcatgggaagcagacgagttgaacccacaggtctgagactgtccaaggctggaccgcagacacgaacgtgatcaccgacaagaacaggacgcggcgaactggtgacagacgacgatcccgacacggccgcgagcgctaggccgcggaaaggccaggagagaccgagccacgggccaacaggaactggacgagagagccagagagagaacggggcagcgaatgggcaaggaaggcacaacagacaaagagaccacaacatgcacgagaaggacaaggcacaacgagggcgagagatgagaagaacagacgagaactccgcaggccacgcacagacccagcgacagagacacactcagcaaccacaaaagatatagaactatccacactctatattagcaaaatacagagcacccccatccttcaatcaaagacaattctcgagcgagctaaagacacgctagagcgcatacatggacaagtaagaaatactccgcaatcttaaacacgtacatataaatttctccacgtatcaaaggccttaaagtctaacgaaagatgtcatcagaaactaccaggtacacagagccaaaaaactaagggt

SEQ ID NO: 498267 - DNA, 642 bp, Homo sapiens
  misc_feature (129)..(129): n is a, c, g, or t
gtcatatatagattttcaataaaagcagaaactttcttaccttaaaaaaaaaaaaaaaaaaaaaaaaaaaaaaaaaaaaaaaaaaaaaaaaaagaaaaaaaaaaaaagaaaaaaaaaaaaaagcgtggngggcggactgggcccagacgcctctagcccggcgttttttgggggggggggcctttgccggcggccgttggcctttcgcccttggggcgcggtttccattcccctgtccggggtttgcgccgttggttttggccaaccctgggggtttcccacctggggcgccttggggcgctttcccttttagccagctggcttaagggggagggggccctcgcggggggccctttccagatggtgctgcggaaagagtggccattggaaattggaattttttattttttggccaaattccgggaaaatttttggtaaaacagataactccacacaccttgggccgaacgcgggaaacccctttataaaggaaccctttttacccgggtgggggttccgggttgggcgggatgggaaccggttttcggggtcaaggggcgtgtgcttcccccccccgcgtccccccggggtccgggggccgggaggagtcccccaacccctaaggggggccccgataaggcc

SEQ ID NO: 498268 - DNA, 646 bp, Homo sapiens
actagttctagatcgcgagcggccgcccttatcatatttgctactcagtatcccttgtttcctctccgttaccattaggggccctgggggtatcatgtgcattgtccccagttatggtccccgtggatctagactgttgtagattgtaactagcatgtaaagaaacatgattatgcaaggaaaaaataggctaaaataaaaaaaatagataaacgcaaagtaaatactataagatattacataggatatataatatagtaaagaaattggtttaaggtgctaatctataggcacaatagtgaatatgaatgaagagtaggtgctgcaagttaatcctacattgtgccagtgtatattagtaccatgtaaatgaatatgaataaatgaacatgaggattaacgaactgttgaaaataggctgagatactagttttctttcttattaaagagggggcatgatattaaagatagttttaagtaacaaattacttattacaaagttacaacatgtggaatcaatagttaatttgttcattaagtttattcattcagcaaacatttgttgaacatttaatgtgtaccagatattgcaggatcaggaaataaagaactaaaaatggacatacagactggaattgctaagtaa

SEQ ID NO: 498269 - DNA, 326 bp, Homo sapiens
caaaagcttgaattttattgttactgtgcttacaggatattgacaagtgcagacagcagctttatgatattactgtaccgttagaagtttttgaatatatagatcaaggtcgaaatccccagctcttacaccaaagagtgcctggtagagggctcttagcttaaaaatgagcaagttaaaggcaagatcgacaccatgatggaaatttataagcctgtttgattcaaggaactttctaaagtatttcccggaagacataggctaagttatcgaatgcatccccgtggggaggatcacccgccttcttaacccagctcaccctccct

SEQ ID NO: 498270 - DNA, 913 bp, Homo sapiens
ggaagcaggaaccgactctcaccatccccactcccacctccatgaattccatcggacagttgtgcgaaagcgggctggctttcgcacaaccattggtggactgtctgtcctgtaagccccccaggggctgatgccctcccagtctgcctgccctgttcttagcacagcccctggcaccccgtgtgatctcaggaaacacttgctaaacatggtatcggaggagaaacggagcccacagcttagtgcaaagacctggcggcgtggactgaggctgcagaaacgcagaaacgcgcttttcctgccagaaggggacatctgcgtggtcgggagtacctctggggcacgtgccctaattccagaaacatctaagctggagcgcagtggcactgtaatagcttactgcaaccttgaactcctggcttcaagtgatcctcccgtctgggcctcccaaagcactgggatgacaggtatgagctaccgctctcagccacaactgggttttaagagcactcctccagcccactccagtgtcttccatcattctgtgaaagcaccaaaagaggaccaagcccaggaagccgccagcaggcctctcaccagccaagatggctggaatcctaatatcaagaaatgaaactccagcaggccatggaaatgctaaggggttggcatttctgctctagagagagccaaagagaaagctctatttatatctccttgcgtttggtcgcagcctcatcaaccaaaagaaccttccgccccactcaacacatcaatcaaattggggagggggtgtgaacagcagcagcgggtgttacagaggagtctcaagggtatcttagagggtgcctctctgaacagtcgtcccctccaaatcccccccaagagaattactaggacattctccttcccc

SEQ ID NO: 498271 - DNA, 288 bp, Homo sapiens
  misc_feature (231)..(231): n is a, c, g, or t
tccccggtgctgatgtggtagatggaggtgagtgagcaagatcacgcactgcctccagtctgggtgacagagtgagatctgcctcaaaaaaaaaaaaaaggaaaaaaaaaaacaaaggcaatctagtggcagaaacactctgctatactgactcttctactgtgcatattgtttttcacctgtattgtataatcacatcatgaacaatcttgatattagacatttcttgtntaacatttaattttttaattttatgtaattttttgtttaagagacaaggtcttgtta

SEQ ID NO: 498272 - DNA, 443 bp, Homo sapiens
ggtcgcagccatcatatcccctccccaaatgctcaaactaaatctgcacatacgtctgtattaggatttggtacatgttatttagtgtgcagaggtatatacaatgcatatatactgtacgtgtctagttaggacatgcgtattggttcatacttccaaagttatttcagtacttcagtggtcgcaccgtcatgatctattgcaacacgaatgaaagcgctgtcgactccgcagcgccggccggtccccagccatcacccgcgccgtcccgatggcgccgctcgcgttgctcctttctcggcgccaggatctctccccaggaaccagcgcagattcggaggccacgctgcgctgcgctgcgctgcgctgcgctgtcaggacgcgcagttcccgccccgctgaagggacaccgttttacaacacgccgcgtagaccgtgacagg

SEQ ID NO: 498273 - DNA, 563 bp, Homo sapiens
tctgacgacccttggcagtatgttgatctgacagagctgggtgcccatcgtgcctcaaaacttactttccgtgagccctctaatcctatagaggttggacaactagcacccatgagccaaatctggctcaaggtctgttttcttttcttttctttttgagacagagtctcactctgtcgccaggctggagtgcagtggagcgatgtcggcccactgcaacctccatctcccaggttcaagcaattctcgtgactcagcctcccaaggtgctgggattacaggtgtaagccacagcgcccaggccttttttttttttccttccttccttttttttttggagacggggcctcttgttgtcccccgggtgggttaaagtggattgatctcggacctcatggtaccctcgtgcctcccagattcaggtagatctctgtgcctcagcgggcaccctttgcgtgttgagtagctggacacccgacgctgggcccccatacccagctatttggttttgggttttttacaagaggctttatatatggggggacggcacccagtcacttcat

SEQ ID NO: 498274 - DNA, 263 bp, Homo sapiens
gttgagggaggagaattgcttgaacctgggaggtggagtttgcagtgagctgagatcgcaccattgcattccagcctgggcgacaaaatgagaccccatctcaaaaaaataaagaaaaaaaaaagggattaagaagacccaagacccagggaagccagaggtgtaactttcagtcaaaggccaaaggtttgagagccccaggaggctgctggcgcaagtcccagagtccaaagcctgaaggacctggagtaactaggcattca

SEQ ID NO: 498275 - DNA, 1038 bp, Homo sapiens
cgctgagctgaacggtgaagctcactggcatggtcttccggatgtcccattgccaacgtgtcagtggtggacctgaactgccgtcatagaaataaccctgcacaatatatgatgacatcaatgaaggtggtgaatgctaggcagtcggagggccccctcaagggcatcctgggtctatcacatgagcaatccagtggtggtctcctcatgagccgttcaatcagcgacacactcactcactcgcaccttcgatagctggggctggcagttgccctcaacgacaccatctttgctctaaagctcagttgtcctggtatgacaagcgtaattaaggctattccagccaaccaagggctgtgtggacctcatggtccatgatgggctccaaggaggtaagacccctgtgaccacctagaccccagtgagagcacaagaggaatgagagagaccctcactgctggaggatgtccctgcacattcaaggtcccccagcacactgaatctcctgcttcctcacatgatttccatgtagactccccttgaagaggggtgaggggcctagggagccgcaccttgtcatgtaccatcaataaatgtaccctgtgctccaagcgaacataaagagattttcacactgtcagatctaatctaacctacggggtcgcgatgtcactgcaacctcgggggcgctctgtgtccgacgaattttatggcaaggttggcctgaaggacgtccccggaaaataggtggcaggcgcgccgcaacaaccagccgtcagcaggaggaaacaggcggcagcggagctctcaggtgccggacccctcgggggtggacatgccgggccacggactccagcagatgaaccctcaacggggaagtacatcaggggaacggcacaaacaggataaggggagtaacaggaccacgagatacacgaactgagcggagtataaccgcaaataacaaacaaaaaggcaagatacgggacgcaacacaggaagcgaagaaaagccacacaaagcaacaaccacaacaaa

SEQ ID NO: 498276 - DNA, 643 bp, Homo sapiens
  misc_feature (5)..(5): n is a, c, g, or t
ttcgntgaacgacaatactatatgtttaaggggttttatagtatgaaatattatgggcatgttgcctcagtggcattgtaggagacagctacctgctttacctaggaataatagtttgcatgtcacatttagagatacagctcaaaatgcaaatccttcccgagagcgcgaaagcattaacaaatgagagtgggacaggcattaacaaagcattaacacaggtctttacatattgaaaatattaaactaaggctaggattatagacttgattttaagacatggtagttaatagaaaagttctagattgaaatcaattttgcagaaatatacatttcgatatgtggatatatgtatgcgtatatatatatctactaggaaaatatatcgcttaaggtgccagtgccatttcttagttaccaattttacattctgcattcacagcatttgccatcccatctttacacttaaagccaccatattactcttaagtactttatacacattttcagtcatgatctaaataatcatttatagccacaaactaatactgtgtagtgaatgaagcactttcatcagcaaaaattgcagattttttggacatgatcctgggaatagttcagtttttacaattagtgattgacg

SEQ ID NO: 498277 - DNA, 164 bp, Homo sapiens
tggttgcacaccctgcaggaagttgtagcggaggcgctggtgggcctggcaggcaacgtgggaccctatggctccggagacagtgcacccctcaatgaggcgatggctgtgctccagcatcacgacgccagtcagcgtgcacctctctgccagtcttgctcgag

SEQ ID NO: 498278 - DNA, 430 bp, Homo sapiens
  misc_feature (15)..(15): n is a, c, g, or t
  misc_feature (21)..(21): n is a, c, g, or t
  misc_feature (185)..(185): n is a, c, g, or t
tggggaccatgcacnttgtcncagaaacacagtaagcctacttgacagacaaagagcaacgtaataatgctatagtttaaaaacaccctccctggtcatctagtgttgaggaaaaacattaagtaaaataaaaataaaaatatggggccaggcgcagtggctcatgcctgcaatcccagcacttngggaggccaaggtgagtggatcacctggggtcgggagtttgagaccagactggccagcaggatgaaaccctgtctctactaaatatacaaaaattggccaggcatggtggcaggcaccagtggtctcagttacttgggaggctgaggcaggagaattgctggaacctgggaggcggaggttgcagtgagccgggatcgcgccattgcacttcagcccggggccgacaacagcgagactccatctc

SEQ ID NO: 498279 - DNA, 182 bp, Homo sapiens
  misc_feature (50)..(50): n is a, c, g, or t
  misc_feature (155)..(155): n is a, c, g, or t
gctccaggggctgctgctgttgctgctgctgagcatgggcggggcatggncatccagggagccgcttcggccatggtgccaccccatcattgccatcctggctgtggagaaggagggctgccccgtttgcatcaccgtcaacaccaccatctttnccggctactgccccaccatgatgcgcg

SEQ ID NO: 498280 - DNA, 176 bp, Homo sapiens
ccgtacccgctgccaacatcatcagtggctctagactggtcgatgtcccacttgactttctggcacttgatacctcctaaaggtagcagctctccgtgttcttcagttattgggggatcctagctagaggctgacctttttcctctttgctcctaccatgccattgggccagcggg

SEQ ID NO: 498281 - DNA, 176 bp, Homo sapiens
tgcacacgccgagtgaccacaccatgttcccaatgactgactgctgtttcagtttatttacgacttcctcagggaaagccttccacacttccctgacggatgactttcccctgttgtgtgtgctcatagcaccatttacctacttcgtatacttgtatggagtttcggcgtgtgca

SEQ ID NO: 498282 - DNA, 1144 bp, Homo sapiens
  misc_feature (228)..(228): n is a, c, g, or t
  misc_feature (236)..(236): n is a, c, g, or t
  misc_feature (240)..(240): n is a, c, g, or t
  misc_feature (242)..(242): n is a, c, g, or t
  misc_feature (244)..(245): n is a, c, g, or t
  misc_feature (263)..(263): n is a, c, g, or t
  misc_feature (271)..(271): n is a, c, g, or t
  misc_feature (280)..(281): n is a, c, g, or t
  misc_feature (289)..(289): n is a, c, g, or t
  misc_feature (307)..(307): n is a, c, g, or t
  misc_feature (311)..(311): n is a, c, g, or t
  misc_feature (323)..(323): n is a, c, g, or t
  misc_feature (326)..(326): n is a, c, g, or t
  misc_feature (329)..(329): n is a, c, g, or t
  misc_feature (336)..(336): n is a, c, g, or t
  misc_feature (358)..(359): n is a, c, g, or t
  misc_feature (366)..(366): n is a, c, g, or t
  misc_feature (372)..(372): n is a, c, g, or t
  misc_feature (374)..(374): n is a, c, g, or t
  misc_feature (378)..(378): n is a, c, g, or t
  misc_feature (380)..(380): n is a, c, g, or t
  misc_feature (390)..(390): n is a, c, g, or t
  misc_feature (392)..(392): n is a, c, g, or t
  misc_feature (396)..(397): n is a, c, g, or t
  misc_feature (402)..(403): n is a, c, g, or t
  misc_feature (405)..(406): n is a, c, g, or t
  misc_feature (408)..(408): n is a, c, g, or t
  misc_feature (432)..(432): n is a, c, g, or t
  misc_feature (442)..(442): n is a, c, g, or t
  misc_feature (450)..(450): n is a, c, g, or t
  misc_feature (453)..(453): n is a, c, g, or t
  misc_feature (465)..(465): n is a, c, g, or t
  misc_feature (468)..(468): n is a, c, g, or t
  misc_feature (477)..(477): n is a, c, g, or t
  misc_feature (486)..(486): n is a, c, g, or t
  misc_feature (587)..(587): n is a, c, g, or t
cgcggtccggtctgccttgggctgccgaacatgacaaggcgtggtgccacatgcatctcagaagccgacgcagctcgacgcagggccggcaggatgggtgggcgatcgcgtgtcggagggcgccgcgcgggcaggcgggcgggcgccagagggggaaagaggctgggggcggcggggttcatgccgtcgtggccgtggccgggccgtgggaatgtcgatgcctgacgngatgccgntgcncngnntcggggaggagctgaagnatgccaangagatcganngacgccgnagaagtactccttcatgnccancgtcaccaaggngcncangaagcanatccagtttgctgatgacatgnnaggagtncaccanantccncnaccaaaactngngcgnngatcnntnncncgcgtcgatctcacagtcctccantgacagctanagttcagntgnatcctacacagntangctctgatnatgaggttnctccccgagagaagcagcaaaccaactccaagggcagcagcaatttctgtgtgaagaacatcaagcaggcagaatttggacgccgggagattgagattgcngagcaagacatgtctgctctgatttcactcaggaaacgtgctcagggggagaagcccttggctggtgctaaaatagtgggctgtacacacatcagcccagacagcggtgttgattgagacactctgtgccctgggggctcagtgccgctggtctgcttgtaacatctactcaactcagaatgaagtagctgcagcactggctgagggctggagttgcaagtgttcgcttggaagggcgagtcagaagatgacttctggtggtgtattgacccgctgtgtgaacatggatgggtggcaggccaacatgatcctggatgatgggggagaactttaacccactggggtttataagaaagtatccaaacgtgttttaagaagatccgagggcattgtggaagaagaaccgtgactggtgttcacagggctgtatcagttctcccagaggctggggaagctctgtgttccgggcattgaacgtccatgattcttgtaccaacagaagtttgataacttgttctggctgcgagaatccattttggatggcgctgaaaggaccc

SEQ ID NO: 498283 - DNA, 835 bp, Homo sapiens
  misc_feature (376)..(376): n is a, c, g, or t
  misc_feature (481)..(481): n is a, c, g, or t
  misc_feature (518)..(518): n is a, c, g, or t
  misc_feature (573)..(573): n is a, c, g, or t
  misc_feature (579)..(579): n is a, c, g, or t
  misc_feature (630)..(631): n is a, c, g, or t
  misc_feature (633)..(633): n is a, c, g, or t
  misc_feature (640)..(640): n is a, c, g, or t
  misc_feature (658)..(658): n is a, c, g, or t
  misc_feature (681)..(681): n is a, c, g, or t
  misc_feature (691)..(691): n is a, c, g, or t
  misc_feature (696)..(696): n is a, c, g, or t
  misc_feature (702)..(702): n is a, c, g, or t
gccagtatgaatataccttcaaagcagcaacacaggttccccatgagaaaaagcaaacacagggaaaataaaaacacaaaggttcaatctcttctgacctttgaaagacacagcacagacagtggtccttaggacgaagcgcaggagacccctaattccgtcaccatggcgatagggcataaacattgctgggtgagggcacaatccacattgtgaggtccaactgctgccaggaagacaggagtgcttttacatagaccgaaaggtcattgaaggctcagagttttgtttcaagaactgaatcccaagcccacacgttattaggctgcacttcttaaaacaagttatgagatgggaaaaagggcacccacaaacntacgtatacattatgtatataataatatacagtatcatatatataatatatataacctatgtataatattgttttacatcctgcatcttatgttatatatattgnataaaatataataattgataatatataagttttatanttatacaatatgacatatagtatatattataatttatgacatatataatatatgntatatntcatatatagaatatattatacggttaatatacgtattaaatatatatacnntntatatantatatataatatatctgntatatataatacccatatgcatnatatatatantatgnctatgntatatatagtataaaacaacatataataatatataattgtatatataaaatgcgacatataatatatattatattttataacatatgaaatatatattatatattatatataatacgggtaccgagctcaggt

SEQ ID NO: 498284 - DNA, 559 bp, Homo sapiens
  misc_feature (13)..(13): n is a, c, g, or t
catgtgctgtacncaccggttactgggatagacttgcagtaactccgccctgacccaccttcccgatatagtccctgatggggcgggcctcctgatcgcccttggcttgcttctcgtggcccctgttaagcccacctgaaaaagccatcccagctcagtagcttttcctgggataactgtgatgaagtggaatgtgaccctgctggtgatcagaatcctgactctggagcctgacccctttcgtcgttcctggggaatgtgaccctcaggtgtcgtgggcagcaccagtgtccccctgagttctcctctgaaggtggatttacgttttcggagaaggaggtggctgggctctgtgatcaatgatcccattgcacagactacattggcagctgtacctttgaacacttctgtgatgtgcttgacatgttaattcctactgggcgagccctgaccagagacacctgggtacctagtggggcttccttgcgcactgtaccgttcaaagaatgtgaacctacatcactgagccaagagcggaattcgttgtgcctgacctgga

SEQ ID NO: 498285 - DNA, 1100 bp, Homo sapiens
gctgccaactctcgcactctgttgcttccgccgctccgacgggcgtgtctctctgccggtgcgcgatggaagaagcagatcgccgcggctggtcattgatcgatggctccggcatgtgtgaaagctggtttggctgtgggagcgagcgctccccgagctcgtgtttccttccatcgtcgggcgccccagatgatccaggggcgtcatggtggggcatgggccacgaaggactcctacgtgagcagacaaggcccagagcaagcgtggcatcctgaccctgaagttaccccattgagcatggttatcgttcaagcgaatcgtgggtacgacgtggtcagtaagatctggcaaccacaccgtatctacaacgagctgcgcgtggacccggaggagcagccagtgctgcgtgaccgagggccccctgaagcccaatgccaacgagagagaagatgacttcagattatagtctgagaccttctagacacgccgtgcatgtactgtggcctatgcatggccgttgcgtgtccctcatacgccttgtgggcggcgagcactggcaattgtcgatgtgactctggagaccggggtcaccctaactatggtgcgcctattctacgaaggctactgcccttccgcgccagtcgcatccatgcggtcatggaccgtggctggagcgaggaccatgaagggactacctcgatgaatgatcctccaatgagcgacggctacgaggttcgacgaccacggtcggagcggggaaatcgtgcgcgacatcggaggagcaagctggtgctacagtcgtccttgtgacttcgagacaggagatgggcaacgtgcgcatccgtcctctttctctggagaagagctaacgagcttgtccggatggcagggtcgatcaagcattggcaattgaaccggtcccggttgtccggaaggcgcctgttcccagccttccttcctggggtatggaaatcttgcgcggttccatgagaacaaccttcaattccatgcttggagttgtgccggtgaccttccggaaagaccttgaagccacaccggtgcttgtcggggggcacaccaaggttcccggatggtgaagc

SEQ ID NO: 498286 - DNA, 742 bp, Homo sapiens
  misc_feature (170)..(170): n is a, c, g, or t
gtgcctataatgccatattacttggttagattgaggcaggaaagtctgtcgagcccgtgaggtggcccttgcaaatgagtgctggattgctccactgcgtttcgacctgggtgaaagtgaatagtctgatcgtgaaaaacatataggggcacaaagatctatttatatancaagattactttcggtcacggttatgaggtgttatggtgcttgaattctagcaatattggaaaaggaacgtcgtttgcctgtaatatgcctttttcgagggaagttatctggtttagtgaagtatgtaggatatattaaagccttcgtagcagcttcaagcatagttttgcaggtatttttgtgttcatggcctgtgtagctcaggattgagatatggaagttacaatcagagagtataatcatgtagtttcgataatcaagcagaatagttggtcgaagtcgttgtgcttgggtgcttatgagatgatggaatgaagcataatgagatgattatcgtgaagctgtggcgggtgtgcttttcggaaaaactgaatttaagttgatgaattgctctcgtgaatctttgatattaaggttagagctggtgccaatgttttgtgactggcaaaagtgtgaacccatattggtgttgaataaaccttcaggttggagagacgtcagatttgtttgtagaatgcttagacgatcaaatcagaatggaatttctgtattctaagaattaattaagata

SEQ ID NO: 498287 - DNA, 261 bp, Homo sapiens
  misc_feature (34)..(34): n is a, c, g, or t
  misc_feature (92)..(92): n is a, c, g, or t
  misc_feature (126)..(126): n is a, c, g, or t
  misc_feature (137)..(137): n is a, c, g, or t
  misc_feature (141)..(141): n is a, c, g, or t
  misc_feature (178)..(178): n is a, c, g, or t
  misc_feature (188)..(188): n is a, c, g, or t
  misc_feature (197)..(198): n is a, c, g, or t
  misc_feature (204)..(206): n is a, c, g, or t
  misc_feature (208)..(208): n is a, c, g, or t
  misc_feature (212)..(212): n is a, c, g, or t
  misc_feature (227)..(227): n is a, c, g, or t
  misc_feature (236)..(237): n is a, c, g, or t
gggggtgaacacacaccctaacccaggttttctnacccgctttttaagatggccaattcttcttctcccccccacccaaagacatgtgagcnactgctaatgaaaagcagtaaacagccgcttagntattgcagttntcanctccactctgaggtgaagattccaattacattcgaanacttaagctnctttcaatnncccccnnncncacntccctgactccagtntttaccatnntccggcactagccgatcggtgtct

SEQ ID NO: 498288 - DNA, 151 bp, Homo sapiens
atctcatcagcacatcctcttggtgagagctaatgcagtccattaatgtcacctcaggataacctcgcttacaatgggcagtgagagtcccagaagggtcgcagcgtagaacagtaccacatctgtacacgcacgggtctttagctgccac

SEQ ID NO: 498289 - DNA, 1030 bp, Homo sapiens
agcggagctctgtcgccgctggagcagctgcggctcggtgacccatagacacatgccggggtcgggagcctgcccggggcagggctcgggagagcgggcccacaccatggaggctcccagtggcatccagagtgccccagctgcgtgcctctggtcgccgtgtggttgctacgagtaggtaatgtgagctctaaggctagggatcgttgggcggaggcgcggtggccgatggccactgcgacggtggagttggttggagcggagagctaggtgctcgggtggcagaaggtaggcacgagccgggcaggcgggcatgacgaggtgagtggccccaggaaaagctggcacgcggcaccacatgtgaagggcgtcgaatcggagaacatgcggacacgcagggaccagacggcacgagaccttttggcaggggacagcgcacgccagcaggaagccacatgaagcccgcgaacgcggcaaccaaccagagcagcggggccagccccagcagcatgacactggttggttcaccttgtgccgggataggctccaacgactgggtggttgggacaccttgccatttaagcggcagtggcgcccaatcgggtcatagtaggtggtactacactgaaacagccacgcaggtgtagatggtctaccgcgcataaactttttcccccgtagtcaggtgccagaatttacagcgacgttcgagacgacagcccccatgtacatgcatgccgagtgggcacacacgtggatttgcggcagctggggacacctttcgggtagagagcgtacactatataccacacacatagtggttgaagttcgtgcccttttcgggaaacaaggccctattttttgaagtgtgacacatcatacttgtgttggacagtggtatggcgctcagcttaattcccccaagttggttgtggacagagagcatcgatgggtgcatggctacgaattgggtaactgcaattcatgaaagcaattgatggcgataacgatcgccagtactcaccactgg

SEQ ID NO: 498290 - DNA, 229 bp, Homo sapiens
  misc_feature (71)..(71): n is a, c, g, or t
ttttttccccccccccccattccccccaaatgcccattattaattaaccttctttttttggttggaacccngggcagttttgcttcccttcctaggatttgcgccctgcattgtagcttggttaacggagcacttttcctttttccaaaggtttacattttagggggtggggtgagtttttttgtaaaaagatgaacgcaatgccaataaaattgaacaagaacaatga

SEQ ID NO: 498291 - DNA, 140 bp, Homo sapiens
tttttttccatcacaaatagcactttttatttgccactatttgaagcctgaactttaaccagatgcttggactggtggttcatatccatcagctcgttcaacccagcacctgcccgtcccagtggcaaaaccagaactac

SEQ ID NO: 498292 - DNA, 1663 bp, Homo sapiens
  misc_feature (1320)..(1320): n is a, c, g, or t
taaactttaaacaaatttttattacacaaaggtgtgctcccattaatgtggattacttcctcatacttggtacacaatatatttctcactcctccacagaaaaggcgtgctataacttcttcattcgtgggtgggtggcaagcacataaaactccgtgattttaaaccagaaatagctagtaaaaagtgccctcaggtgatttcaagttgtgaaagccagttacccgtggatcacatgtggacctctggtgtacccgagatattcagagaagtgttcccaaatgtgttttttatattctcacaaaattcacaaaattaacatatactctgtgcgtgagcgccatgtggcacaaaatgtgacacacagtcagagtatagacacacatatatattatatcatttctgtgcggtccacactgtgcacacacgacagcgtaaactgtggagtggctataatgaggtgcgattctcaacgccgagccccttatttctcttctcaatttatgtctctcgcaaaagtagtgggacatctctctctgtgacacggatactcatagtggggtgacagagacacaccagacgtaggcctatgtgggcggcttattccctgtgtgtccgagcgaagggtactccactaatcacactcacacgagggtgtcacagaacgccacgttgagattcttaggcgggagatttagaaacacgtagaggcccaaacactttcgccacaatagacacgaaccgtgtaccccaaatattgccaagcagccacaatttgtgggcaaccccacaatttctcccaaggaggggtgtcccaaatctcgctccatgtgcatcgtataaggcggaacaaatttcatccgtgggtgcaagagtacacacaacaccgatatccagtgggcagtggctaaggtttatcaaccaagcaacgaaggggcccacaaactctcatggaccagggacatctcccgcaatcgtttcaagaagcgacgaaggttttcccatcccaacacaagcccccttcttgtgtgttcgggggctcaccagagaggaaacttcccacgtatattatgcccagcgcccaattatattttcccgaacaaagtatttcgtcccgaggaccgagtataggcgacttcactataatccccaaagttctttcttgtaggcggaccctcttgtgggacaatcaatgattgtctcgtacacaggtgttctcaaaacgaagtccgctgtcaaacgcacccgtggagccccgaaagtatccacaaacaattgcggagagaacgtcgaaccggcacttatcagaggataattccnccctgtgcgagggggcccaccaagagcatagaagcgagacaccccggagatatccttggttaccacagtgtgggccccatataggtgaaagccagaactatatagacaggccagggggcggggcgttaaaacagccgggcgcagtgggacaacccgcgcagcgagggacacatgtggcgacgacccaccactgcggggggcgcaaagtggcacacacacccgaggataagcagcggagcaatacgatacaggtgactcaggtgaacccgcacacggcggcacggtatggtaaccaacaacgacggactgaccatacctagacacgccaagcagccatacgaag

SEQ ID NO: 498293 - DNA, 195 bp, Homo sapiens
gaagaatcatataatactagccatttgttagctttgttctaataattttcaaattttttatttcactgccatgattttattcttcgttaaaccttgactatatttattgcataatacctcagattctattgtttcctccctgtgtaacctttcatcatgtgaacctgtgtgatttttctgcgtcacactatccga

SEQ ID NO: 498294 - DNA, 127 bp, Homo sapiens
tctgtgtctgagaaatttgtttcctgtatcatagctggagaatggggaaagaaatctgcagcaaaggggtctcactctgttgccaggctggtctcaaacttctggactcaagtgattgttccccgct

SEQ ID NO: 498295 - DNA, 320 bp, Homo sapiens
tggtgttctagaggatccctccataatgtgtgccaaatgaaaataaatcaggctgggtgtggtggtcacgcttgtattgcaacacttggggggccaaggagggccaatcacccgaagccaggagctcgagaccagcctggccaacacagcaaccccatctccaccaaaaaatacaaagattagccgggcgtggtggcaggtgcctgtaatctcagctacttgggaggcttaggcaggagaatcgcttgaacctgggaggtggagattgtactgggctgagatcgtgccactgtcctctagcctgggcacacattatggag

SEQ ID NO: 498296 - DNA, 200 bp, Homo sapiens
  misc_feature (20)..(20): n is a, c, g, or t
  misc_feature (28)..(28): n is a, c, g, or t
  misc_feature (30)..(30): n is a, c, g, or t
  misc_feature (71)..(71): n is a, c, g, or t
  misc_feature (165)..(165): n is a, c, g, or t
  misc_feature (175)..(175): n is a, c, g, or t
ggacaacagcaagcaccccntcctcctngnaatgcatggcctttccagaaacctttgccaaaggcactgtngaatctatcatgagggataaaatgcccaaaaagggaggaagatggtggttttcatggaggggaagaaacaccacaatcaaggaggaaagtaagncagagcagtncttggctggcaaggcccatagcacc

SEQ ID NO: 498297 - DNA, 155 bp, Homo sapiens
taccccgcaagacgggcagcccccgggcaaatttatacagagagtgcatcattctccaagccaaagtcaggtggaggcatgatggtggtgctagagaaacgctgggctggcttccagcatagaaagccaggctggagtgccggaatggcatcagc

SEQ ID NO: 498298 - DNA, 230 bp, Homo sapiens
gacggcaggcggaagccatactgcaccagggtttccttgcgcgagcggtcgccccggcacatggcgctgagctggccgatggtgacgtggctctcgtcgatgaacatcagcgcgtcgcccggcaggtagtcgatcagcgtgggcggcggctcgccgggcgctgcgcccgacagatggcgcgagtagttctcgatgcccttgcagaagcccagttcctgcagcatttccag

SEQ ID NO: 498299 - DNA, 515 bp, Homo sapiens
cccccccaaaaatttttatggaaactttttcttttaaacccctttttaaaaaaaaattccggttttttttttaaaggggggaaaacccccccccaataatgtcccattttcgggccaaaaaaaaaagggggccttttcaaaaaaaaaaaaaaaaaactcctccaaattctgtgtcttgggtataaaagccataaaacctttctttctgtaaaaaattttcccccccccacatgctgaatcctcttttttttttggcgctcttttaataacaaaaatcccccttaaattttcccacagaaaatacccctttatatctctctcgccgggggtttgctaaaaatatcctcccctctttctttgttatacccccccccctctcacataaacaaaacatacttctcttttatttatttagcgcaccacaaacactcgcgctaaacaacactaactttttttttttggaaaaaatctttttttaacaatcacaccaaataccgggcgttacataaagatcc

SEQ ID NO: 498300 - DNA, 245 bp, Homo sapiens
ttattcggttcttgctttgggggctgggtgagcctggactgtggtcccaaggatgtgggcagaggtttccctaccctttttcacccctccccacccctgtcagtttgctccccatcccccagcctggggccagaacagcctaccccaggacaggggtccctttagttgtttccctacccccctataccccctggcagagacagccatacccccccccccatatttaataaatgttttcccccaga

SEQ ID NO: 498301 - DNA, 413 bp, Homo sapiens
tcttcggactcattcgttggactggtgtacatgcagtccgtggacccgaagggttcggtgtagaggaaacagcagttggtaagaagatcggtgaggaggagatcgcagaagccagaggagaaaggtgagctgcgatggtcactcattgctgcatggcccgtgacccaggaggctggcgcaggtcaacatcaccctccaggagcagattgaggccattcacgagggcgaaggcctggtgccagaggatgacactaaagagaagagtcggccccaggaagcccaatgaaatcgctcaagagccaccgccaccatcttcagtcaccaacatcgccagctcggctccacccatcacttcagtgccccgaccagcgaggagagtgccacctccaggttcgcccccgagggaggggtac

SEQ ID NO: 498302 - DNA, 111 bp, Homo sapiens
aaatgacccagtctgtgcattcagggatataccaggtgttttctctctgctaagtaagggggtaccacacagggtcacagctgctcagctaactggcaggcttgctgagtg

SEQ ID NO: 498303 - DNA, 239 bp, Homo sapiens
  misc_feature (112)..(112): n is a, c, g, or t
aaaaaaaaaaagaggggggtggtccccccccccttttaaaaaaaaaaaagggggggtttttttgggccccccaaaaaaaaaaggggttttttttcaaaaaaaaccccccctntcaccgcggggggggcccacacccttggggaaactcttttgttttccagggaacccctttaaaaaataccccccgcccctttaaatttcccgatccaaatgggggaaagtccccaaaattgaaaaaa

SEQ ID NO: 498304 - DNA, 985 bp, Homo sapiens
aggcaggacacgccgtgaactcagtgcggatcctggaacgggcgagggaggcttgcaaggcatggcatgagcactgtggagctgtcaagattgccccagcccctgggacttacaaagatgcccgacccaggacctgcctcgctggatggtgaaggcgcaacttcccctctgttggagctggccatgggcgtgtgggaagggctggtattgaggcccaggacaatgcagaacagacaggacgttcacagagcaggtgccatgtccctcggggccttgggggctgctgaggcctgagaaaggtcactggaggcctggacggaagtgcagggttatctcagtacttgatttaaggctcctgcagggtgaaaagctgcccaacggcggaccgggtggaggaagtcagctgtgctgcttaaccgtggagtctccgtcccggatcctgctcaatcagctcttgaagggccttgtactccctgctgatttctcggaaacatttttgaaacacgcctatggagacgggccaccgttgagttcagaaggtccgtgcgcctcaacggccagatcacggacccgtacacccacaaaggggcaggagccatccccctaaggaggaaggagactggcagaatctgaacaggctcctggctcatctctctccggagcggtccatctcctctgtttgcagggtcggagccgtgatgatgagccttctgaagggctcaggttaaaaggtgccgccacgctgtggcgctctaccatccagaaaacatggtgccagtgtcaacaactaggaactgtcaaatgctggaagggacacgggacgatgcggcagatcggttagaaatcagtatcgccgcctacaaacgcaagcagaggcaagagactaacaaagcatagggaggagacacacgcactagtgtaggcacaaaacagcgaagctgaaacgcagcgacaaaacacggcagcgcgccaagcaccccaccgg

SEQ ID NO: 498305 - DNA, 509 bp, Homo sapiens
tgaggagtattacgatagtgtataatttccacatttaagaagtgggagcaaatgccctacccataacttatatttatattagtaatgcatataattaaattattagaatttagattattagaatcgatgattataatttagataatcaaattttggacacagtttgcttcttgttttatctttgcatttataggcattattagtattttgatgatttgttacatggtacgtcgatttagaacttgatattgtctccatagtcaggtcttcctgatgtccctaattgttgtcaatagcaatatcttatggcacccaggttaaaaattctgacgacctttctatgaataaacataattacccccaaaccctacatctaagcagttactaaggaccctggaattcctttatagtcagtcccgtccttttcattctcatggctgtgctgaaggttgggcgcctgccctctcatttggactatcatataacttcctaactggctttcccacttg

SEQ ID NO: 498306 - DNA, 145 bp, Homo sapiens
ttgcacgcttgaatgcctgtaagtctgaatctagaggtaaccactatcgctaagaaaaccctcaacagcgcatcaccccgtctaacactcccctagaagtcccactccttaaacacatccgttattactcgcatcaggtattatc

SEQ ID NO: 498307 - DNA, 200 bp, Homo sapiens
gttttattagcgagggtgcagccaaaaataaattaattaaagtaaaagttatttctgataaagtccaaattatccatgtttctgttctggatggtgggtgttttcttttctagctacttattcccgaggcatgtggaatttcctggaccagggatcaaacccgtgccagagcagtgacccaagcctttgcagtgacaatg

SEQ ID NO: 498308 - DNA, 299 bp, Homo sapiens
agagattattaaacagagtactaaccagatgcttttccctggcagtggaatgagaatgaatagcaggcgggagagactgccatgaggtacaccagtcagccagcggaattagctagccatgtggataggtgaggaaaaagattcatagttaggtcggggcagcaagaattagagggaaggtcggatttatgatagtgtccaaggttgaattctaaggtgaaatttggtggcagatttcatgtgtaaattgggaaggtagattgagtttttttaacatgggttttctaacatgtcaatag

SEQ ID NO: 498309 - DNA, 1002 bp, Homo sapiens
ggagagagagaactagtctcggagttattattatttttttttaggcaggtaaccatttttttaaataaaaacaggaaggagggtgcctacccaccccgtgcctgctactggctctgaagggcactcctcaatttccccaaaaaagaggacgcgtctctgaccctggtgatctatgacgggggttcaaacagaaagtgcctggggccctccttctaagtcttgtcaccaaaaaagggaaaaacgaaaagatcttctcagttacaaatcctggggaagggagactatacctggctcttgccctacgtgaaaggtcttccctacccgcaccaaaaaatacggaaggggctgtcctattccactggtgcccagtgtacgtggggaaggacgagtaactttggagatcctggagggccctaatacaccacaggtagccttcagatgatcatccaaaacctagcgcatgcgggaagtgccctgagaaacaaagtgatcccacccacgtatgcccctagagagtataggcccaaacaacgaccggacctatgtctactagacaacacttaacgcagacacagtgactttacgaaattctaggacagactagggaatacatagacaccttacaaccctcctacaggacacagtgtataaaccaccataaacacataatacaagtcacaaaaagaaaactcaccgaaaggtcaatcccccgcaacggagaaacgggcgccacagaaagtcaaacagggcaataggcgggacccccaacaaccacagaacaacgacaaccacccgcaacgcataaaggagcaacatatacaagaaccaccaacaagaccaaacgggtgttcacaacagatagagcaaagagagagcgaaaaacaacacacacacaacaaccacggtacaaaagaacgacaccacacaccacaaagaacccatatgcgacccgaaaggcacccaccacaaccccaaggatggatgaagaaacacacagcgaat

SEQ ID NO: 498310 - DNA, 754 bp, Homo sapiens
  misc_feature (132)..(132): n is a, c, g, or t
  misc_feature (426)..(426): n is a, c, g, or t
tggaaaggaatcccggcttctgtgtttctcccagcctgtggaatgtgcggggggtggtgactcctcggctctcgcttgcaggcctctccgcctctcctgtgggttcccaggcgatttcttgctgtgccccangcctctcccacaagtgtgggctgtggagcatttgtgcaggggcatgtgtgtgccggccatataccgtggccatacattttcttgtttttcttttattttgtggggcgttttcttaacggtggacaaccgggggttctcccgccatgtgtttgtgccccaggctgtggctctctcaaactctccggaccctttggtgttgactcttgcctgtgccctacagccctcccgatattcacgggctgttgacccacccgccccacaagccctatattttgtggtctctcctaaatgggnggggggagctcatttttctcttatatagatgagagttttatccagtaggattagagcctctacttgtggactagcgcggtggtgacacccacggggggtgacccccttgtttgaatttttagtgtttgtgcgcccatttatctctccaccccatcgttttcttccgcggagaagagattttttgttggacccattggacttttaatttaagcgggcgggggggagaaaaatcatctgcgcagagaaaaaatttttttctcccaggctggaggcgttttttttatcaagaagattccccttaggcggtttgtaaacgttgaacaattgt

SEQ ID NO: 498311 - DNA, 522 bp, Homo sapiens
tcgacagaggtccctggcaggtctctaccgtctctctattgcctcaggtggctttccttacttggatatatgggaagagtacatggcccagtagttggattatatattgttacctaggacctaaacacttccttttccttttttcatccaagtaaaatccgtaactcaagatgtaacaccttagtaagcctttctgactccggatgggaaaagcagtttctatcctacccacggccttatttcataagttaacttttaaaaaatgtctctccaggccaggcagggtgactcccaccggtagtcccagggattggggaggccgaggcaggaggatcccttgaggtcaggagttcaagaccagcctggacaacaaaacaagatcacttctctacaaaaaatattttaaaattagcagggtaggggggtggtgaccggtagtcccacctactcaggaggcggaggggggaggatggttggatcccaggaattggaggttacagggtgctatgatgtgaccactgc

SEQ ID NO: 498312 - DNA, 176 bp, Homo sapiens
cagtagaacttgtgttacatttggcgaaactgttgctctgggtgcttctggaatgtaatatggggaaccctcagtataatgcgaagtatgaaatcttgcttgctcctagacaattacatgggagactatactgaatcctttacataatcaacgtcacacctaacaacccaaaaggg

SEQ ID NO: 498313 - DNA, 460 bp, Homo sapiens
ttttttttttccccatttaaaaatatcttacaggggcataactttccctgcacaaattgggtttaagaaacaaaagggacaatttgctaatcaatgatgagcctttaatccaaccattatttatcccctttccatccttagatcccttgaagagaccatttagttaagactaccaacaggtgacaccctgacctccttaccaaccttgccttttagaggtgaccagaaacctgtgcttttccaaagtactgttatccgtgtaattagtataatatcaatgtggggaaactctaccttttggatttgaggactctgttttctttgaaccctctggttagagactgtatattaattgcaccttagaaccttggggcaaagagaaggacacatgttcctagccctttggttggtctccgggccattattgttccacctttcatcaaaatggcttttttttgaa

SEQ ID NO: 498314 - DNA, 467 bp, Homo sapiens
  misc_feature (62)..(62): n is a, c, g, or t
ctgtgaatgcagccttggcctcagccgcgaggccctcatcgccctccttgtggtgctggcgngcatcagtgccagctgcttctgtgccctcgtcatcgtggcaattggtgtcttgcgggccaagggtgaaacatgcccgagacaagtggacaacaggttggtggagaattttggggtccaggaagatctcatggacctgcacccggtttacgtggagtcccagctaatggacgctgacctggaggtctccctggtgccaccactagaggatcagagccttgtggccatccccatggaggcttcttcagaggagccgccaccacccccgcccctaccacctgagtagagggctgagggcagctgggggaggggaattaaagcgtatttagtggctgtgcactgtcctccctgcaggccctcctgagggcagctgggggaggggaattaaagcttgtttagtggtaaaa

SEQ ID NO: 498315 - DNA, 551 bp, Homo sapiens
  misc_feature (62)..(62): n is a, c, g, or t
  misc_feature (194)..(194): n is a, c, g, or t
ctgtgaatgcagccttggcctcagccgcgaggccctcatcgccctccttgtggtgctggcgngcatcagtgccagctgcttctgtgccctcgtcatcgtggcaattggtgtcttgcgggccaaggggaatggcgtttcctaggcgtgtgctgggggagctccgggggcccagcactgttccaggactcatgttngccttcgtcccctcagtgaaacatgcccgagacaagtggacaacaggttggtggagaattttggggtccaggaagatctcatggacctgcacccggtttacgtggagtcccagctaatggacgctgacctggaggtctccctggtgccaccactagaggatcagagccttgtggccatccccatggaggcttcttcagaggagccgccaccacccccgcccctaccacctgagtagagggctgagggcagctgggggaggggaattaaagcgtatttagtggctgtgcactgtcctccctgcaggccctcctgagggcagctgggggaggggaattaaagcttgtttagtggtaaaa

SEQ ID NO: 498316 - DNA, 479 bp, Homo sapiens
  misc_feature (122)..(122): n is a, c, g, or t
ccttggtcttgcaagaagggctttaccccctgggtgggctgtcacctggggtaggaatggcgtttcctaggcgtgtgctgggggagctccgggggcccagcactgttccaggactcatgttngccttcgtcccctcagtgaaacatgcccgagacaagtggacaacaggttggtggagaattttggggtccaggaagatctcatggacctgcacccggtttacgtggagtcccagctaatggacgctgacctggaggtctccctggtgccaccactagaggatcagagccttgtggccatccccatggaggcttcttcagaggagccgccaccacccccgcccctaccacctgagtagagggctgagggcagctgggggaggggaattaaagcgtatttagtggctgtgcactgtcctccctgcaggccctcctgagggcagctgggggaggggaattaaagcttgtttagtggtaaaa

SEQ ID NO: 498317 - DNA, 386 bp, Homo sapiens
agcttctttttgtttctacctggccaaagttagatgggacaaagatgaatggcatgtcccttctttgaagtccgtttgagcagaactacctggtccccgaaaaaaaatttaggcttccccatttaattattgagagctaagaatgtacccataagtggccaaggttccattcacatgctcatatgtttataaactgtgttttgtagaagaaaaagaatcataacaatacaaacacacattcattttttttttttttttttaccattttcaacctgtattggacagcactgccttttttgcttacttgctgcctgttcaaactgaggtggaatgcagtggttcccatgcttaacaaatcattaaaaccccctagaacactcctagga

SEQ ID NO: 498318 - DNA, 995 bp, Homo sapiens
cccagccatgtccgacgagagagaggtagccgaggcagcgacggggaagacgcctcttcgcgcgcctccgaaaaccgaggcagcgagacgacccccagcatcccgcggcctccgaaggggccgccgccgccgcacgacctcgccctgccactgctgctgctgcctagtgctcacctgtgcttttggagtgctactgacaatggtgaaagcctgcagagccggacacggatagctgcccccgtgaccccatgtgtgcccggaccagactgacgctgctgtcttgcgtgtgccatgctgggctcaactatcgcagacactcatggcctaggcatgggtgcatgttacagacgcgatcatctcctgcacttcttgcccttgtcaactacctgtggcatttgggatgtggctgcggggattgttagtagagtctgccaagtgtgagctgacgggatagtcaagcagaacactgcaaatgtgaatgtgaatgacacctggtgtgacttgggtgtctgaaagaacagtggtccaagggcattgttgtgaccagagaagatggttgtactggtgaccacatcaggataacagagaagcattaccatgaaataacaataggaggtgatcattgaagactatattgatgagaaacgctggcgttgtcgattgagatactgaggtacaattaagcatataccaagccataaaaatggaggcacatactaataagagaatatacgagtaataacataaaaatggcattgtagccacaagagggtatatggggagacaccaaatgttgatggaacaggaggagtagtagggaatattgggtgaccattgcacggtttggacggaaacagtggtgtaagttgtgacatgttcggaaagagctaggaagcaaagaatatgaggtctggatgagaatgggggtccaaatacatagcatatcaaaaatggtagtggtagaactaaaaaatccacttatagagggagctggg

SEQ ID NO: 498319 - DNA, 120 bp, Homo sapiens
atcgtgcagaaatcaccttatcgtgcagaatgattttggtctcatctagttcggcctgcactttagtcatgggatcagcttctcgtgggttctggtatctactgaggtgagaggtgatct

SEQ ID NO: 498320 - DNA, 665 bp, Homo sapiens
gggtatataagataaaatggtttatttaaccattcccttttaatgaacaatagtcatttagatttttaacttacccctgttgattatagtgctataataaacatccttatacatgccttcctgtgcatgtttttcagtatttctctaagataaattgattcccagaagtacacttgtagagtcaaaaagtcatgcatgttttggccaggcatggtggctcacgcccgtaatcccagcactttgggaggccgaggagggcagatcatctgaggtcaggagttcgagaaaagcctggctaaaccccatctctacaaaaaacacaaaaattagctggttgaggtggctggcacctgtggtcccagctactcgggaggctgaggcaggagaatcacttgaacccgggaggcggaggttgcagtgagccgagatcatgccactgcactccagcctgggagacagaaagagactgtatcttaaaaaaaaaaaaatttattttcagtacagccataaaaagcaagaaacagccaggcgtggttggcttatgcctgtaatcccagcacttgggaggccaaggcaggcagatcaccaaggtcaggagatcgagaccaccctggcaacatggtgaaagcccgtctctatttataatacaaaaattagccgggtgg

SEQ ID NO: 498321 - DNA, 119 bp, Homo sapiens
tcatttttggtcgtcactcggcgccatgtctgcccgggctggtctcaccacactcctgcgctccggtgatcccccacgcctcaggctcccacagtgctgggcttccaggtgtgagccct

SEQ ID NO: 498322 - DNA, 169 bp, Homo sapiens
gcggtgactctgaggatccctaagcggagcaggcagattatgcacctcctcgcctctcttcttccaacacaacatacccccagcaggcgtgaccgtccgcttactgatgctccgttactgatgctcgcttactgacgcttactgacgcttactgatgcccgcttactga

SEQ ID NO: 498323 - DNA, 771 bp, Homo sapiens
ccatgaacctggaggctggaaggttccattgccagtgccctgccctggcctgcgtctggaccaagcctgtgccgatgagaatgagcccctgccagcccaacccctgccatggtgtgcggtgcgccctgccgtgtgctgcccgagggtggtgctcagtgctgagtgccccctggggcgtgatgggcaccttctgccagacatgcctcgtgggcagtgacgtgctctgtggcccttcctggctgacttcaacggcttctcccacctggagctgagatggcctgcacacctttgcactgggacctgggggagaagatgcgctgctgtgatggtcgtgttccttggcacgaggccccagctgtgcctcctgctctacaacgggcagaagacgtgactggcaatgggtgtgacttctgttgtccgctggcactgcgggacctgccgcctggagttccgctacgacctggtgcaaggtgggcagcggtcatcaggatgcagggagccagtcaccctgggagcctggaccagggtctcactggagcgaaacggcgcaaggtgccctgcgtgttgggcgactgagccccgtgtgttgggggagtacccggtaccggcacaccgttcctcaacctgaaggagccgctctacgtaggggggcgctcccgacttcagcaaggctggccgtgctgtgccgtgtctacttggctcgacggtgccatacagtggactccttcgaggcgccaaatgatgcccggacagtacaagacatgcagaaca

SEQ ID NO: 498324 - DNA, 867 bp, Homo sapiens
  misc_feature (533)..(533): n is a, c, g, or t
tatcaccaacttttaataattaacatttgtgtttctcaatgctgacaaattttaaagccgatccataacagcaaaatatttttccccaaaccctatgtaaacatctctaaaatcttatttcttacagagccttattcgataatcatacctaagaaaactaacaataattatttaatatgtaattttcagtctttcctcatcacgtaaaatggcttcttaaccatggtttgtttgacttaagagccaacaagggttaccacttggttgctttatagtgtgcactttggctcgcatcgctcagaaatgtcaggcatgggaattgcacattacccgacaggtagagttgaaaatgaaatatgccatgaaatgacatatttgagaacttctcacagagtatgaacaatgatgtctgccttttgaagcagtaatctaagtactttttgtactttcacttctttcttccaaatatattcattatgttccaaatgtataaagaacctaaagtaggaggtcaacatcctgtgttagaacanttgcagacttgacacgtggagaagagggtgcatttttatatgaatttgagaaatactaacataaactaagcaataggaggaattttctgtatacagatatgtttggttttaaaatatttcccgaatttattttttaatttcgaagcactctaaatggatgacattcttctgagtcgacttataggttaaagtgctcggatagttaccctaaagattgtgaggtaaaacaaggggttggggttgttttaaacccttaacctgggcggaaaggtaaggggggcacggggagattttaaccacggggggccccggagaggggggagcaaaaaagggg

SEQ ID NO: 498325 - DNA, 87 bp, Homo sapiens
  misc_feature (4)..(4): n is a, c, g, or t
  misc_feature (33)..(33): n is a, c, g, or t
  misc_feature (47)..(47): n is a, c, g, or t
  misc_feature (52)..(52): n is a, c, g, or t
  misc_feature (63)..(65): n is a, c, g, or t
aaangcagacttctggttcaagatagctcactngaatacatgtttanctctntctttcctaannnattgaattgatagaagatgcga

SEQ ID NO: 498326 - DNA, 769 bp, Homo sapiens
ggcagtggtggaggaacttccggcagcggcagctcaagtggccaaggcaaccatgggtcaaagtcagagctggtggtcatggtcctggaggtggcaacgaaggatgacaaggtacaagaaaacagaaatatgaacctcctgtaccaactagagtggggaaaaagaagaagaaaacaaagggaccagatgctgccagcaaactgccactggtgacacctcacactcagtgccggttacaattactgacacgttagcagcgaattaacagactatcttctcactggaggcacagcaattcattagcaacatcaggaacaaactgaaaccattacgcacacgacaaagccacgaggaggaaagcatcaacaagtggcatgactctgagggggaccccgatgtcagtaggaaccttggaagagattatagatgacaatcatgccaatcgtgtctacatctgtgggctcagaacactacgtcagcattcttaccatacgctagacaaggatctgctggaacctggactgctcggacctgctcaaccaccaggtgcatgccgtgatacgggtgctgatggatgacacggatcccctgggtcacaggtgcatgaccggtagaaaagtgccccaaggagaacctatgcagcatatggcgggaactggcacaacccaaattaagaacataaacgaaattggaagaatccctctcacccataccgtaatatactgaatacatatgtataaggcacctaaaggagtcaaaactaagatca

SEQ ID NO: 498327 - DNA, 105 bp, Homo sapiens
cgtattcctgaggaggcacaggaagatgaatgaggaagaaggtgtacagacgcgatgaagaaggtgaaggggatgatggttatgaacaaattttccagctgatga

SEQ ID NO: 498328 - DNA, 1011 bp, Homo sapiens
tttatgaactgtcccatcacaagacatacagtggtctagcaactacattatgaactgtgccatcacaagacatacagttggcttcttgtgatgggacagcataatgtatgcagaatagttgctgacagatgtgacagaatgtggagtggggagggtagaggaaacgcgactacgagatactaaatgatctcaaaaggtaaaataccctcaccaccaacaggggacaagacatggccaacaaagcatccagctaacaggacaacacaagacactagcaactaacaacagaaacaacaaaacacaaacgggcacgcaacacaacaaaaaaaatacaaccaacccaaaaacgaccacaacaccaaaacaacacaacccacaaacacaagaacgacaaaccaaagcgcgcacacaccactacagacaaccgaagaacacacaactaacaaacaagggcccaaaccgcatcacacaaccctaccaaacacagcaaaacacaacggaacacacaagaaaaaatctagcacacgacgcaacacaacacacaacagcaagagaagcaaaaaaacatagcaaccaaacaacacacacaaaaaacaacacgacaacaacaggaaaacaaaaaacaacatacagaacgagcataaaagcgaaaaaacacaacaccgacacaaatcactgaccaccagaccaagacccaaccaaacaacaaaaggcacgaaagcagaaaaataaagacagcggagaaggagcaaaaaaagacagaaaagaacaaccaagaagcagagaagcaaccaaggcagccaaacgaccaacagagaaatcagagagaagaacacaagagagacagaaggagacacaccacaaccgacgaagaaccgagacaaacgcatgaagagccacagaacgagatcaacgcagagcagaggcgaaacaaagcgagagaaacaagacaatagcggaaccgaacagagacagaaccaacgcagcagccgaaaagacgcagaacagaca

SEQ ID NO: 498329 - DNA, 703 bp, Homo sapiens
  misc_feature (498)..(498): n is a, c, g, or t
  misc_feature (520)..(520): n is a, c, g, or t
  misc_feature (529)..(529): n is a, c, g, or t
  misc_feature (538)..(538): n is a, c, g, or t
gagagaaaggaaatctagtggaacaggaaagagagttacaccttgtgggtgtgagtttgggacctgttggcagaagggaatgtcactccctggaaacaggttcagcatgtttgcacttgttattttgtagctttaatgatttttgttttctaatagggcaaatctctctaagcttggtgtttagagctgcttcatattttgaactagaactgtggcaatggaactagtttaaaatatgaagcagctctaaactagttccattccacagttctagttcaaaccagtttttacagcctcctgggtgggtcgtcttgacccaaactcttgtgttgttacattttgagaggttttcataccagaatgtaccaaaaagtgcacaaggtaaaggtaatttacagccagaaacaaatatacatttgtttcatttcttgactttccctaagcagataagcagaaacttgttaactcattactttgtttgatgtgtcttacatattnttgactaaaagttatagaagtnattctcggnggaatcttntacagtggagaatggggatgcagttatgccccagatttaaaactgcatccccattaaccctgttggcccgggtggaatgaaagccaccccttttttatggtgaaaaaacatttttttttccccctttttctgcacaattccttgaaaataaacctttttttccct

SEQ ID NO: 498330 - DNA, 680 bp, Homo sapiens
  misc_feature (162)..(162): n is a, c, g, or t
tcttgtgggcatttctgaatgcccagcatccctattcttgcactttggggtggttttaagtaaataggggtgacttgaacccagacactggaataccatgacagttgtctgataagcagattgcttcaagtgtctgagggatggaaagtgtctacagcatgnagacgctggacaaaggggagattcaatgtcctggttgggactgagctgtaccatgtgagattttatcatgctactcagagcagtgcacaatttagaattatgagttgtttacttctggaattttccatttaatatttttgactgtggttgactgtgtgattaactgaaactgcagaaagtgaaaccgtggataaggagggtgggtatactatacttagttctttaaaaaaatgctggccggatgcggtggctcacgcctgtaatcccagcactttgggaggccgaggcgggcggatcatgaggtcagcagatcgagaccatcgtgtctaacatggtgaaaccccgtctctactaaaaatacaaaaaaattagccaggcgtggtggcgggcgcttgtagtcccagctactcgggaggctgaggcaggagaatggcgtgaacccaggaggcgcagcttgcagtgagccaagattgtgccactgcactccagcctgggcgacagagcgagactccgtctca

SEQ ID NO: 498331 - DNA, 220 bp, Homo sapiens
agagacaagatgtacaagtagaagagacgagatgctggtggcaggccattgaggacagcttaatggttgtatcaactataaagagctcgtccgcgatggtgctgaaatggctgatggaccttcccagctctccccaggagtccgctgcctttcccttgtgtgcaatttttgtatcttcgcctagacctttcccatacggctttcttgttctctagcaatc

SEQ ID NO: 498332 - DNA, 483 bp, Homo sapiens
  misc_feature (149)..(149): n is a, c, g, or t
  misc_feature (151)..(151): n is a, c, g, or t
  misc_feature (154)..(154): n is a, c, g, or t
  misc_feature (173)..(173): n is a, c, g, or t
  misc_feature (177)..(177): n is a, c, g, or t
  misc_feature (183)..(184): n is a, c, g, or t
  misc_feature (186)..(188): n is a, c, g, or t
  misc_feature (193)..(193): n is a, c, g, or t
  misc_feature (197)..(197): n is a, c, g, or t
  misc_feature (199)..(199): n is a, c, g, or t
  misc_feature (208)..(209): n is a, c, g, or t
  misc_feature (216)..(216): n is a, c, g, or t
  misc_feature (221)..(222): n is a, c, g, or t
  misc_feature (226)..(226): n is a, c, g, or t
  misc_feature (228)..(229): n is a, c, g, or t
  misc_feature (231)..(231): n is a, c, g, or t
  misc_feature (234)..(234): n is a, c, g, or t
  misc_feature (236)..(236): n is a, c, g, or t
  misc_feature (239)..(239): n is a, c, g, or t
  misc_feature (243)..(243): n is a, c, g, or t
  misc_feature (254)..(254): n is a, c, g, or t
  misc_feature (272)..(272): n is a, c, g, or t
  misc_feature (289)..(289): n is a, c, g, or t
  misc_feature (293)..(293): n is a, c, g, or t
  misc_feature (299)..(299): n is a, c, g, or t
  misc_feature (302)..(302): n is a, c, g, or t
caggtagatttctaaactattataccaaaagcatgatccactcagggtaaaaaacaaaaaaacaaaaaaacactggatatcataaaaattaagaacttctgctcttcaaaagacattattaagacaagaaggccagacacagtggctcncnccngtaatcccagcactttggnaggncgaggnngnnngatcncgangncaggagttnnagaccancctgnncaananngngananccnatcnctacaaaaatncaaaaaattagccaggcntggtggtgcacctgtantccnagctantcnggaggctgaggcaggagaatcacttgagcccgagaggcagaagttgcagtgagccgagaatgtgccattgcactacagcctgggcgacagagggagactcagtctcaaaacaaaacaaaacaaaaagtagatgggcaaatctaccgtgggcaaatctaccgtgggcaaatctaccgtgggc

SEQ ID NO: 498333 - DNA, 680 bp, Homo sapiens
  misc_feature (84)..(84): n is a, c, g, or t
  misc_feature (139)..(139): n is a, c, g, or t
  misc_feature (238)..(238): n is a, c, g, or t
  misc_feature (311)..(311): n is a, c, g, or t
  misc_feature (313)..(313): n is a, c, g, or t
  misc_feature (337)..(338): n is a, c, g, or t
  misc_feature (341)..(341): n is a, c, g, or t
  misc_feature (352)..(352): n is a, c, g, or t
  misc_feature (355)..(355): n is a, c, g, or t
  misc_feature (362)..(362): n is a, c, g, or t
  misc_feature (364)..(364): n is a, c, g, or t
  misc_feature (370)..(370): n is a, c, g, or t
  misc_feature (377)..(377): n is a, c, g, or t
  misc_feature (380)..(380): n is a, c, g, or t
  misc_feature (387)..(387): n is a, c, g, or t
  misc_feature (389)..(390): n is a, c, g, or t
  misc_feature (409)..(409): n is a, c, g, or t
  misc_feature (412)..(414): n is a, c, g, or t
  misc_feature (417)..(418): n is a, c, g, or t
  misc_feature (429)..(429): n is a, c, g, or t
  misc_feature (446)..(447): n is a, c, g, or t
  misc_feature (451)..(451): n is a, c, g, or t
  misc_feature (459)..(460): n is a, c, g, or t
  misc_feature (464)..(464): n is a, c, g, or t
  misc_feature (466)..(467): n is a, c, g, or t
  misc_feature (470)..(471): n is a, c, g, or t
  misc_feature (473)..(474): n is a, c, g, or t
  misc_feature (478)..(478): n is a, c, g, or t
  misc_feature (483)..(483): n is a, c, g, or t
  misc_feature (485)..(486): n is a, c, g, or t
  misc_feature (488)..(488): n is a, c, g, or t
  misc_feature (490)..(490): n is a, c, g, or t
  misc_feature (499)..(499): n is a, c, g, or t
  misc_feature (511)..(511): n is a, c, g, or t
  misc_feature (514)..(514): n is a, c, g, or t
  misc_feature (516)..(516): n is a, c, g, or t
  misc_feature (520)..(521): n is a, c, g, or t
  misc_feature (528)..(528): n is a, c, g, or t
  misc_feature (531)..(532): n is a, c, g, or t
  misc_feature (554)..(554): n is a, c, g, or t
  misc_feature (564)..(564): n is a, c, g, or t
  misc_feature (568)..(569): n is a, c, g, or t
  misc_feature (582)..(582): n is a, c, g, or t
  misc_feature (588)..(590): n is a, c, g, or t
  misc_feature (594)..(594): n is a, c, g, or t
  misc_feature (607)..(607): n is a, c, g, or t
  misc_feature (680)..(680): n is a, c, g, or t
aagatctatagacccaggaaggtctctgggtgggatatagccaagatgatactccccctacttctggctcttctatttggggcngtttctgctcttcatctaaggtctgagacttccacctttgagacccctttgggtnctaagacgctgcctgaggatgaggagacaccagagcaggagatggaggagaccccttgcagggagctggaggaagaggaggagtggggctctggaagtnaagatgcctccaagaaagatggggctgttgagtctatctcagtgccagatatggtggacaaaaaccttacgtntnctgaggaagaggacacagttaaannggngggcatccctnggngccacancncccccnaccgccnggngagaagncnncacaccgggaggcaaccgnggnnnacnngccccagggcnacaccggcaaccgcggnnccanccacaacnncaanannggnntnncganaaacngnnancnaacacacanaaaaaacccganacnanccgnnccgccanccnnaaaaccataccctacatcaacnacatttaacncccnnctaccaacaacancccaannncacntatcccatcatanaaacaaatcctaaacacctcctatatcactccaaatctcttaaacccccccattatccactacccaaaaatcn

SEQ ID NO: 498334 - DNA, 320 bp, Homo sapiens
  misc_feature (106)..(106): n is a, c, g, or t
  misc_feature (108)..(108): n is a, c, g, or t
  misc_feature (111)..(111): n is a, c, g, or t
  misc_feature (130)..(130): n is a, c, g, or t
  misc_feature (134)..(134): n is a, c, g, or t
  misc_feature (140)..(141): n is a, c, g, or t
  misc_feature (143)..(145): n is a, c, g, or t
  misc_feature (150)..(150): n is a, c, g, or t
  misc_feature (154)..(154): n is a, c, g, or t
  misc_feature (156)..(156): n is a, c, g, or t
  misc_feature (165)..(166): n is a, c, g, or t
  misc_feature (173)..(173): n is a, c, g, or t
  misc_feature (178)..(179): n is a, c, g, or t
  misc_feature (183)..(183): n is a, c, g, or t
  misc_feature (185)..(186): n is a, c, g, or t
  misc_feature (188)..(188): n is a, c, g, or t
  misc_feature (191)..(191): n is a, c, g, or t
  misc_feature (193)..(193): n is a, c, g, or t
  misc_feature (196)..(196): n is a, c, g, or t
  misc_feature (200)..(200): n is a, c, g, or t
  misc_feature (211)..(211): n is a, c, g, or t
  misc_feature (229)..(229): n is a, c, g, or t
  misc_feature (246)..(246): n is a, c, g, or t
  misc_feature (250)..(250): n is a, c, g, or t
  misc_feature (256)..(256): n is a, c, g, or t
  misc_feature (259)..(259): n is a, c, g, or t
atattattggccccatgacattcagtgacagtgtgggagcaggctactctccagggacatgtatttggaggcatatggagaagcggggccatggcgaggtggctcncnccngtaatcccagcactttggnaggncgaggnngnnngatcncgangncaggagttnnagaccancctgnncaananngngananccnatcnctacaaaaatncaaaaaattagccaggcntggtggtgcacctgtantccnagctantcnggaggctgaggtgggcaaatctaccgtgggcaaatctaccgtgggcaaatctaccgtgggc

SEQ ID NO: 498335 - DNA, 1144 bp, Homo sapiens
  misc_feature (361)..(361): n is a, c, g, or t
  misc_feature (436)..(436): n is a, c, g, or t
  misc_feature (465)..(465): n is a, c, g, or t
  misc_feature (549)..(549): n is a, c, g, or t
  misc_feature (556)..(556): n is a, c, g, or t
  misc_feature (558)..(558): n is a, c, g, or t
  misc_feature (561)..(561): n is a, c, g, or t
  misc_feature (578)..(579): n is a, c, g, or t
  misc_feature (678)..(678): n is a, c, g, or t
  misc_feature (730)..(730): n is a, c, g, or t
  misc_feature (750)..(750): n is a, c, g, or t
  misc_feature (837)..(837): n is a, c, g, or t
ggcaagtcgctgctcggaacactgcgaggccgcgtctctgtgccgtgggatggggtgtgctgggcgcggttcccaactgaaggctattgtaaggccctaccaccttgaaagctagaaacgacgcatgacgaggagtaagaagatagatgcatcactgctcgagaaagcctgtgtctgatacacagcattcgggacactctattgcaatctaccagccgctaagattactaccaatgagactgcagtaaggtatacgctcgtagagccaccagcgacgaagagtagtacatgtgtcgtacaggatttagcttatatttggcgctcgatcactacggcgcgcgggtggactagtccgatcagngttgccatcgatgacaccgaggctcgtggccgacatctgcaatcctggagcaatagaccagtaggtttgcttcanagaggtaaggcgctcgttggaatgagacnatcgtgatggccctaagtgatgtgactgaggtttgggctaaggagtccgggggtccgtcagagcgtgtgccattgagacacccncctgacnantcntatgccttgctttagcnntaggaagcctggttgggcaaccctgtggaccatagcaggcacttggcttggacctgggacaaacgaggtccaaaaggtgtaccgaacgcgtgtagatcnttgggcgtggacgctcagatcttatacaccaggtcgttcgtaggatagcacnaggtctgaccctgttcaccntgtgcaaacgggtaggccctatgggcaagcccattggcggcgacttttgctgtcgcccaagctagcgaggaagccattcgttgcaanagaccccgatagtgcacagaatggccgctaggagtaggacacaggctgtggctttgggcagttgcccctttgcccccaggtgcacctcgatccgatttggcatagacagcccagggctacaagaggtggaatagcctcccgtgtccctggtgttttgacctatgattgggatcattcacattgaatctgatcgatgttccgtgggacccacgaggagcgtactgtcaacgagatgcgtgacaggaccgagctgcgtccattctgcaggggcaaactctaaccgacaaaggcttcctcaaccgggacc

SEQ ID NO: 498336 - DNA, 431 bp, Homo sapiens
ggcgtggggaggagagatacaggctccacactcacactctctgtgcagttgatcgttttcttaaaccaaattagccggggctttcgttactatggtgcagccggggcttgcagaatcccagtaatagcatttattaggtctatttgcctggaagcatgccttcccggatctgataatgcaccagtgcagggagagtgtgggagatgctatcaagcatttgattacacttgcaacagggatttttaaggggtggggtgcggggtgaggggtgagaggaaaagaaaggagggaaacaaaccgctctcccgaggagctcaccagggccggccggcgcgtgcgttgccgcatccccgcgtgggttccacaaaaggcggcccccggtctccgggtcacggtttggggattctccttccgggtcctggcggagggcg

SEQ ID NO: 498337 - DNA, 187 bp, Homo sapiens
tttcaagggttctgcatctcgtttattagcacagaaataacaggtttagagtatattacaaaaagagctcaaactgttcagatacagcaactgggcttactaggggacagatttttttttacgtcagactactgttttggggggcggggactcctcatcctaaacaaagtgttaaggttcatagaca

SEQ ID NO: 498338 - DNA, 751 bp, Homo sapiens
agcggttaagactcatgtctatgactttcactctaagactggcaaaaggacacgcagtcttctatgttgatgtcaatattcactttcaggtagaagataatcttatctaatttttgagaccagaataagccttttaaggtaaacctcaaaattatcatctcatggtaatactgaccattttagtcccctacgtttgacatggcagatagtgactacactggtgtctgactttgtgtcctaggagatttctccctgagaaaatacaagggctgttggtgagagcagacttgaggtgatgatagttggacctctggtctacaagagatttcataactccttggaaagcttcttataagtcattcttaacttcttggtagctagaaatttagacgtagttgaaatctttaggcacatgaacttctgagggccacatagatatgtgactcgacgggacacaagttcttaaactgattaactagctgctaatatagtttggtcgaatttattgccactgatgttcgtaccttgtggtatatctgtccctattaaataagtgctgttttgctcctctttaatattgctgtgaacagtggtgcccattgtagcactatgttggacttacctcttattatttcatacgaaaactacgttaattttaccttactttcattgtaacataagcctgtcttcctatctggattttcgtgtgcatacatattctactgattaatacttttgcattttaatcctg

SEQ ID NO: 498339 - DNA, 1225 bp, Homo sapiens
tgggctaaagcacttgtggataatcagcaaacgtgtaaggtagggctcaagcctacctcccaaaacccgtttaacctccttaacagcggcttctttccttcttacagagtgacctaacgttgcttctttcagcctcctgtggtgtggccccttcctttgtgaaactccctttgtttccgcagcctcggagttagaagttcgacctcccttcagagacagaggtggagtgggcgtgattatgactacgtgggtggtagctgtggctccaagagggcaccccacggtgtgggggccttgcacttgtgaacagccgccagatgtgagacaaccactttgatgtggctgactgttggaaggagcaggtcacggggttattctccttgtgaaaggcctcttataccatagtgctgtgacccctatgttgacactctccgagaccccaaatcccgtggtttgttacacggtgtttagacaaggttggctgaacaggcacgaatcgcccaattgccacaacaggtgttgaaacggaacacacccagggccaagtgataacaagagcgccccaagcccatatatttcccaaacgtttggtgggttcctcccagactactcctcgtgggccccgaatgtttgcccaagtcacgccgtggggaaacaacctggctagaaatacattcaagtggtgtggccacaacacaatcaccacaggaggaacaccgtgccacggcgacacagccaggtaacagcacgcacgcaacaggggcgccacaagttggaagcccccaaaagaggcaaggggttctcccaacgggaaagataaacaacggcagctgtaaaacaaaccaggaaggcaaaccgggaatgaatctggaaaacccgaaacgacagcgcgaaccgtaggatccccaaggcgtataacgccacagggaattactggccacaaaaggccccccagggcacgtgcaaacggaaaacaggacgtacttacgccaaacaaggcgcactaacaccaaaaacacagaaacaagcagcggacaacacgcacatgcacagtgccgacacgatgccacaaataccactatatcacagcaaccatgacatagacgagcaataaacaacaaggaacactccagacacacccccccggcgacacacaacaaacaccacaaaagaataaccacaacagccaccacacaaaacccagaacgcaacaccagacaccccg

SEQ ID NO: 498340 - DNA, 253 bp, Homo sapiens
  misc_feature (1)..(1): n is a, c, g, or t
ntactcaagaagatcacttgctcatgctggctatcagcttcctgattgcccaaagacccaggcccggcacacttctccccaatgcacggtggaagttgggccggatttcacggaaacatcttacttcgattggtctggatcactccaggcaccatccagtgtatacccagtacattatacgcagggttctcattctaatagcgattggctaaactcgtatctgttcacgatgtcttgctcttggacacccaac

SEQ ID NO: 498341 - DNA, 599 bp, Homo sapiens
ggacgcgcttgtcttaatgagactcttgttactacagctgtgcatggcatatggttgtgcgtgccttccgcacataacacatatgtgtacgtttgacctgacatgttgaaccccgccctggctgttgttatgactgctgtgtctgcctttcctccacttgaggttcacctaggcgttataggctaaagaagctactctggctaagtgatctggtatgcggtagtgtctatctttagctagagctgtgatgctcttggatcactagcctgtgaggaaaggggcgtgttatccctagatgtagcgtgctacaaggtgcgttataagcttgattcttagatgacctgggaagctaggccagctaaagaactccttagtccatacattgagagcattttgacaggctcttacttataaatatgcatgcctggtcctagcacgccctgtccgtgatcttcatgggcacgtatgttcacgtaatggttctagtgagtgtgccagtgcttacacccagaaatgaacggatactagtttgtccttcggtctggtatatgctgagttttcaggtgattgtaagcttcggtactttttcctttcctcct

SEQ ID NO: 498342 - DNA, 184 bp, Homo sapiens
gaggcgactctaaggatccttattctgcaccacagcatgacaacaaataccgaatgaaaacacaacgatttaagggagagaaggagtaggtatgggtagatctcgagagtccacggaacaggtttcactttgccctttcaagtttatataaaactaaagccacacaatttaaatttgaagcctg

SEQ ID NO: 498343 - DNA, 405 bp, Homo sapiens
  misc_feature (8)..(8): n is a, c, g, or t
  misc_feature (93)..(93): n is a, c, g, or t
attgtgtnaccccaaaacatatcctaaaacatagcaagggtatggtaaaaaatatggtaaaaagacagataaaaaatggtaacaccctgtaanagggcactgaatgtgggttggctgtgtccccccaccccaaatctcatcttgaaatccccacgtgttgtgggagggacccagtgggaggtgattgcatcatgggggcgggtcttttcctgtgctgttctcctgttagcgaatgggtctcatgaaatctgatggttctttaagggggagtttccctgcacaagttctctctcttccctgctgacatgtaagatgtgacttgctcctccttgccttctgccatgattgtgaggcttccccagctctgtggaactgtaggtccaataaacctctttctattgtgaa

SEQ ID NO: 498344 - DNA, 114 bp, Homo sapiens
caactggcagctggaactgtggaacaccaattcggtgcacaaggggtaagttgaagcactgagctttcattgcagttagatgcaacaggaaacaacttgtctgtgtctgggatg

SEQ ID NO: 498345 - DNA, 764 bp, Homo sapiens
cgcggtggctcatgcttataattctagcactttgggaggccaaggtggacaaattgcctgagttcaggagtttgagaccaccctggacaacatggtaaaactctatctctactaaaatacaaaaattagctgggcaaggtggcgggcacctgtagtctcagttaccctggaggctgaggcacaagaatctcttgaacccaggaggcggaggttacagtgagccaaaattgtgccactgcacacgagcatgggtgaaagagcaagaccctgtctcaaaaaaaaaaaaattgggtacatttggagtagagcaattgaccctctataaggggggttgagtggggcttcatctaattacgttgaaggccttaagattgaaagacggatctcctccaagaaagagaaaattcctgccagctgatggccttgggactgaagctgcacatattactcttttccccaggtctccagctgggcagccttatgctgaagaatctgggattgggtcagcttccacaactcatgtgagccagcctgggttgtgctggcttatggctggtaatcccagcactttggggaaggccgaggtgggcgcgctcccgaggtccaggagcaccaagaacctctccctgggttaacaacggggggagccccaatctttgctcacaacttctccaaaataagcccaggcgtgagtgagcgggaggcccgtaagttccccagtctatttggacaggctgagcggacaggagcactgggcgtggcac

SEQ ID NO: 498346 - DNA, 342 bp, Homo sapiens
  misc_feature (4)..(4): n is a, c, g, or t
  misc_feature (8)..(8): n is a, c, g, or t
  misc_feature (124)..(124): n is a, c, g, or t
  misc_feature (323)..(323): n is a, c, g, or t
aagnaaanccctgtcctattccataaataccccatgatgaaatagtcccacaaaattgtgtcccaccaattgtgccgtacactctcaggcgaataagcccaaaggctcataataattgaagctnaaaaataatcgaagctgaacacggtagctcatgcctgtaatcccaggattttgggaggctgaggtgcgcggatcgcttgaggccaggagttggagaccagcctgggccacatggcgaagccccctctctacaaaaaaataccaaaattagccgggcaatggtgggacattgcctgtagtcccagctacctcgggggacntgaggtgggaaggatcacc

SEQ ID NO: 498347 - DNA, 1455 bp, Homo sapiens
gagctttacaaaagctctttcaggtccccatttatactttacgtgaggctgcgaactgatttcacgcaacaccctaacttaactaacaacgacatgggctacggctatgtctacgcttctcatctaacaaacttctttactctactctctctcactctctacttactactgaccgactcctttctactactctactcactcctcaccttcttacacaccacacaacttaaccctgggcaaccacactacttaccactggcaaccctgctcacttacgcctcacgccgcttcccggcacgccactccttaccactgctcctcgctactccaacctgcgcacgcgaccgacacacaactacctcgactaacacacaccaactccacgctcgcctgctgcacacaacaccacaccttcttcctctcataccaagctccctccttataaccttcttcaactccctctcctcttcattccatctctcgctgcgcgatcctctcttccccccccctttgcccctccctcgactcccaccctctcctacacccctctccaacgccttctcactgctaaccgaacccgtgcttcaactaacacacccttgccacttactctttaacaaatctctaacctctcttgaccactctcactatcttgccacaccactcaacctccgggctaccaagccccttaacttcctgggcgccccagcccatggatctacaacctgtctaacacacccccctgccagccacgcctaaacactacaacaccaatcttaaacctctccctctcctataacttccctaactccctctgcgcaacacttacccctcctttctacttggcaccttacaccacctctccacctccccttctctgcctacacaccgcccctcaccccccttcccctacctctcaccccctccaccccgcctccaccctcctcctaacaccccctcctctacccacacccccttacccctctccacggaccctaaacacccccctcgccgtcccctcacactctcacctcggccctccctcaccttacaacctccccccgcgctcctcctcaccccccccctccttcaccccacacccccttaactcctcttcagcccctccaccacactctggcctctctcccccatcacccgcccccccccccttcctctccacccacccccacacaccgcgcacacccgcaccccagcgcactccgccacccacgcgctcggccgcaccccgccgctccacccaccaccccccctccccaccacccctcaccccctccctccctccaccacccacacacctcgcccacaccctccgcccacaccacccaccccctccaccccacccaccccccccacccccaccccctcccccctcccacacccccgcctcacccacgcccaccaccacccctcccccccccccgcccaaactccccc

SEQ ID NO: 498348 - DNA, 222 bp, Homo sapiens
tgtggctgggtgtcttaaccctgaatcaggtgatcgccgcatcggtctccatggtgctgggattacaggtgtgagccaccgtgccccgccctttccccagattctatgtgcttgttgtttgggaatgcgagcagagacattgaggcgatgtcgagaaactgtgtcatctcatcgaagctctattacaaaggcacttgcatgagaactattttgactactttg

SEQ ID NO: 498349 - DNA, 476 bp, Homo sapiens
  misc_feature (123)..(123): n is a, c, g, or t
aatcctcctcccagtcgccccgtttatctcccctacgctccaagagcgcagcccatgcccacagggcgcgcactccagatgcagagcaggctcaggactcaccgggcataagcgagcctgtgntggagcgtctggacctgagaaggcagaggcgcgactgtggtacatgaggaagggcaggaggaggatgtgggatggtggaggggtttgagaaggcagaggcacgactggggtacatgaggaaagggagggggaggatgttggatggtggaggggctgcagactctgggctagggaaagctgggatgtctctaaaggttggaatgaatggcctagaaccggacccaataagccaaagccacttccagcagcggttagaaggccttgcgcccccagagagccgatttcacaatccagaagtccccgtgccctaatggggctgccctgatttactcctgggtccttgtgtgcggggg

SEQ ID NO: 498350 - DNA, 902 bp, Homo sapiens
agattaactttactttaaagactggcaaagaacggtatgttagaaatacatgtaagtctgctgctattaataaattcaagctgtttgccctttgctgtatggagcctgaatgtagagacttgaagtatttgtagatatttgtgctgtcccatgacagagcagggatatgaaacttgccctggcatccagacatgttctgaggctggctcagatatttgttttcttctggataagtagcatcaaaacaaatagtaattatattatttaatagacttaaaacacggcaactacatttgtataggaaaaaccacattagtaacattacatggagaaaagcattttatgtaactatagttccagcaaataccactatgccttcattaatgccttaaaaccatcttatttacatctgtagaaccactggccatttaatagggcaattcaggagcaatcattaacaaacagttgcagttttcattaggttttctctgtttattctaatatgtaaaactgaaattaaagtaaatccttcagagttcattctttaaaaaaagtaagtcctaaggaaaaactgttatattagctatttaaaaggatgctggatactgtcgaatcagtcactgttgaactcctatcgagtttccatggaaccagccttgcaaattataaatggctagatatttactctggtaagattcacccgcaacttattctattcacagaaggccttaaaatacttcacggtaactctggggccctaacttcatggacttggattggtaccaatctccttgtgaacccacgggaagggaggcgctcaacgcttcacaggtgcgcaatgggtcccacggaaatgccttggtcaaagacctgcctttgcttggcacaccggctccgcgagc

SEQ ID NO: 498351 - DNA, 3156 bp, Homo sapiens
gacagctcagatgaagtgattctgaagcccactggaaatcaactgaccgtggaattcctggaagaaaatagcttcagtgtgcccatcctggtcctgaagaaggatgggttgggcatgacgctgccctcgccatcattcactgtgagggatgttgaacactatgttggttctgacaaagagattgatgtgattgatgtgacccgccaggctgactgcaagatgaagcttggtgattttgtgaaatactattacagcgggaagagggagaaagtcctcaatgtcattagtttggaattctctgataccagactttctaaccttgtggagacaccgaagattgttcgaaagctgtcatgggtcgaaaacttgtggccagaggaatgtgtctttgagagacccaatgtacagaagtactgcctcatgagtgtgcgagatagctatacagactttcacattgactttggtggcacctctgtctggtaccatgtactcaagggtgaaaagatcttctacctgatccgcccaacaaatgccaatctgactctctttgagtgctggagcagttcctctaatcagaatgagatgttctttggggaccaggtggacaagtgctacaagtgttccgtgaagcaaggacagacacttttcattcccacagggtggatccatgctgtgctgacgcctgtggactgccttgcctttggagggaacttcttacacagccttaacatcgagatgcagctcaaagcctatgagattgagaagcggctgagcacagcagacctcttcagattccccaactttgagaccatctgttggtatgtgggaaagcacatcctggacatctttcgcggtttgcgagagaacaggagacaccctgcctcctacctggtccatggtggcaaagccttgaacttggcctttagagcctggacaaggaaagaagctctgccagaccatgaggatgagatcccggagacagtgcgaaccgtacagctcattaaagatctggccagggagatccgcctggtggaagacatcttccaacagaacgttgggaagacgagcaatatctttgggctgcagaggatcttcccagccggctccattcccctaaccaggccagcccattccacttcagtgtccatgtccaggctgtcactgccctccaaaaatggttcaaagaagaaaggcctgaagcccaaggaactcttcaagaaggcagagcgaaagggcaaggagagttcagccttggggcctgctggccagttgagctataatctcatggacacatacagtcatcaggcactgaagacaggctctttccagaaagcaaagttcaacatcactggtgcctgcttgaatgactcagatgacgactcaccagacttggaccttgatggaaatgagagcccattggccctattgatgtctaacggcagtacgaaaagggtgaagagtttatccaaatctcggcgaaccaagatagcaaagaaggtagacaaggctaggctgatggcagaacaggtgatggaagacgaatttgacttggattcagatgatgagctgcagattgacgagagattgggaaaggagaaggcgaccctgataataagaccaaaatttccccggaaattgccccgtgcgaagccttgctctgaccccaaccgagttcgtgaaccaggagaagttgagtttgacattgaggaggactatacaacagatgaggacatggtggaaggggttgaaggcaagcttgggaatggtagtggcgctggtggcattcttgatctgctcaaggccagcaggcaggtggggggacctgactatgctgccctcaccgaggccccagcttctcccagcactcaggaggccatccagggcatgctgtgcatggccaacctgcagtcctcatcgtcctcaccggctacctctagcctgcaggcctggtggactgggggacaggatcgaagcagtgggagctccagcagtgggctgggcacagtgtctaacagtcctgcttcccagcgcaccccagggaagcggcccatcaagcggccagcatactggagaaccgagagcgaggaggaggaggagaacgccagtctggatgaacaggacagcttgggagcgtgcttcaaggatgcagagtatatctatccttcactggagtctgatgatgatgaccctgctttgaaatctcgacccaagaaaaagaagaattcagatgatgctccatggagtcctaaagcccgcgtgaccccaactctgccgaagcaggaccgtcctgtgcgtgaggggacccgggtagcctctattgagacaggtttggctgcagcagctgcaaagctggcccagcaggtgaagaaaatgaagctctcattaactgactcaggataatacagccagtaaatggaggagacaactcaaactcatatcctctaacttcaaatttcatattactttctatttaaataaatgcttatgtagttcagtcattacatcctatttaaatagtgtttaaatctttggcaatcttctttgaccagaacttctgtctcttatgtatatcccaatacagtgtaagctgtaatttgaaaaagggggttctactgttttatataaatataaattaagtaaagctgtgaaaattactcttagtgccttttaaggagctaaattctgtttgggatgatcagagataacctcaaagaagaggttttgaaattggggaggggctttgcaagctaagcttctggtaggggccagggaggcattctaaaagaagggacttccttcgtatagcacacaaagccctcttaaagtcctcttgatttggtctctagtcatctccctgacctccttccagcccctcatgcacaccttttatacagccatagtgcactgcaatactcatagtcccctcagtgagtatatcagattgtctcatgcttttgtgcctttacacaagatgttccttttacccattgagaatcataccctatcagatcccttacctaacagcccttcatactacctaccaccactttatttcagaggcctttttctatatgcttctacaacattcgtggtacttacaatcataaatgtatgttttggtgtttcttattaaactatgaatacttaaaaaaaaaa

SEQ ID NO: 498352 - DNA, 224 bp, Homo sapiens
gtctgtgctgtggtctagcgccagcagcgaatcccctgcagctctcggctgctccccaagggcacaggttttattttttggggtgataagaatgctctaaaattgatgtagtggtagttacacaagtctgtgaacataaaataagccactgaattgtatatttttttcgtctttatagggccacacctgtggcatatagaagttcccaggctaggggttgaatc

SEQ ID NO: 498353 - DNA, 637 bp, Homo sapiens
ctgagtgttgagtgggtggtacaggtggaaagggcaagggtacactccacttgggtagtgccaaatggaggtggggggatgtactccatcgagtccagattgccagtgaggcaaggcggtgggaggtgggggcactgtctccgggatctcatcctcatggtctggccagggagatccgcctggtggaagacatcttccaacagaacgttgggaagacgagcaatatctttgggctgcagaggatcttcccagccggctccattcccctaaccaggccagcccattccacttcagtgtccatgtccaggctgtcactgccctccaaaaatggttcaaagaagaaaggcctgaagcccaaggaactcttcaagaaggcagagcgaaagggcaaggagagttcagccttggggcctgctggccagttgagctataatctcatggacacatacagtcatcaggcactgaagacaggctctttccagaaagcaaagttcaacatcactggtgcctgcttgaatgactcagatgacgactcaccagacttggaccttgatggaaatgagagcccattgttaactgtctgggggtgtcccttcaatgaattagagctcatgcccttttctgggtttggtgttga

SEQ ID NO: 498354 - DNA, 570 bp, Homo sapiens
tgatcctctatagaggccatcctctgttgctggcagcctcttaccgtttccatgggcttcaaaggtaggctatggtagttttgctgatggcccctgcaaccttcccagccactcctgttgcaataaggacttaggatccgtttatcacaaagtcgggattgtctcccccatccgcgaattctgtctgcttgatctggaatacacaggtagcccttcctggctctgtgatggtcgtctctcagcttccccgcacagcttgcccaccctcatagttggtgagatagcgaagttctggctctgagttgtgaccccttacagagtagatgcctcggcaggctgggattggcacctggagggtacaggggaccatcttcgttattccgctcttgttctcattcctccaacttcctcccctccttcaatgtatttttttgtaaagttgatgccttactttgttggataaatatttttgaagctggtactgttctatttctctcttggattcttttatgaactgtaaggattgttttggcgggatggagttagaaccttcaatgataatgttttacc

SEQ ID NO: 498355 - DNA, 5279 bp, Homo sapiens
gacagctcagatgaagtgattctgaagcccactggaaatcaactgaccgtggaattcctggaagaaaatagcttcagtgtgcccatcctggtcctgaagaaggatgggttgggcatgacgctgccctcgccatcattcactgtgagggatgttgaacactatgttggttctgacaaagagattgatgtgattgatgtgacccgccaggctgactgcaagatgaagcttggtgattttgtgaaatactattacagcgggaagagggagaaagtcctcaatgtcattagtttggaattctctgataccagactttctaaccttgtggagacaccgaagattgttcgaaagctgtcatgggtcgaaaacttgtggccagaggaatgtgtctttgagagacccaatgtacagaagtactgcctcatgagtgtgcgagatagctatacagactttcacattgactttggtggcacctctgtctggtaccatgtactcaagggtgaaaagatcttctacctgatccgcccaacaaatgccaatctgactctctttgagtgctggagcagttcctctaatcagaatgagatgttctttggggaccaggtggacaagtgctacaagtgttccgtgaagcaaggacagacacttttcattcccacagggtggatccatgctgtgctgacgcctgtggactgccttgcctttggagggaacttcttacacagccttaacatcgagatgcagctcaaagcctatgagattgagaagcggctgagcacagcagacctcttcagattccccaactttgagaccatctgttggtatgtgggaaagcacatcctggacatctttcgcggtttgcgagagaacaggagacaccctgcctcctacctggtccatggtggcaaagccttgaacttggcctttagagcctggacaaggaaagaagctctgccagaccatgaggatgagatcccggagacagtgcgaaccgtacagctcattaaagatctggccagggagatccgcctggtggaagacatcttccaacagaacgttgggaagacgagcaatatctttgggctgcagaggatcttcccagccggctccattcccctaaccaggccagcccattccacttcagtgtccatgtccaggctgtcactgccctccaaaaatggttcaaagaagaaaggcctgaagcccaaggaactcttcaagaaggcagagcgaaagggcaaggagagttcagccttggggcctgctggccagttgagctataatctcatggacacatacagtcatcaggcactgaagacaggctctttccagaaagcaaagttcaacatcactggtgcctgcttgaatgactcagatgacgactcaccagacttggaccttgatggaaatgagagcccattggccctattgatgtctaacggcagtacgaaaagggtgaagagtttatccaaatctcggcgaaccaagatagcaaagaaggtagacaaggctaggctgatggcagaacaggtgatggaagacgaatttgacttggattcagatgatgagctgcagattgacgagagattgggaaaggagaaggcgaccctgataataagaccaaaatttccccggaaattgccccgtgcgaagccttgctctgaccccaaccgagttcgtgaaccaggagaagttgagtttgacattgaggaggactatacaacagatgaggacatggtggaaggggttgaaggcaagcttgggaatggtagtggcgctggtggcattcttgatctgctcaaggccagcaggcaggtggggggacctgactatgctgccctcaccgaggccccagcttctcccagcactcaggaggccatccagggcatgctgtgcatggccaacctgcagtcctcatcgtcctcaccggctacctctagcctgcaggcctggtggactgggggacaggatcgaagcagtgggagctccagcagtgggctgggcacagtgtctaacagtcctgcttcccagcgcaccccagggaagcggcccatcaagcggccagcatactggagaaccgagagcgaggaggaggaggagaacgccagtctggatgaacaggacagcttgggagcgtgcttcaaggatgcagagtatatctatccttcactggagtctgatgatgatgaccctgctttgaaatctcgacccaagaaaaagaagaattcagatgatgctccatggagtcctaaagcccgcgtgaccccaactctgccgaagcaggaccgtcctgtgcgtgaggggacccgggtagcctctattgagacaggtttggctgcagcagctgcaaagctggcccagcaggagctacagaaggcccaaaagaagaaatatatcaagaagaagcctttgctgaaggaggtagaacagcctcgccctcaagactccaatctcagtctgacagtaccagcccccactgtggctgccacaccacaacttgtcacctcctcctcacccctgcctcctcctgagcctaaacaagaggccctgtcaggaagtctcgctgaccatgagtacaccgctcgtcccaatgcctttggcatggcccaggcaaaccgcagcaccacacctatggcccccggtgtcttcttgacccagcggcgcccttcagttggctcccagagcaatcaggcaggacaaggaaagcgtcccaaaaagggcctggccacagcaaagcagagactcggccgtatcctgaaaatccacagaaatggcaaactacttctgtgagccctcctgtgtcccacccctcacccctttacccccattgccttctccattgtcaactcttggggcactcctggatcctatctgccctggacaaggtgctgaggtgcattgtcctgctttcttgggacttaccaaaggcacggacccctccaccgactccttctagttcccttccccactttcactagagcatcctgcctgccttctccactgaggagcaggtaaatgggagaggtttccagctgactagaaccctcttttctactcgtccaaaccactcccgtcacctgccttgtctgttctttattcttcatcccccgctagagctggaaggcaggatgaggagaggtatgaaggagcctgagccatgaagtgggaagcccagtgcttgacactttctgcaactctagccctatatccagaagcctgcccacctccacccattctgtttgccccatttccccagtccagtggacatgccccacctccagacttgctcatgggagaaggctgtggtctctgccccctcttgccaaatgcttcatggaaatgaagaggaaggcctagagcctccttcctgccccactgtgggccatttccagaagtggcctagaaatgccaacttcacttacctttcaaaagaaaggtgattcctatcacttgtcaaggtagggagaggtcagatgcccaagcctttgaccacggttttgtagcctgttggaggaagctacttttagctggctacacatgaggccacttgttttagggtgagctccagggatttgcctggattttgaaatcatgtagaacattatccacgtggctgtggctgtggctgtggctgggccctggcaggtggaaaaccatctcccagaaacctgaaagcacctgccaatgacgcagataaccctggccctacagcctgcttgctccgcctataccacagagcacagcctggacattatggagggtgtggcgggacggcccacacctgggtcctccatcgggaacttttcatgcttctttctccacctgaggtcttggtctgaagaagacctcaggactcacatcttcactcctgggcctttgcacttccagacgacaggtcatcgttcaagcagaatgcagacaggccattcacgagcccaagttgaagagaagagacgcccatccgtgaaggagcagaccatccatccgatcctccccttcccctgtccttccttcgtggattgtctccattgtccagacagtgcccccacctcccaccgccttgcctcactggcaatctggactcgatggagaacatccccccacctccatttggcactacccaagtggagtgtacccttgccctttccacctgtaccacccactccaacctcaccccagcttgcccaatgcttctggggaatttaatagctaccatgcaggccacagggaatttgtgaggcttcttttgtcatctttgtatctccagtttgtctttcttttctccatagccctgcctctactttccttccttggaatcaggggttcctttagcccatttgctttctctaccttggggaccccaggggccaagcagttctccatctagtcacaccaaaggcaaaaagcctggctacctcccccctagcacgtgagtccctactcccctcccctctgtttctgcccagctttgcttattttggggatttcaaggcagcagagggtagtgaggggagagcaggagaagcctctgtcctgtataggcaactgcctgactatgcggtgactgctgtaaccaagatcaggtccccagcccttttgtccattaacaccccttcttgatctttcaaaggcagctaattgctagcaaatccccccgattccggccttttccctctatttctttgttagaagttttctgtggagctgaaacccagcctctgtttgactgggtttcatttagcttagttgggttcttagagccccctgtttgttgttttgtgttgtttccaatgaaaagcaagtttaccctcagagttatgcttttccaaagaggctgatgtctttgtttttgttttttttaatgtttcaggttctaagtgaagtgagttggggaggggttgggagtgttagtaatcaaggtttagaacaccatgagatagttacccctgatctccagtccctagctgggggctggacagggggaagggagagaggatttctattcacctttaatatatttttacaaaaaaagcaaacaatttaaaaacaagcccaccgcttctgtacatgtctaaatatatttttagaagtgggtaggattgtgaatttctgatgcagggcctttttataaataggttagggtagcatcattcagacttctctgttgtttttgtccctgtctttttcttatgttgtgttactaatgtaatttatattttttttagatcctccctttcctatagagataaaagtgatttatcttggcaaaatcctaattaaaa

SEQ ID NO: 498356 - DNA, 5246 bp, Homo sapiens
gacagctcagatgaagtgattctgaagcccactggaaatcaactgaccgtggaattcctggaagaaaatagcttcagtgtgcccatcctggtcctgaagaaggatgggttgggcatgacgctgccctcgccatcattcactgtgagggatgttgaacactatgttggttctgacaaagagattgatgtgattgatgtgacccgccaggctgactgcaagatgaagcttggtgattttgtgaaatactattacagcgggaagagggagaaagtcctcaatgtcattagtttggaattctctgataccagactttctaaccttgtggagacaccgaagattgttcgaaagctgtcatgggtcgaaaacttgtggccagaggaatgtgtctttgagagacccaatgtacagaagtactgcctcatgagtgtgcgagatagctatacagactttcacattgactttggtggcacctctgtctggtaccatgtactcaagggtgaaaagatcttctacctgatccgcccaacaaatgccaatctgactctctttgagtgctggagcagttcctctaatcagaatgagatgttctttggggaccaggtggacaagtgctacaagtgttccgtgaagcaaggacagacacttttcattcccacagggtggatccatgctgtgctgacgcctgtggactgccttgcctttggagggaacttcttacacagccttaacatcgagatgcagctcaaagcctatgagattgagaagcggctgagcacagcagacctcttcagattccccaactttgagaccatctgttggtatgtgggaaagcacatcctggacatctttcgcggtttgcgagagaacaggagacaccctgcctcctacctggtccatggtggcaaagccttgaacttggcctttagagcctggacaaggaaagaagctctgccagaccatgaggatgagatcccggagacagtgcgaaccgtacagctcattaaagatctggccagggagatccgcctggtggaagacatcttccaacagaacgttgggaagacgagcaatatctttgggctgcagaggatcttcccagccggctccattcccctaaccaggccagcccattccacttcagtgtccatgtccaggctgtcactgccctccaaaaatggttcaaagaagaaaggcctgaagcccaaggaactcttcaagaaggcagagcgaaagggcaaggagagttcagccttggggcctgctggccagttgagctataatctcatggacacatacagtcatcaggcactgaagacaggctctttccagaaagcaaagttcaacatcactggtgcctgcttgaatgactcagatgacgactcaccagacttggaccttgatggaaatgagagcccattggccctattgatgtctaacggcagtacgaaaagggtgaagagtttatccaaatctcggcgaaccaagatagcaaagaaggtagacaaggctaggctgatggcagaacaggtgatggaagacgaatttgacttggattcagatgatgagctgcagattgacgagagattgggaaaggagaaggcgaccctgataataagaccaaaatttccccggaaattgccccgtgcgaagccttgctctgaccccaaccgagttcgtgaaccaggagaagttgagtttgacattgaggaggactatacaacagatgaggacatggtggaaggggttgaaggcaagcttgggaatggtagtggcgctggtggcattcttgatctgctcaaggccagcagcgaggccccagcttctcccagcactcaggaggccatccagggcatgctgtgcatggccaacctgcagtcctcatcgtcctcaccggctacctctagcctgcaggcctggtggactgggggacaggatcgaagcagtgggagctccagcagtgggctgggcacagtgtctaacagtcctgcttcccagcgcaccccagggaagcggcccatcaagcggccagcatactggagaaccgagagcgaggaggaggaggagaacgccagtctggatgaacaggacagcttgggagcgtgcttcaaggatgcagagtatatctatccttcactggagtctgatgatgatgaccctgctttgaaatctcgacccaagaaaaagaagaattcagatgatgctccatggagtcctaaagcccgcgtgaccccaactctgccgaagcaggaccgtcctgtgcgtgaggggacccgggtagcctctattgagacaggtttggctgcagcagctgcaaagctggcccagcaggagctacagaaggcccaaaagaagaaatatatcaagaagaagcctttgctgaaggaggtagaacagcctcgccctcaagactccaatctcagtctgacagtaccagcccccactgtggctgccacaccacaacttgtcacctcctcctcacccctgcctcctcctgagcctaaacaagaggccctgtcaggaagtctcgctgaccatgagtacaccgctcgtcccaatgcctttggcatggcccaggcaaaccgcagcaccacacctatggcccccggtgtcttcttgacccagcggcgcccttcagttggctcccagagcaatcaggcaggacaaggaaagcgtcccaaaaagggcctggccacagcaaagcagagactcggccgtatcctgaaaatccacagaaatggcaaactacttctgtgagccctcctgtgtcccacccctcacccctttacccccattgccttctccattgtcaactcttggggcactcctggatcctatctgccctggacaaggtgctgaggtgcattgtcctgctttcttgggacttaccaaaggcacggacccctccaccgactccttctagttcccttccccactttcactagagcatcctgcctgccttctccactgaggagcaggtaaatgggagaggtttccagctgactagaaccctcttttctactcgtccaaaccactcccgtcacctgccttgtctgttctttattcttcatcccccgctagagctggaaggcaggatgaggagaggtatgaaggagcctgagccatgaagtgggaagcccagtgcttgacactttctgcaactctagccctatatccagaagcctgcccacctccacccattctgtttgccccatttccccagtccagtggacatgccccacctccagacttgctcatgggagaaggctgtggtctctgccccctcttgccaaatgcttcatggaaatgaagaggaaggcctagagcctccttcctgccccactgtgggccatttccagaagtggcctagaaatgccaacttcacttacctttcaaaagaaaggtgattcctatcacttgtcaaggtagggagaggtcagatgcccaagcctttgaccacggttttgtagcctgttggaggaagctacttttagctggctacacatgaggccacttgttttagggtgagctccagggatttgcctggattttgaaatcatgtagaacattatccacgtggctgtggctgtggctgtggctgggccctggcaggtggaaaaccatctcccagaaacctgaaagcacctgccaatgacgcagataaccctggccctacagcctgcttgctccgcctataccacagagcacagcctggacattatggagggtgtggcgggacggcccacacctgggtcctccatcgggaacttttcatgcttctttctccacctgaggtcttggtctgaagaagacctcaggactcacatcttcactcctgggcctttgcacttccagacgacaggtcatcgttcaagcagaatgcagacaggccattcacgagcccaagttgaagagaagagacgcccatccgtgaaggagcagaccatccatccgatcctccccttcccctgtccttccttcgtggattgtctccattgtccagacagtgcccccacctcccaccgccttgcctcactggcaatctggactcgatggagaacatccccccacctccatttggcactacccaagtggagtgtacccttgccctttccacctgtaccacccactccaacctcaccccagcttgcccaatgcttctggggaatttaatagctaccatgcaggccacagggaatttgtgaggcttcttttgtcatctttgtatctccagtttgtctttcttttctccatagccctgcctctactttccttccttggaatcaggggttcctttagcccatttgctttctctaccttggggaccccaggggccaagcagttctccatctagtcacaccaaaggcaaaaagcctggctacctcccccctagcacgtgagtccctactcccctcccctctgtttctgcccagctttgcttattttggggatttcaaggcagcagagggtagtgaggggagagcaggagaagcctctgtcctgtataggcaactgcctgactatgcggtgactgctgtaaccaagatcaggtccccagcccttttgtccattaacaccccttcttgatctttcaaaggcagctaattgctagcaaatccccccgattccggccttttccctctatttctttgttagaagttttctgtggagctgaaacccagcctctgtttgactgggtttcatttagcttagttgggttcttagagccccctgtttgttgttttgtgttgtttccaatgaaaagcaagtttaccctcagagttatgcttttccaaagaggctgatgtctttgtttttgttttttttaatgtttcaggttctaagtgaagtgagttggggaggggttgggagtgttagtaatcaaggtttagaacaccatgagatagttacccctgatctccagtccctagctgggggctggacagggggaagggagagaggatttctattcacctttaatatatttttacaaaaaaagcaaacaatttaaaaacaagcccaccgcttctgtacatgtctaaatatatttttagaagtgggtaggattgtgaatttctgatgcagggcctttttataaataggttagggtagcatcattcagacttctctgttgtttttgtccctgtctttttcttatgttgtgttactaatgtaatttatattttttttagatcctccctttcctatagagataaaagtgatttatcttggcaaaatcctaattaaaa

SEQ ID NO: 498357 - DNA, 486 bp, Homo sapiens
tacatcccattgtacacgtcagtaactctcatagaggctaagctgttaaaatttccatatatatacaaatagcaaagatatttctttccctttctttctattctttctttctttctttctttctttcttttctttctctctttccttccttccttccctccttccttccttcctttctttctttatgtatgagacagagtttcgctcttgaccccgaggctggagtgcagtggcctgatcttggctcactgcaacctctgcctcccggattcaagcgattctcctgcctcagcctcccgagtagctgggattacaagcacacaccaccacgcccggataatttcacccggctaatttttgtatttttagtagagactgggtttcgccatgctagccaggctggtctcaactctttacctcaagtgatccgcccaccttggcctcccaaagtgctgggattacaggcatgaacaactcgactgacca

SEQ ID NO: 498358 - DNA, 4945 bp, Homo sapiens
gacagctcagatgaagtgattctgaagcccactggaaatcaactgaccgtggaattcctggaagaaaatagcttcagtgtgcccatcctggtcctgaagaaggatgggttgggcatgacgctgccctcgccatcattcactgtgagggatgttgaacactatgttggttctgacaaagagattgatgtgattgatgtgacccgccaggctgactgcaagatgaagcttggtgattttgtgaaatactattacagcgggaagagggagaaagtcctcaatgtcattagtttggaattctctgataccagactttctaaccttgtggagacaccgaagattgttcgaaagctgtcatgggtcgaaaacttgtggccagaggaatgtgtctttgagagacccaatgtacagaagtactgcctcatgagtgtgcgagatagctatacagactttcacattgactttggtggcacctctgtctggtaccatgtactcaagggtgaaaagatcttctacctgatccgcccaacaaatgccaatctgactctctttgagtgctggagcagttcctctaatcagaatgagatgttctttggggaccaggtggacaagtgctacaagtgttccgtgaagcaaggacagacacttttcattcccacagggtggatccatgctgtgctgacgcctgtggactgccttgcctttggagggaacttcttacacagccttaacatcgagatgcagctcaaagcctatgagattgagaagcggctgagcacagcagacctcttcagattccccaactttgagaccatctgttggtatgtgggaaagcacatcctggacatctttcgcggtttgcgagagaacaggagacaccctgcctcctacctggtccatggtggcaaagccttgaacttggcctttagagcctggacaaggaaagaagctctgccagaccatgaggatgagatcccggagacagtgcgaaccgtacagctcattaaagatctggccagggagatccgcctggtggaaagttcaacatcactggtgcctgcttgaatgactcagatgacgactcaccagacttggaccttgatggaaatgagagcccattggccctattgatgtctaacggcagtacgaaaagggtgaagagtttatccaaatctcggcgaaccaagatagcaaagaaggtagacaaggctaggctgatggcagaacaggtgatggaagacgaatttgacttggattcagatgatgagctgcagattgacgagagattgggaaaggagaaggcgaccctgataataagaccaaaatttccccggaaattgccccgtgcgaagccttgctctgaccccaaccgagttcgtgaaccaggagaagttgagtttgacattgaggaggactatacaacagatgaggacatggtggaaggggttgaaggcaagcttgggaatggtagtggcgctggtggcattcttgatctgctcaaggccagcagcgaggccccagcttctcccagcactcaggaggccatccagggcatgctgtgcatggccaacctgcagtcctcatcgtcctcaccggctacctctagcctgcaggcctggtggactgggggacaggatcgaagcagtgggagctccagcagtgggctgggcacagtgtctaacagtcctgcttcccagcgcaccccagggaagcggcccatcaagcggccagcatactggagaaccgagagcgaggaggaggaggagaacgccagtctggatgaacaggacagcttgggagcgtgcttcaaggatgcagagtatatctatccttcactggagtctgatgatgatgaccctgctttgaaatctcgacccaagaaaaagaagaattcagatgatgctccatggagtcctaaagcccgcgtgaccccaactctgccgaagcaggaccgtcctgtgcgtgaggggacccgggtagcctctattgagacaggtttggctgcagcagctgcaaagctggcccagcaggagctacagaaggcccaaaagaagaaatatatcaagaagaagcctttgctgaaggaggtagaacagcctcgccctcaagactccaatctcagtctgacagtaccagcccccactgtggctgccacaccacaacttgtcacctcctcctcacccctgcctcctcctgagcctaaacaagaggccctgtcaggaagtctcgctgaccatgagtacaccgctcgtcccaatgcctttggcatggcccaggcaaaccgcagcaccacacctatggcccccggtgtcttcttgacccagcggcgcccttcagttggctcccagagcaatcaggcaggacaaggaaagcgtcccaaaaagggcctggccacagcaaagcagagactcggccgtatcctgaaaatccacagaaatggcaaactacttctgtgagccctcctgtgtcccacccctcacccctttacccccattgccttctccattgtcaactcttggggcactcctggatcctatctgccctggacaaggtgctgaggtgcattgtcctgctttcttgggacttaccaaaggcacggacccctccaccgactccttctagttcccttccccactttcactagagcatcctgcctgccttctccactgaggagcaggtaaatgggagaggtttccagctgactagaaccctcttttctactcgtccaaaccactcccgtcacctgccttgtctgttctttattcttcatcccccgctagagctggaaggcaggatgaggagaggtatgaaggagcctgagccatgaagtgggaagcccagtgcttgacactttctgcaactctagccctatatccagaagcctgcccacctccacccattctgtttgccccatttccccagtccagtggacatgccccacctccagacttgctcatgggagaaggctgtggtctctgccccctcttgccaaatgcttcatggaaatgaagaggaaggcctagagcctccttcctgccccactgtgggccatttccagaagtggcctagaaatgccaacttcacttacctttcaaaagaaaggtgattcctatcacttgtcaaggtagggagaggtcagatgcccaagcctttgaccacggttttgtagcctgttggaggaagctacttttagctggctacacatgaggccacttgttttagggtgagctccagggatttgcctggattttgaaatcatgtagaacattatccacgtggctgtggctgtggctgtggctgggccctggcaggtggaaaaccatctcccagaaacctgaaagcacctgccaatgacgcagataaccctggccctacagcctgcttgctccgcctataccacagagcacagcctggacattatggagggtgtggcgggacggcccacacctgggtcctccatcgggaacttttcatgcttctttctccacctgaggtcttggtctgaagaagacctcaggactcacatcttcactcctgggcctttgcacttccagacgacaggtcatcgttcaagcagaatgcagacaggccattcacgagcccaagttgaagagaagagacgcccatccgtgaaggagcagaccatccatccgatcctccccttcccctgtccttccttcgtggattgtctccattgtccagacagtgcccccacctcccaccgccttgcctcactggcaatctggactcgatggagaacatccccccacctccatttggcactacccaagtggagtgtacccttgccctttccacctgtaccacccactccaacctcaccccagcttgcccaatgcttctggggaatttaatagctaccatgcaggccacagggaatttgtgaggcttcttttgtcatctttgtatctccagtttgtctttcttttctccatagccctgcctctactttccttccttggaatcaggggttcctttagcccatttgctttctctaccttggggaccccaggggccaagcagttctccatctagtcacaccaaaggcaaaaagcctggctacctcccccctagcacgtgagtccctactcccctcccctctgtttctgcccagctttgcttattttggggatttcaaggcagcagagggtagtgaggggagagcaggagaagcctctgtcctgtataggcaactgcctgactatgcggtgactgctgtaaccaagatcaggtccccagcccttttgtccattaacaccccttcttgatctttcaaaggcagctaattgctagcaaatccccccgattccggccttttccctctatttctttgttagaagttttctgtggagctgaaacccagcctctgtttgactgggtttcatttagcttagttgggttcttagagccccctgtttgttgttttgtgttgtttccaatgaaaagcaagtttaccctcagagttatgcttttccaaagaggctgatgtctttgtttttgttttttttaatgtttcaggttctaagtgaagtgagttggggaggggttgggagtgttagtaatcaaggtttagaacaccatgagatagttacccctgatctccagtccctagctgggggctggacagggggaagggagagaggatttctattcacctttaatatatttttacaaaaaaagcaaacaatttaaaaacaagcccaccgcttctgtacatgtctaaatatatttttagaagtgggtaggattgtgaatttctgatgcagggcctttttataaataggttagggtagcatcattcagacttctctgttgtttttgtccctgtctttttcttatgttgtgttactaatgtaatttatattttttttagatcctccctttcctatagagataaaagtgatttatcttggcaaaatcctaattaaaa

SEQ ID NO: 498359 - DNA, 4092 bp, Homo sapiens
atctagcagatctcgcgtcgaccttctgctctgtgatcagtgggggtatggggggacagtatagcagaaggcctggctcaggtggttttgacagtgaactgaaccagtgaaaccagagggaacttgcatcgtgattcccatgggagtcccagacaggtaacggctgagtctcctacttctacagttcaacatcactggtgcctgcttgaatgactcagatgacgactcaccagacttggaccttgatggaaatgagagcccattggccctattgatgtctaacggcagtacgaaaagggtgaagagtttatccaaatctcggcgaaccaagatagcaaagaaggtagacaaggctaggctgatggcagaacaggtgatggaagacgaatttgacttggattcagatgatgagctgcagattgacgagagattgggaaaggagaaggcgaccctgataataagaccaaaatttccccggaaattgccccgtgcgaagccttgctctgaccccaaccgagttcgtgaaccaggagaagttgagtttgacattgaggaggactatacaacagatgaggacatggtggaaggggttgaaggcaagcttgggaatggtagtggcgctggtggcattcttgatctgctcaaggccagcagcgaggccccagcttctcccagcactcaggaggccatccagggcatgctgtgcatggccaacctgcagtcctcatcgtcctcaccggctacctctagcctgcaggcctggtggactgggggacaggatcgaagcagtgggagctccagcagtgggctgggcacagtgtctaacagtcctgcttcccagcgcaccccagggaagcggcccatcaagcggccagcatactggagaaccgagagcgaggaggaggaggagaacgccagtctggatgaacaggacagcttgggagcgtgcttcaaggatgcagagtatatctatccttcactggagtctgatgatgatgaccctgctttgaaatctcgacccaagaaaaagaagaattcagatgatgctccatggagtcctaaagcccgcgtgaccccaactctgccgaagcaggaccgtcctgtgcgtgaggggacccgggtagcctctattgagacaggtttggctgcagcagctgcaaagctggcccagcaggagctacagaaggcccaaaagaagaaatatatcaagaagaagcctttgctgaaggaggtagaacagcctcgccctcaagactccaatctcagtctgacagtaccagcccccactgtggctgccacaccacaacttgtcacctcctcctcacccctgcctcctcctgagcctaaacaagaggccctgtcaggaagtctcgctgaccatgagtacaccgctcgtcccaatgcctttggcatggcccaggcaaaccgcagcaccacacctatggcccccggtgtcttcttgacccagcggcgcccttcagttggctcccagagcaatcaggcaggacaaggaaagcgtcccaaaaagggcctggccacagcaaagcagagactcggccgtatcctgaaaatccacagaaatggcaaactacttctgtgagccctcctgtgtcccacccctcacccctttacccccattgccttctccattgtcaactcttggggcactcctggatcctatctgccctggacaaggtgctgaggtgcattgtcctgctttcttgggacttaccaaaggcacggacccctccaccgactccttctagttcccttccccactttcactagagcatcctgcctgccttctccactgaggagcaggtaaatgggagaggtttccagctgactagaaccctcttttctactcgtccaaaccactcccgtcacctgccttgtctgttctttattcttcatcccccgctagagctggaaggcaggatgaggagaggtatgaaggagcctgagccatgaagtgggaagcccagtgcttgacactttctgcaactctagccctatatccagaagcctgcccacctccacccattctgtttgccccatttccccagtccagtggacatgccccacctccagacttgctcatgggagaaggctgtggtctctgccccctcttgccaaatgcttcatggaaatgaagaggaaggcctagagcctccttcctgccccactgtgggccatttccagaagtggcctagaaatgccaacttcacttacctttcaaaagaaaggtgattcctatcacttgtcaaggtagggagaggtcagatgcccaagcctttgaccacggttttgtagcctgttggaggaagctacttttagctggctacacatgaggccacttgttttagggtgagctccagggatttgcctggattttgaaatcatgtagaacattatccacgtggctgtggctgtggctgtggctgggccctggcaggtggaaaaccatctcccagaaacctgaaagcacctgccaatgacgcagataaccctggccctacagcctgcttgctccgcctataccacagagcacagcctggacattatggagggtgtggcgggacggcccacacctgggtcctccatcgggaacttttcatgcttctttctccacctgaggtcttggtctgaagaagacctcaggactcacatcttcactcctgggcctttgcacttccagacgacaggtcatcgttcaagcagaatgcagacaggccattcacgagcccaagttgaagagaagagacgcccatccgtgaaggagcagaccatccatccgatcctccccttcccctgtccttccttcgtggattgtctccattgtccagacagtgcccccacctcccaccgccttgcctcactggcaatctggactcgatggagaacatccccccacctccatttggcactacccaagtggagtgtacccttgccctttccacctgtaccacccactccaacctcaccccagcttgcccaatgcttctggggaatttaatagctaccatgcaggccacagggaatttgtgaggcttcttttgtcatctttgtatctccagtttgtctttcttttctccatagccctgcctctactttccttccttggaatcaggggttcctttagcccatttgctttctctaccttggggaccccaggggccaagcagttctccatctagtcacaccaaaggcaaaaagcctggctacctcccccctagcacgtgagtccctactcccctcccctctgtttctgcccagctttgcttattttggggatttcaaggcagcagagggtagtgaggggagagcaggagaagcctctgtcctgtataggcaactgcctgactatgcggtgactgctgtaaccaagatcaggtccccagcccttttgtccattaacaccccttcttgatctttcaaaggcagctaattgctagcaaatccccccgattccggccttttccctctatttctttgttagaagttttctgtggagctgaaacccagcctctgtttgactgggtttcatttagcttagttgggttcttagagccccctgtttgttgttttgtgttgtttccaatgaaaagcaagtttaccctcagagttatgcttttccaaagaggctgatgtctttgtttttgttttttttaatgtttcaggttctaagtgaagtgagttggggaggggttgggagtgttagtaatcaaggtttagaacaccatgagatagttacccctgatctccagtccctagctgggggctggacagggggaagggagagaggatttctattcacctttaatatatttttacaaaaaaagcaaacaatttaaaaacaagcccaccgcttctgtacatgtctaaatatatttttagaagtgggtaggattgtgaatttctgatgcagggcctttttataaataggttagggtagcatcattcagacttctctgttgtttttgtccctgtctttttcttatgttgtgttactaatgtaatttatattttttttagatcctccctttcctatagagataaaagtgatttatcttggcaaaatcctaattaaaa

SEQ ID NO: 498360 - DNA, 201 bp, Homo sapiens
tgcactgtactctagcctgggcgacagagtgagacctgtctcaaaaacaaacaaaagaaaacaaaaaccaagaaattccagattggtcttctatagctacttcactaatgtgtcacatcatagatttcagtgactcagtgaatctcagaggttatctcatcaactcggcaaagaaaccctgcaggaactatggctagggcc

SEQ ID NO: 498361 - DNA, 3827 bp, Homo sapiens
  misc_feature (104)..(104): n is a, c, g, or t
  misc_feature (287)..(287): n is a, c, g, or t
  misc_feature (305)..(305): n is a, c, g, or t
tatagacttcaagaggaatcaattttgggcacttaggaagttgggaagaggggctggaagagtcaagcaaggagaattgttacaaaaacaatgaaaggaaagantgcagcatgcctaaacagggagggaagtgtgccccttttttgccaccttgcctgctgtctgtggagagacaacacaaaaaggactggcttttcgtgaaagcaatctatgatactgtcttggatccttaaacttaattccaaatttttcacttgggatgattctcccctttttcctcccacttngatcctcatagctatcanccctcctccctgagtattctgatgaccgatttactctgacagctaaaaacaactctctcagtatttctcctctgttccttgcagcgaggccccagcttctcccagcactcaggaggccatccagggcatgctgtgcatggccaacctgcagtcctcatcgtcctcaccggctacctctagcctgcaggcctggtggactgggggacaggatcgaagcagtgggagctccagcagtgggctgggcacagtgtctaacagtcctgcttcccagcgcaccccagggaagcggcccatcaagcggccagcatactggagaaccgagagcgaggaggaggaggagaacgccagtctggatgaacaggacagcttgggagcgtgcttcaaggatgcagagtatatctatccttcactggagtctgatgatgatgaccctgctttgaaatctcgacccaagaaaaagaagaattcagatgatgctccatggagtcctaaagcccgcgtgaccccaactctgccgaagcaggaccgtcctgtgcgtgaggggacccgggtagcctctattgagacaggtttggctgcagcagctgcaaagctggcccagcaggagctacagaaggcccaaaagaagaaatatatcaagaagaagcctttgctgaaggaggtagaacagcctcgccctcaagactccaatctcagtctgacagtaccagcccccactgtggctgccacaccacaacttgtcacctcctcctcacccctgcctcctcctgagcctaaacaagaggccctgtcaggaagtctcgctgaccatgagtacaccgctcgtcccaatgcctttggcatggcccaggcaaaccgcagcaccacacctatggcccccggtgtcttcttgacccagcggcgcccttcagttggctcccagagcaatcaggcaggacaaggaaagcgtcccaaaaagggcctggccacagcaaagcagagactcggccgtatcctgaaaatccacagaaatggcaaactacttctgtgagccctcctgtgtcccacccctcacccctttacccccattgccttctccattgtcaactcttggggcactcctggatcctatctgccctggacaaggtgctgaggtgcattgtcctgctttcttgggacttaccaaaggcacggacccctccaccgactccttctagttcccttccccactttcactagagcatcctgcctgccttctccactgaggagcaggtaaatgggagaggtttccagctgactagaaccctcttttctactcgtccaaaccactcccgtcacctgccttgtctgttctttattcttcatcccccgctagagctggaaggcaggatgaggagaggtatgaaggagcctgagccatgaagtgggaagcccagtgcttgacactttctgcaactctagccctatatccagaagcctgcccacctccacccattctgtttgccccatttccccagtccagtggacatgccccacctccagacttgctcatgggagaaggctgtggtctctgccccctcttgccaaatgcttcatggaaatgaagaggaaggcctagagcctccttcctgccccactgtgggccatttccagaagtggcctagaaatgccaacttcacttacctttcaaaagaaaggtgattcctatcacttgtcaaggtagggagaggtcagatgcccaagcctttgaccacggttttgtagcctgttggaggaagctacttttagctggctacacatgaggccacttgttttagggtgagctccagggatttgcctggattttgaaatcatgtagaacattatccacgtggctgtggctgtggctgtggctgggccctggcaggtggaaaaccatctcccagaaacctgaaagcacctgccaatgacgcagataaccctggccctacagcctgcttgctccgcctataccacagagcacagcctggacattatggagggtgtggcgggacggcccacacctgggtcctccatcgggaacttttcatgcttctttctccacctgaggtcttggtctgaagaagacctcaggactcacatcttcactcctgggcctttgcacttccagacgacaggtcatcgttcaagcagaatgcagacaggccattcacgagcccaagttgaagagaagagacgcccatccgtgaaggagcagaccatccatccgatcctccccttcccctgtccttccttcgtggattgtctccattgtccagacagtgcccccacctcccaccgccttgcctcactggcaatctggactcgatggagaacatccccccacctccatttggcactacccaagtggagtgtacccttgccctttccacctgtaccacccactccaacctcaccccagcttgcccaatgcttctggggaatttaatagctaccatgcaggccacagggaatttgtgaggcttcttttgtcatctttgtatctccagtttgtctttcttttctccatagccctgcctctactttccttccttggaatcaggggttcctttagcccatttgctttctctaccttggggaccccaggggccaagcagttctccatctagtcacaccaaaggcaaaaagcctggctacctcccccctagcacgtgagtccctactcccctcccctctgtttctgcccagctttgcttattttggggatttcaaggcagcagagggtagtgaggggagagcaggagaagcctctgtcctgtataggcaactgcctgactatgcggtgactgctgtaaccaagatcaggtccccagcccttttgtccattaacaccccttcttgatctttcaaaggcagctaattgctagcaaatccccccgattccggccttttccctctatttctttgttagaagttttctgtggagctgaaacccagcctctgtttgactgggtttcatttagcttagttgggttcttagagccccctgtttgttgttttgtgttgtttccaatgaaaagcaagtttaccctcagagttatgcttttccaaagaggctgatgtctttgtttttgttttttttaatgtttcaggttctaagtgaagtgagttggggaggggttgggagtgttagtaatcaaggtttagaacaccatgagatagttacccctgatctccagtccctagctgggggctggacagggggaagggagagaggatttctattcacctttaatatatttttacaaaaaaagcaaacaatttaaaaacaagcccaccgcttctgtacatgtctaaatatatttttagaagtgggtaggattgtgaatttctgatgcagggcctttttataaataggttagggtagcatcattcagacttctctgttgtttttgtccctgtctttttcttatgttgtgttactaatgtaatttatattttttttagatcctccctttcctatagagataaaagtgatttatcttggcaaaatcctaattaaaa

SEQ ID NO: 498362 - DNA, 424 bp, Homo sapiens
  misc_feature (14)..(14): n is a, c, g, or t
gctggacggacagnatgagagtcttaaaggcacggcttaatacttaccattatatttgcctcaactcaagtattaattgaaatagttggtcagatattgaagaacgcctgacaagaataatgaataactggccatcccttcacaaacttgcataacacatgtatgacaaaaggataaaataggacggctgaaatcccgagaaagtctgtctgtctgcttacaaattcaaaaaaaaaaagcccatgatccttggaaaggggaaacagagatagtttcccagtcagatcataatttctaccatctctgtgacactcatcactccaaaaggttcccactctccgcaccccgatacactttgggaaccaatatatcacatgtcgctcctgaacaaatggggaaacaatgtgaatcatgcgctctaccc

SEQ ID NO: 498363 - DNA, 4144 bp, Homo sapiens
gacagctcagatgaagtgattctgaagcccactggaaatcaactgaccgtggaattcctggaagaaaatagcttcagtgtgcccatcctggtcctgaagaaggatgggttgggcatgacgctgccctcgccatcattcactgtgagggatgttgaacactatgttggttctgacaaagagattgatgtgattgatgtgacccgccaggctgactgcaagatgaagcttggtgattttgtgaaatactattacagcgggaagagggagaaagtcctcaatgtcattagtttggaattctctgataccagactttctaaccttgtggagacaccgaagattgttcgaaagctgtcatgggtcgaaaacttgtggccagaggaatgtgtctttgagagacccaatgtacagaagtactgcctcatgagtgtgcgagatagctatacagactttcacattgactttggtggcacctctgtctggtaccatgtactcaagggtgaaaagatcttctacctgatccgcccaacaaatgccaatctgactctctttgagtgctggagcagttcctctaatcagaatgagatgttctttggggaccaggtggacaagtgctacaagtgttccgtgaagcaaggacagacacttttcattcccacagggtggatccatgctgtgctgacgcctgtggactgccttgcctttggagggaacttcttacacagccttaacatcgagatgcagctcaaagcctatgagattgagaagcggctgagcacagcagacctcttcagattccccaactttgagaccatctgttggtatgtgggaaagcacatcctggacatctttcgcggtttgcgagagaacaggagacaccctgcctcctacctggtccatggtggcaaagccttgaacttggcctttagagcctggacaaggaaagaagctctgccagaccatgaggatgagatcccggagacagtgcgaaccgtacagctcattaaagatctggccagggagatccgcctggtggaagacatcttccaacagaacgttgggaagacgagcaatatctttgggctgcagaggatcttcccagccggctccattcccctaaccaggccagcccattccacttcagtgtccatgtccaggctgtcactgccctccaaaaatggttcaaagaagaaaggcctgaagcccaaggaactcttcaagaaggcagagcgaaagggcaaggagagttcagccttggggcctgctggccagttgagctataatctcatggacacatacagtcatcaggcactgaagacaggctctttccagaaagcaaagttcaacatcactggtgcctgcttgaatgactcagatgacgactcaccagacttggaccttgatggaaatgagagcccattggccctattgatgtctaacggcagtacgaaaagggtgaagagtttatccaaatctcggcgaaccaagatagcaaagaaggtagacaaggctaggctgatggcagaacaggtgatggaagacgaatttgacttggattcagatgatgagctgcagattgacgagagattgggaaaggagaaggcgaccctgataataagaccaaaatttccccggaaattgccccgtgcgaagccttgctctgaccccaaccgagttcgtgaaccaggagaagttgagtttgacattgaggaggactatacaacagatgaggacatggtggaaggggttgaaggcaagcttgggaatggtagtggcgctggtggcattcttgatctgctcaaggccagcagcgaggccccagcttctcccagcactcaggaggccatccagggcatgctgtgcatggccaacctgcagtcctcatcgtcctcaccggctacctctagcctgcaggcctggtggactgggggacaggatcgaagcagtgggagctccagcagtgggctgggcacagtgtctaacagtcctgcttcccagcgcaccccagggaagcggcccatcaagcggccagcatactggagaaccgagagcgaggaggaggaggagaacgccagtctggatgaacaggacagcttgggagcgtgcttcaaggatgcagagtatatctatccttcactggagtctgatgatgatgaccctgctttgaaatctcgacccaagaaaaagaagaattcagatgatgctccatggagtcctaaagcccgcgtgaccccaactctgccgaagcaggaccgtcctgtgcgtgaggggacccgggtagcctctattgagacaggtttggctgcagcagctgcaaagctggcccagcaggagctacagaaggcccaaaagaagaaatatatcaagaagaagcctttgctgaaggaggtagaacagcctcgccctcaagactccaatctcagtctgacagtaccagcccccactgtggctgccacaccacaacttgtcacctcctcctcacccctgcctcctcctgagcctaaacaagaggccctgtcaggaagtctcgctgaccatgagtacaccgctcgtcccaatgcctttggcatggcccaggcaaaccgcagcaccacacctatggcccccggtgtcttcttgacccagcggcgcccttcagttggctcccagagcaatcaggcaggacaaggaaagcgtcccaaaaagggcctggccacagcaaagcagagactcggccgtatcctgaaaatccacagaaatggcaaactacttctacgacaggtcatcgttcaagcagaatgcagacaggccattcacgagcccaagttgaagagaagagacgcccatccgtgaaggagcagaccatccatccgatcctccccttcccctgtccttccttcgtggattgtctccattgtccagacagtgcccccacctcccaccgccttgcctcactggcaatctggactcgatggagaacatccccccacctccatttggcactacccaagtggagtgtacccttgccctttccacctgtaccacccactccaacctcaccccagcttgcccaatgcttctggggaatttaatagctaccatgcaggccacagggaatttgtgaggcttcttttgtcatctttgtatctccagtttgtctttcttttctccatagccctgcctctactttccttccttggaatcaggggttcctttagcccatttgctttctctaccttggggaccccaggggccaagcagttctccatctagtcacaccaaaggcaaaaagcctggctacctcccccctagcacgtgagtccctactcccctcccctctgtttctgcccagctttgcttattttggggatttcaaggcagcagagggtagtgaggggagagcaggagaagcctctgtcctgtataggcaactgcctgactatgcggtgactgctgtaaccaagatcaggtccccagcccttttgtccattaacaccccttcttgatctttcaaaggcagctaattgctagcaaatccccccgattccggccttttccctctatttctttgttagaagttttctgtggagctgaaacccagcctctgtttgactgggtttcatttagcttagttgggttcttagagccccctgtttgttgttttgtgttgtttccaatgaaaagcaagtttaccctcagagttatgcttttccaaagaggctgatgtctttgtttttgttttttttaatgtttcaggttctaagtgaagtgagttggggaggggttgggagtgttagtaatcaaggtttagaacaccatgagatagttacccctgatctccagtccctagctgggggctggacagggggaagggagagaggatttctattcacctttaatatatttttacaaaaaaagcaaacaatttaaaaacaagcccaccgcttctgtacatgtctaaatatatttttagaagtgggtaggattgtgaatttctgatgcagggcctttttataaataggttagggtagcatcattcagacttctctgttgtttttgtccctgtctttttcttatgttgtgttactaatgtaatttatattttttttagatcctccctttcctatagagataaaagtgatttatcttggcaaaatcctaattaaaa

SEQ ID NO: 498364 - DNA, 344 bp, Homo sapiens
tacgctgtacgcagtatgaaatgccacatatgctaggcactaatggccatttccacataagattagtggaccaaggttgcctcagctaacatactacagaatgagaaagtgcagataaagacgattactgctcctatgctctaaaactggtgcttgggtgatcagaagcagcgagccaatggcaagagcacttctgagtgataactaaagcagattggtggactgttcacattctccaatgatcaaacatactttccactgtccattttctctttcacctcattttgcctctctatccgccatccctgcttatttcttaagcccatagatggcactcattaaat

SEQ ID NO: 498365 - DNA, 271 bp, Homo sapiens
agaggaccccttggagccttacctaatatgcagagaatcccgtgaggccgttaaccctagggaatgggtgtagatagttttgtgagtggagtgatatcaaaatgacgccagaggaatagtagggaaatacggactgttgcatggtatgtcaggatggtatcttccagaaatgagtcacactggttggtggcggagagagacaagaaaggtggatgttatcattcaagatgatatcagttcaagaatttacccaggaggaatacggggtaag

SEQ ID NO: 498366 - DNA, 5302 bp, Homo sapiens
  misc_feature (4964)..(4965): n is a, c, g, or t
  misc_feature (4971)..(4971): n is a, c, g, or t
gacagctcagatgaagtgattctgaagcccactggaaatcaactgaccgtggaattcctggaagaaaatagcttcagtgtgcccatcctggtcctgaagaaggatgggttgggcatgacgctgccctcgccatcattcactgtgagggatgttgaacactatgttggttctgacaaagagattgatgtgattgatgtgacccgccaggctgactgcaagatgaagcttggtgattttgtgaaatactattacagcgggaagagggagaaagtcctcaatgtcattagtttggaattctctgataccagactttctaaccttgtggagacaccgaagattgttcgaaagctgtcatgggtcgaaaacttgtggccagaggaatgtgtctttgagagacccaatgtacagaagtactgcctcatgagtgtgcgagatagctatacagactttcacattgactttggtggcacctctgtctggtaccatgtactcaagggtgaaaagatcttctacctgatccgcccaacaaatgccaatctgactctctttgagtgctggagcagttcctctaatcagaatgagatgttctttggggaccaggtggacaagtgctacaagtgttccgtgaagcaaggacagacacttttcattcccacagggtggatccatgctgtgctgacgcctgtggactgccttgcctttggagggaacttcttacacagccttaacatcgagatgcagctcaaagcctatgagattgagaagcggctgagcacagcagacctcttcagattccccaactttgagaccatctgttggtatgtgggaaagcacatcctggacatctttcgcggtttgcgagagaacaggagacaccctgcctcctacctggtccatggtggcaaagccttgaacttggcctttagagcctggacaaggaaagaagctctgccagaccatgaggatgagatcccggagacagtgcgaaccgtacagctcattaaagatctggccagggagatccgcctggtggaagacatcttccaacagaacgttgggaagacgagcaatatctttgggctgcagaggatcttcccagccggctccattcccctaaccaggccagcccattccacttcagtgtccatgtccaggctgtcactgccctccaaaaatggttcaaagaagaaaggcctgaagcccaaggaactcttcaagaaggcagagcgaaagggcaaggagagttcagccttggggcctgctggccagttgagctataatctcatggacacatacagtcatcaggcactgaagacaggctctttccagaaagcaaagttcaacatcactggtgcctgcttgaatgactcagatgacgactcaccagacttggaccttgatggaaatgagagcccattggccctattgatgtctaacggcagtacgaaaagggtgaagagtttatccaaatctcggcgaaccaagatagcaaagaaggtagacaaggctaggctgatggcagaacaggtgatggaagacgaatttgacttggattcagatgatgagctgcagattgacgagagattgggaaaggagaaggcgaccctgataataagaccaaaatttccccggaaattgccccgtgcgaagccttgctctgaccccaaccgagttcgtgaaccaggagaagttgagtttgacattgaggaggactatacaacagatgaggacatggtggaaggggttgaaggcaagcttgggaatggtagtggcgctggtggcattcttgatctgctcaaggccagcagcgaggccccagcttctcccagcactcaggaggccatccagggcatgctgtgcatggccaacctgcagtcctcatcgtcctcaccggctacctctagcctgcaggcctggtggactgggggacaggatcgaagcagtgggagctccagcagtgggctgggcacagtgtctaacagtcctgcttcccagcgcaccccagggaagcggcccatcaagcggccagcatactggagaaccgagagcgaggaggaggaggagaacgccagtctggatgaacaggacagcttgggagcgtgcttcaaggatgcagagtatatctatccttcactggagtctgatgatgatgaccctgctttgaaatctcgacccaagaaaaagaagaattcagatgatgctccatggagtcctaaagcccgcgtgaccccaactctgccgaagcaggaccgtcctgtgcgtgaggggacccgggtagcctctattgagacaggtttggctgcagcagctgcaaagctggcccagcaggagctacagaaggcccaaaagaagaaatatatcaagaagaagcctttgctgaaggaggtagaacagcctcgccctcaagactccaatctcagtctgacagtaccagcccccactgtggctgccacaccacaacttgtcacctcctcctcacccctgcctcctcctgagcctaaacaagaggccctgtcaggaagtctcgctgaccatgagtacaccgctcgtcccaatgcctttggcatggcccaggcaaaccgcagcaccacacctatggcccccggtgtcttcttgacccagcggcgcccttcagttggctcccagagcaatcaggcaggacaaggaaagcgtcccaaaaagggcctggccacagcaaagcagagactcggccgtatcctgaaaatccacagaaatggcaaactacttctgtgagccctcctgtgtcccacccctcacccctttacccccattgccttctccattgtcaactcttggggcactcctggatcctatctgccctggacaaggtgctgaggtgcattgtcctgctttcttgggacttaccaaaggcacggacccctccaccgactccttctagttcccttccccactttcactagagcatcctgcctgccttctccactgaggagcaggtaaatgggagaggtttccagctgactagaaccctcttttctactcgtccaaaccactcccgtcacctgccttgtctgttctttattcttcatcccccgctagagctggaaggcaggatgaggagaggtatgaaggagcctgagccatgaagtgggaagcccagtgcttgacactttctgcaactctagccctatatccagaagcctgcccacctccacccattctgtttgccccatttccccagtccagtggacatgccccacctccagacttgctcatgggagaaggctgtggtctctgccccctcttgccaaatgcttcatggaaatgaagaggaaggcctagagcctccttcctgccccactgtgggccatttccagaagtggcctagaaatgccaacttcacttacctttcaaaagaaaggtgattcctatcacttgtcaaggtagggagaggtcagatgcccaagcctttgaccacggttttgtagcctgttggaggaagctacttttagctggctacacatgaggccacttgttttagggtgagctccagggatttgcctggattttgaaatcatgtagaacattatccacgtggctgtggctgtggctgtggctgggccctggcaggtggaaaaccatctcccagaaacctgaaagcacctgccaatgacgcagataaccctggccctacagcctgcttgctccgcctataccacagagcacagcctggacattatggagggtgtggcgggacggcccacacctgggtcctccatcgggaacttttcatgcttctttctccacctgaggtcttggtctgaagaagacctcaggactcacatcttcactcctgggcctttgcacttccagacgacaggtcatcgttcaagcagaatgcagacaggccattcacgagcccaagttgaagagaagagacgcccatccgtgaaggagcagaccatccatccgatcctccccttcccctgtccttccttcgtggattgtctccattgtccagacagtgcccccacctcccaccgccttgcctcactggcaatctggactcgatggagaacatccccccacctccatttggcactacccaagtggagtgtacccttgccctttccacctgtaccacccactccaacctcaccccagcttgcccaatgcttctggggaatttaatagctaccatgcaggccacagggaatttgtgaggcttcttttgtcatctttgtatctccagtttgtctttcttttctccatagccctgcctctactttccttccttggaatcaggggttcctttagcccatttgctttctctaccttggggaccccaggggccaagcagttctccatctagtcacaccaaaggcaaaaagcctggctacctcccccctagcacgtgagtccctactcccctcccctctgtttctgcccagctttgcttattttggggatttcaaggcagcagagggtagtgaggggagagcaggagaagcctctgtcctgtataggcaactgcctgactatgcggtgactgctgtaaccaagatcaggtccccagcccttttgtccattaacaccccttcttgatctttcaaaggcagctaattgctagcaaatccccccgattccggccttttccctctatttctttgttagaagttttctgtggagctgaaacccagcctctgtttgactgggtttcatttagcttagttgggttcttagagccccctgtttgttgttttgtgttgtttccaatgaaaagcaagtttaccctcagagttatgcttttccaaagaggctgatgtctttgtttttgttttttttaatgtttcaggttctaagtgaagtgagttggggaggggttgggagtgttagtaatcaaggtttagaacaccatgagatagttacccctgattcctttgcccgacccaaaggggtttttccccacccccccttaaaaaggnnccttgnctccagtccctagctgggggctggacagggggaagggagagaggatttctattcacctttaatatatttttacaaaaaaagcaaacaatttaaaaacaagcccaccgcttctgtacatgtctaaatatatttttagaagtgggtaggattgtgaatttctgatgcagggcctttttataaataggttagggtagcatcattcagacttctctgttgtttttgtccctgtctttttcttatgttgtgttactaatgtaatttatattttttttagatcctccctttcctatagagataaaagtgatttatcttggcaaaatcctaattaaaa

SEQ ID NO: 498367 - DNA, 364 bp, Homo sapiens
atctagcagatctcgcgtcgaccttctgctctgtgatcagtgggggtatggggggacagtatagcagaaggcctggctcaggtggttttgacagtgaactgaaccagtgaaaccagagggaacttgcatcgtgattcccatgggagtcccagacaggtaacggctgagtctcctacttctacagttcaacatcactggtgcctgcttgaatgactcagatgacgactcaccagacttggaccttgatggaaatgagagcccattggccctattgatgtctaacggcaggtgaggtgggaaggaggagcacagaggtactgggactgtcagtggtaatatgccctgagaacaaggtagagccgag

SEQ ID NO: 498368 - DNA, 121 bp, Homo sapiens
tggggtgatctagaggatcccggtattattgtttgaggttagttggattagtcatgtggggtggtgattagtcggttgtgatgagatatgtggaggtggggtgtgtgcgtgtgatatgtag

SEQ ID NO: 498369 - DNA, 133 bp, Homo sapiens
aggggcacatacccttgcatctaccgggtcttgcattgtacctgggatcaaacaaccccctaggaatcacctcccattccgataaaatcaccttccacccgtacatgcacgcccggtacccggtacatgcaag

SEQ ID NO: 498370 - DNA, 230 bp, Homo sapiens
agaggatccccgaatagtgaataggtaggtaatttagaatatacagtcagaggagaaaaagagaatgagaaggaataaagaaaactatataagattgctagggtgtagtggctcatacctgtaatcccagcacttatgggaggccgaggacgagagtaatcactctgagcccagagagtttagagactagcctaggacaacagaagtgagacccatgccctactacaaaa

SEQ ID NO: 498371 - DNA, 133 bp, Homo sapiens
ctagagcatcctcttattggttcttctactattagtgactttcgcttcgaagcgaaagtcctaatagtagaaaacttcaataaactggagtgactatatggatgccccaccctacgtatcgaagaaacaatag

SEQ ID NO: 498372 - DNA, 150 bp, Homo sapiens
taatcacggatcccccggccgcacagcttcgtctaaataatacgcagaatttagccacggcatgatggctacacatctgtaatcccaggcattactgtggaagtgcttgaggcacaagaatcgcgtgtacccaagaaggtgtggcggccg

SEQ ID NO: 498373 - DNA, 1001 bp, Homo sapiens
  misc_feature (295)..(295): n is a, c, g, or t
tgcccacaaaaaagggggttgggggaaaggggggcccaaaaccccccccggggggttttttggttcaccaaaaaaaaaaaaattccccaaaaaaaaaaaagaggggggacggcgcacataaagatcaccaggaggggggacaaacgttactgcgggcaacccagatttattaattacaaagggggcacccaacgagggcggatcgttcaacacaccaagccgagcggacagcgcaataaaaaggaatgtgaggagagaaaagagtgacgatagggacactcgtgaagagaacacnaatcacagtcggggggggacaaacatgatgcacacaccacacacgaaagaacatatcaacgcccgcacgcaggcataaccaacaacaaagtagacgcgggtagtaagaggtggacacaacgcacgcagcaaacagagagagaggcagagcaaaaaaatgaggacacgagagagcaagaacatacagcaagagaacaacactcaatatcacccgagaggacgtgatagagattaataaaaagggagaacagaaacagacagcgactaagaagaacgacgagaaagaacgaacagatagctagagagcacaactaacagcagaagaagaagaaacaacgacgaggaagccacagcaagaaaagaaaagacgaaagcacaaggagcaggcacataaggacatacgacatgaggaaaaaggaaggcaaagaaagcgagaaagacagacgagggggagggagggaagaaaaagacgcaagagagcagacaaagagcaaagagcacgaaagaggtaggaagaagaatagaaaggaaaggagagaggacggagaaacgagaagagacaacagaagtgacagacagaaagagaggacgaggagaaacaagaacaagagaagagaagactaaaagaagccaccagaacagaaagcaagcaacaacaggcaaagcaataagaagatcagaagaaagtaagagacaaagcaggaaaa

SEQ ID NO: 498374 - DNA, 143 bp, Homo sapiens
tcccgggggcgggggggtttttcccccccccccccccaggggggttaaaggtggggggttttgtggcccttccaaaaaaaaatttgtttataaatataaaaagttaaaatcaagaaaaaatcattaaaataaatttaaagtta

SEQ ID NO: 498375 - DNA, 974 bp, Homo sapiens
  misc_feature (166)..(166): n is a, c, g, or t
  misc_feature (185)..(185): n is a, c, g, or t
  misc_feature (188)..(188): n is a, c, g, or t
  misc_feature (207)..(207): n is a, c, g, or t
  misc_feature (223)..(223): n is a, c, g, or t
  misc_feature (242)..(242): n is a, c, g, or t
  misc_feature (248)..(248): n is a, c, g, or t
  misc_feature (255)..(256): n is a, c, g, or t
  misc_feature (261)..(261): n is a, c, g, or t
  misc_feature (263)..(263): n is a, c, g, or t
  misc_feature (271)..(271): n is a, c, g, or t
gacttccggtcgctattcggtctactacagcggccggtttctagcgtacctgctgccgcaggttccaccgcgctccaggtatttttttttctgaaggaaagctgcttcctcatatgtttcaagaatggctctcctatcattgtaaaatggggtggacaggagtatncagtgaccacactttcagnagntgatactgtgctcgatctnaaacagtttctcaagnccttacaggagttcttccngaacgncaaaagnnacttngnctcaaagntaaaggcaaaccttgccagacacactgatgtcaacgcttggagctctcaaactgaaaccaaatactcaacactcatgatgactgggaactcgtgaggaagagcttggcacgcatgtctcacggtccaccaccctgaccactgcatgatgtccgccacatggaccttcgatatggaagactgaacgtcacgtccgaacttctacacatacgcggaacgacacacctacctggcacattcctcgcagaagtcgccgacataccaacgtggcacactttcgcacatccctcccacggccaaaggcgcaacgaagccacacggctggcctagcaatggtcgaccaataaccattcaatcaggaaccaccagggcactacgcccccgacaccactgccgctcacacaccctgcgccccaaaattggcctggacacagttcctcaagacatccggcccgtagtgcgcagcactcctgcacccgcggccaaacgcggccccgcaacccaaactatctaccactcgcacctggtcaaccaacaagtcgacacaccactcgcgcccgatcccccccaccagtgccccctcccaagaacacaccactcacgagacgcaaacagacgcgcacagataaacaggccaaacgcccagcagaagcgctacacacccgaccgccgcgcacgacagacgaaagcgactcgcgcacacac

SEQ ID NO: 498376 - DNA, 123 bp, Homo sapiens
tgtccaaacagtattgcaccgtagtcatcacaggagacgcaaagaggtcctagatatcccccttttggaatgtgagagacttgttgtctgatatttgccactccgctggtgatagcccgtggc

SEQ ID NO: 498377 - DNA, 369 bp, Homo sapiens
tttgaacccctggggaaaactcttggtttggattaaacccctttgtctacccagggaaaacctcccctttggttttgggcgggcccatttctttcagaaagttttttgattccccccgggtttaggattctggggaaagggggagggggctgggggggggttttgttgggtcccaaaaagttatccccttttaagcggggccccaagaccccgtaggggcttttttactatattggaccttttttcccttgcccttggccccttggataggttcgaggcccgatttgatttttagccgcccccaggtggttttaatgattttttgcttcccgggaaacttttttaaaaaaaaggttgttttttttctta

SEQ ID NO: 498378 - DNA, 632 bp, Homo sapiens
ctctttcctgcccagagctttaatgatgggggggcccttttttttggggcccttttaaaaacccaagggcccccgttgggggggccccccccccctgggggcacaggaaaacaaaaactccccccctccttggtgggcctaaagccaacttattttttcttggactgggattaaacccaaggttggtgcctccccccccccccaggaaacaagtttttagcacattttcctgggtttgcccttgcaaaacaacccccccctttttgtttttggggggaagggttatggcccccccgggttttccaaacacctctgcccttatttacctggggttatttgtgggcggataaaagagggggggattttaacaccccgggggcgtttatttttttttttttattaaaaataaagttccgggggggctccccacaataaaataacattttttttccaaaaaaaccaccccctcttttttaagcaaaaaaatttgttgcttgcgatttccctcattaattggcgggtggctcctccccctctgaaataaaaaaagacccccacaaagcgggtttatatacttttctctgggcgccatctccaacactcttctatagaagagaatatattggggcccg

SEQ ID NO: 498379 - DNA, 428 bp, Homo sapiens
  misc_feature (50)..(50): n is a, c, g, or t
  misc_feature (61)..(61): n is a, c, g, or t
agtagctctgcagtcccagtgcttgtgatcatattcaggtatcatctatnggatcacttgntaaccagttgagaatatgctacttgagccagccttccttataggaagctaacgctatctatttatcctgatggtagctgctaagcacaagcaggacaacaaaaaaatctcaaaactctcagaagttacataagcgtctcaccaaagttatctgtggtttgggcttgtgagcgttctcataccaaaataccaaagaccagggggcttaaacaacagaaattggtttcctcacagttctggaggctaggcgtccacgttcaaggtgttggcagagtgggtttcttctgaaaaccccttttgggttgaagaagtctaccttctccgagggtcctccatcggacactggtgtctctctctatatgtcccaa

SEQ ID NO: 498380 - DNA, 115 bp, Homo sapiens
accgataacaatctccgaccttacttactcaccttgagcatccggatgacacatgatctccatctcctcaacacagacaggatcactggtctctggcttccctctccctgacttt

SEQ ID NO: 498381 - DNA, 1064 bp, Homo sapiens
ctggcgcaatagatatagtaccgcaggggaaccgatgaaaaattataatccaagcataatatagcaagggactaatgcgctcgtagtaccgttcgtagcatagatgaagttaacctagaaataacctttgcagatggacgagccaagagcgtaagagcccctgaaaccaggacgagcataccgtaatgaagcagctgaaaagatgcgacacccgtcatatggtagcagaatagctgggaaggatagagtagagtaagaggccgacaaagctagtcgagccgtggtgatagcttggtcgtccaaggatagaatacttagttgcgaacctgttatacatttggcctcgacgaagaacccgtctaatatgcccccgttaaatttacagctggttagtccaataggaggacacaggtcgtttggacacttaggaaagagaacccgttgttaggagacgagtacacatatatttaatcacccaatagtagggccgtaggaagcagccaccaagtataacgaaagcgttcaaggctcaaacactccagtagctaaaagatccgcaatacatagtaagctgaactccgtcgacaaccgaagtttggaccacttctatgcaacctatagaagaaccgtaatgtaagtatagagtaacagtgaacaacagttctcctccgcattaagcctgcgtcagattaaacaccgagtgaacgtgacaagtaacaggccctatatctacaatcaagcaaggagtcattattagcctcagtgttaagccaagagaggcattgctcataaggaaggtaaaaaagtaagaggaattgggaaatattacccgcatgtgagcaaaaattgctgtaggatcacaagtattagagggacagctggcagtggaaccctgttcaggggcggggtacccaagcgtgcaaggtagatattcacttgttcctaagtaggactgattgaatggcccagagagtaagagatataattaacacgtatggactgcgtaaagggcttaccgggaagaaacctatgatattatacaaagacaaaaccaggtaaacaat

SEQ ID NO: 498382 - DNA, 912 bp, Homo sapiens
acagcgtctctggaccgccgggagcgtgacgtagcgtgcagcgcgaccataggtggcaccgtagcgctccagtgccctcgcccagaggtgtgtctcgccgcaatggtgcagacaaggcagcgcgattgtgcacgcccccgggagaaggcaattgacccgcggaaatatctcgacagggggtgcataaccctatagcgcgaaatccgcaggggtccccccccactaaagagtctggcggcagaaccaaagaagtgggtgccacggcggcaaaaccccacgagggcccctgaaacacgctggttccggcggaacacgcgcccccgttcatggcgcggtaccaccaccagcggcccccccgagagggggcttagtgtgcgcccctcgcccccaccgcgcgtcgtagactcccccgccaatggcgccccgggggtgggggacccccaaccggcgcgcaaatgctcatagcctgggaccgccgcgcccccacccatagagtggggtgatcccccacgccgcccgcggttgtcgcccccctgcgtctttcgaagaggaaaaagtgaagaaggcgcggcttgccgcacaaaaaacggcggtcgatctaatctagcgggtccatatccaccacgagcagtatcttgtagcacccactgggcgatccccggaatgcgcctcgggccgcgcctgacattgagtgggcaatcttcttctgcccagagagaaggagcagacttcttcttgcaattctgtgaacacatttttaagatttgtgtattgactagagcacaaatgaaggcacccggcgtgtcacccaaaaaacaaatagtggaccgcagagtgagtcataatcacagaaaatagagtgcgatcatccacgtgctctcccaataataaaaattttaaaaccacaaaaac

SEQ ID NO: 498383 - DNA, 346 bp, Homo sapiens
  misc_feature (25)..(25): n is a, c, g, or t
  misc_feature (71)..(71): n is a, c, g, or t
  misc_feature (103)..(103): n is a, c, g, or t
  misc_feature (122)..(122): n is a, c, g, or t
  misc_feature (144)..(144): n is a, c, g, or t
aactgcctaaataggccagccgcgncggttcaggcctgtaaacccagcactttgggaggccgcccgtgggncgctcacttgaccgccaggagttcaagaccanccctggccaacatggtganaccttgtctctactaaaaatanaaaaattagccggctatggtggtgggcacctgtagtcccagctactcgagaggctaaggcaggagaatcatctgaacccgggaggcggaggttgcagtgcgttgagatcacgccactgcactccagcctgggcaacagagcgaaactatgtctcaaaaaaaaaaaactggcctaaataacctgttcacttttcttcaggcag

SEQ ID NO: 498384 - DNA, 604 bp, Homo sapiens
  misc_feature (20)..(20): n is a, c, g, or t
  misc_feature (97)..(97): n is a, c, g, or t
  misc_feature (100)..(100): n is a, c, g, or t
  misc_feature (173)..(173): n is a, c, g, or t
  misc_feature (177)..(177): n is a, c, g, or t
  misc_feature (179)..(179): n is a, c, g, or t
  misc_feature (200)..(200): n is a, c, g, or t
  misc_feature (221)..(221): n is a, c, g, or t
  misc_feature (230)..(230): n is a, c, g, or t
  misc_feature (250)..(250): n is a, c, g, or t
  misc_feature (277)..(277): n is a, c, g, or t
  misc_feature (399)..(399): n is a, c, g, or t
  misc_feature (445)..(445): n is a, c, g, or t
  misc_feature (475)..(475): n is a, c, g, or t
  misc_feature (512)..(512): n is a, c, g, or t
  misc_feature (515)..(515): n is a, c, g, or t
  misc_feature (518)..(518): n is a, c, g, or t
  misc_feature (540)..(540): n is a, c, g, or t
  misc_feature (542)..(542): n is a, c, g, or t
  misc_feature (568)..(568): n is a, c, g, or t
  misc_feature (573)..(573): n is a, c, g, or t
  misc_feature (577)..(577): n is a, c, g, or t
  misc_feature (591)..(591): n is a, c, g, or t
gttgttctttatagagctcntaacatatattttttgcagcaggttccatagttatgaaggggatgccgtggagctctgttttgttttttgtggtggnatngtcttcttgtgaagagcacagggtgctccattgacttcactggctccatccattttcttgggcctgagctgtngttntntgttagtttattccataagcntgagttcctgctgctcctttngtgctcttntaaggggaagcttatagttnttctgtttttttattaaaatgttcatnttcttatccatatttttttgcattttctttataatttccacaaattcgtgaagtttattaaaatccttgttcattagatcctttatctgttttatcttctccattttctccttgagctcttntctgagttgcctgagtacattctttaggtcctgtgttactcctgcnttggtaaaccgcccttcttgtttaactgcnttgtaatcaaatgttttggtcggctctggcttgaatnccnggnaaactgccttgtagttcttgcncngatgtgtattcttcaattctgccctnttggncganatgatggaggaggncagggtgttcttc

SEQ ID NO: 498385 - DNA, 173 bp, Homo sapiens
tttaaagtgccaagggtgatcgagtttatatcctgttcaacacctttaagccttttatgctatgtctattagcttgatttaggatcttgaaatttcataaatggtattttaattatgatgatcataatgcgtcccctgctataggaccacatgatattatatgtttacatttc

SEQ ID NO: 498386 - DNA, 506 bp, Homo sapiens
  misc_feature (101)..(101): n is a, c, g, or t
  misc_feature (134)..(134): n is a, c, g, or t
  misc_feature (307)..(307): n is a, c, g, or t
  misc_feature (350)..(350): n is a, c, g, or t
  misc_feature (355)..(355): n is a, c, g, or t
  misc_feature (366)..(366): n is a, c, g, or t
aagttgtgccacccacagcacaaaaaaagtgactagaaacctggttttggggtttttctgcccattgtcacaaaatttcattctttttcatgatttccatnataccaattctacctatagtgtcagaggctccntggacaccctgaaagagagctctcttctgagtgggctaacgtacagggctacagggccaagctgagaagctctggcattgaaagaaaaataaaacgtgacagccgattgacgaaaaaataaaacctcatttctgaagccagatataactggccaagaaagctgcttgggtgancctggtcccccacctgatcagggccactccctcatctgtcctnctcanggcatcgctgnggtgtccagacaggtccccgtaatgtgccgggtgtccccagctgatgggccacctcagccttcccaacgctccccgagcaccacagatcgccttcactacggccccagcacggccgtactgaggttccatcgcggggatc

SEQ ID NO: 498387 - DNA, 198 bp, Homo sapiens
accacagcggggtggtggaatacttacaccctcttgacagcgagaaacagaaaagagggcggcacctgcagggactgtgtgggcagtcctgcaaaaccaacatgccatggttgatgtgagccttcattccccaggttgccactattgggctcacgtgtggagggttcatggtagccttgtcccccgttgcttgtatct

SEQ ID NO: 498388 - DNA, 474 bp, Homo sapiens
ctgaaatgagccatagttcccctgtagattacccacatgaaaaaatcgtggtccatcctgacagtattataccgagtacatattcgaatgcaagaacatatcattcactagaatataaatggcaaacatatggtcaacatcaagtccttgtatagttcctaaaccgtttaagggaactatattcttttattcatcctatataataaataaattattatatttttatttttatcagtaaccctactaggaggcaaagttagcacatatttggttcctaagcgctagccgacatttatgcagaaggttctctattttggggggcatcttcaagagttcacagatcacatggcaaagttcaaggttgtgtcaggaagtaggagccgtgacttctgactcttaggattgatgaaccttccacgttttgatttttccaaatggcatgttagtgtatctgggagaagattaggatgtgtg

SEQ ID NO: 498389 - DNA, 925 bp, Homo sapiens
cgcttcttctgttgggcgccggtctctgggccccttccccaccatgggcgtccgggtaaagcgcttttcttcccaggatgggccccctttctcgcagtgctttccttggccacaccccttggggatttccccccgccgcggtctatgcagagctcagggccctataggctctattgccctctcggtcccagagaccacggttgtgcaacaagcgttctggttaggcgcccaaatttgtctacgccggcgtcttgtcgttcccgcggctttggatataaagccacctggctttcagagcggggcactctgccttttttctcacgggggttctccggacaccctaatcgctgggttattttccccggggccaccacttcgccacccgcagggtcctctctctttctgagtccaataataatcaggagggccagtgtgagttccccggccgctcaagggcaaggcacacccacggggggattctattctcctgcgcgtttgagcagggaaaaagcagagtcgttcaaggcagggagcctcttccaccacagaacaatgagggggacatcaggcacacgcacttgttagaaccgccccctcaggagagcttgggactactacgacttacacccgttggatgcgattttattgatgtttccaccagcggtttgcctagcacaccaagtccccaccactctctcgcacacggcacgcaaagcagctgctctaatgcccctcctccgcacataaagacaattctctcgtcctccgtaccccggacctcacatatgagtcatccgcgcatcaaaaccccgagtgttttgtctttttcgagccccattctagacccccagtttcacaatccatttttttatgatggaacaaataaggtgaaaaaaaataccacccctaaacgcccacaaaaaca

SEQ ID NO: 498390 - DNA, 819 bp, Homo sapiens
agatactcggcagtgctgacgtagttattactgttatattttactctcaatagaggcttatttatttatttatttattttattatactttaagttttagggtacatgtgcacattgtgcaggttagttacatatgtatacatgtgccatgctggtgcgcaaggcaatttacagattcaatgccatccccatcaagctaccaatgactttcttcacagaattggaaaaaactactttaaagttcatatggaaccaaaaaagagtccgcatcgccaaggcaatcctaagccaaaagaacaaaagcttggaggcttcacatctacctgacttcaaactatactataaggctacagtaaccaaaagagcatggtactggtaccaaaacagagatatagatcaatggaacagaacagagccctcagaaataactctgcatatctacaactatctgatcttcgacaaagctgagaaaaacaagcaatggggaaaggattccctatttaataaatggtgctgggaaaactggctagccatatgtagaaagctgaaactggatcccttccttacacattatacaagaaatcaattcaagatggattaaagacttaaatgttagacctaaaaccataaaaaccctaagaaggaaaacctaaggcatcaccattcaggacataggcatgggtaaggacttcatgtccaaaacaccaaaagcaatggcaacaaaagacaaaattgacaaatgggatctattacactaaggacttctgcccagcaaaagaaactaccatcggagtgaacggcaacctacaaatgggagaca

SEQ ID NO: 498391 - DNA, 551 bp, Homo sapiens
gcggaggtcaatgtgtggctccacagagtgtgaataaagagcagctactgtgctgagcgcggtggctcacgcctgtaatcccagcactttcggaggctggggcgggcagatcatagggtcaggagatcaagaccatcctgactaacacggtaaagccccatctctactaaaaatacaaaaaattggccaggtgtggtgacaggtgcctgtagacccaggttacttaggagggtgaggcaggagaatcgcttgaacccgggaggcagagattttggttagcctagatcacgccattgcagcccagcctggacaacaagagccaaaactctgtctccaaaaaaaaaagtggattttggatcttgaagaggtacttatacacttatgttcattacagctttattagcaatagccaaaaggtggacgcaagctaaatgtccattgagggatacatcgaggaagaaaatgtggtctctacacataacgcaatattattccatcttaaaaaagaaagaaatcctgtcctatgctacaatatcaatgagcctgaagat

SEQ ID NO: 498392 - DNA, 279 bp, Homo sapiens
  misc_feature (29)..(29): n is a, c, g, or t
  misc_feature (32)..(32): n is a, c, g, or t
  misc_feature (160)..(160): n is a, c, g, or t
  misc_feature (187)..(187): n is a, c, g, or t
  misc_feature (230)..(230): n is a, c, g, or t
  misc_feature (271)..(271): n is a, c, g, or t
cggccaggaggaacagaacaaaagcgagnagngaggacgtatggaaaacttctgggcggaaacctctccttatctcactggcccatcccagcctcggccaacttcaaagttaaaagaaggtgggatgatgacgttgtcttcaagaactgtgcaaaaggtntagatgaccagaagaaagacaaaagantaaatgacacactgcgatctgaatttcacaaaaagtccatggngaaatatattaaatagtacagatgtgcttaattaaagactntaaaacgc

SEQ ID NO: 498393 - DNA, 89 bp, Homo sapiens
  misc_feature (52)..(52): n is a, c, g, or t
gtcttttattgcagcatttgaatatcaccaatggaggtcttaagtgtcatgntggcatcatctttctgtagttaggtagctcttagatc

SEQ ID NO: 498394 - DNA, 312 bp, Homo sapiens
cattgctcccatcagatatgtcaggccttttattacctagaggaagggaacgtaaaagaaaagaaaatactggcaaacgaatccagcagcacatcaaaaagcttatccaccatgatcaagtgggcttcatccctgggatgcaaggctggttcaatatacgcaaatcaataaatgtaatccagcatataaacagagccaaagacgaaaaccacatgattatctcaatagatgcagaaaaagcctttgacaaaattcaacaacccttcatgctaaaaactctcaataaattaggtactgatgggacgaagatgg

SEQ ID NO: 498395 - DNA, 271 bp, Homo sapiens
tgggggggggggggccccccgggggcccccccccccccccgggggggggggggtttttttccccccccgggggggggggggccgggggggtggtttcgccccccccccccccccgtgggggccccgcaggccccccccccttttttaaaaaaaaaaaaaaaaaaaatttttttttgggggggggccccccccccggggggggtgggggggttttctgggggggttttttttaaattttttttttgggggggaaaaaagctttcttttttta

SEQ ID NO: 498396 - DNA, 306 bp, Homo sapiens
gtcgaccgcaggtcacccagggtagaaccatcaggcatggaacttcggatccttcgagccagtctcgccggagtaggacataccgcacttgggactgcgcatcgcgacctcaccgacctcaacgccgtccttggcggcagctcgtcgggctcagcgatacggtcgtcaaaaaccttgaccacctcgacgtcgtcatcagtgctggcccgaccagctgtaccagccattcccggcagatcgaagggacgcaggaaggtgttccagaaggtctcagtggtgccgtacccgttcgagatattgggggtg

SEQ ID NO: 498397 - DNA, 549 bp, Homo sapiens
  misc_feature (192)..(192): n is a, c, g, or t
tagaggatactccggagtgcaatggctaggtcatggttagtgcagtctccacctcctgtgctcaagcaatcctcccatctcagcctcgcaagtagctgagacgacaggcacatgccacacaccaactaattttttaactttttgtagagatggggttttgctgtattggccagggtggtctccaatgcctgngctcaagcagtcctcctgtctcatcctcctagaatgcagggttacaggcatgagccaccatgcccatccttgggattggctttttcaatcagcataacttctggggctccatccatgtttttgcatgtatcaatagttcatttttattgctgagtagtcttccatgccgtggatgtaccacagtttgtttaaccattcatctgttgaaggacatctgcattttttttttcttgtttttgactactattgagaagctgttataagcatttatgaacaggtttttcttttcttttttttttggagatggagtcttgctcttgtcccccaggctggattgcatctcagctcactggacct

SEQ ID NO: 498398 - DNA, 194 bp, Homo sapiens
atccccatagcaaaagcacatccccttcccgggtccagcagaggtcggggcactgcacccatcgggggtcaggtccgtgtctccaagcagcaaagaatctccacatcccccatcaggtcggttaggtctccatggctcatgcgtaagcatcaggcatccagcgtggccacaggtcctgaagtgcctcccccttg

SEQ ID NO: 498399 - DNA, 132 bp, Homo sapiens
agatccgcgtgtacgactgcatctgtgctccaggtcatgcgattctgcgctcagcctcctgagtagctaggacgacaggcccaccacaccccgctaattttttggtagttttagtagaggcacagatgcagt

SEQ ID NO: 498400 - DNA, 1608 bp, Homo sapiens
  misc_feature (1608)..(1608): n is a, c, g, or t
ggagagagagagagaactagtctcgagtttatattttttttttttccaggcggccggaaaaatgggggactttcacacggagccgtgccacacaaaaagcgagccgcaccatactattaccaaacacaaaaacagaagggcccgtgcaggggacaaaacacgtggcaaggcagaaagctcccaggggaacaaacacaagaaacatcggaccagtgggctacaaaacaacccacaagaggaggtatattgtgaggcgcaccatacattgtgaccaaacaatagtgcctcctattacacagtgtgaataacgaggtgttccaattctcacacgggaggagaactccctcttcagtgggcgagatggagagaccacaagaaaatagaaaagatgacacagagagcacacacgtgtggtacaactcccggcgcgaagagcaacataaaacgagagccaaataacatatccgcggccacgagggtacacagcgcgcgggcttaacgaaagagagaacggggcccacaccaagagcagcacccaaagtgacagcagaagagaagacaccaccagtagaaacccccgccaccgtgagacacacgacggggagacccagagtacaaccaaaaaaaatactgagagaagagacaacacaatccagacatacacacacaagaggtagatgacgacagaaaaaaagcccgcgcagaggacacaatgcagaagagaaggcgccgcaacggggaccacaaggagtggacaaagcaatcctacaacacggaagatgatgagcacaacaaaagcggaggagaacaacacacacccaaaagagtagatcgctggccgcagtgaggcacacacacagaatgaaaaaagagaagcagtagtcaccaacaaaaaacaaaagaacaaacccgtcggagcaggggcgtgtgacggacagcccaacacaggaggaggacacaccagcgacaagtgcccgcacccacaaagaaagaaaaaggagcagacgaaccaagaatcacacagacacggagcgctaacaatctgatacaaacacgccctaccacaatcccacacacgacagaacagacaacaaccacaccaaccacacacagcacaaaaaaaaacacaaaagcacagcagacaagaaagacgaacaacaacaccaaaagaaaccagacaacaggacgaggcgacaggaaggaagcaagacaggaaaccaaaacaccaagcaaacgacagaaaggacgaccacaacgactgaacacaaacgtgccggccaacacatacaggtgagagacacagctacaacaacaaccagagagagaggagcagccagacagaaccacgcaccaaccagggaagaagaactagatggagtgagtataacacaaccaagaggagggggtgaaaaacaaaccactcacatacgagacaggcaggaggatcgaccgcacacgataaatgaaacgaacaggagaccaagcagcgcgacgaaagaaaaagcaagagatacgaaggagaagacaaaagaacgcaccgcaaggaggaaaatcaccgcccggaggacacaacatcaaggagcaccgacacgaataggaaaacaaaan

SEQ ID NO: 498401 - DNA, 1069 bp, Homo sapiens
ggacgcgtgggtcgacccacgcgctcgcggtacgcgtgggtgaagggatcaacgcgattgtggttgaaacaacatttagttcacaatccagtcagactctggcaacttttaggcgctggtactttctatttctaacacctcaaggttgaagcagaacgaataacgcgagaaggataagttcgaacggggcaaggcgcctgcaacgaggacgaagaggacgaggaccacgccgtgagcgggacgtacagaatgtaccgagcagcggctgcgcaccttgctggtcatcgcggttgtcatgagccctcctgaatgctctcagcaccagcggaggcagcatttcctggaacgacttctgtccacgacgatgctggccaaggcgcgcaggtgcagcgcgctcagcgtggtgcctgcagcagccgacgctggtcggaagatttaccttgcaaccccatggaacacctgctgagtagttatgaaagcaggactcaggactacccctatgcactgtaacctgaattgcaagcgtctgcaaactacttcgcacccagctctctgcccctacgaaacgcctcccgcacgcacgccctgaactgcatgacgcctgaaatatcgcagggcgccaacggacccacgggactccccacctctcccctatacacaacgcctaccccaggcatatccacttagggcacaacaatgccccctgacatacctcgtagctgcgcggcacttgaaccgcgccccgtagggaggacactagaggctccatacaactagaagcagtaaatggacataaacccccacgtcacaaggaaacagccgaacttcaacctggcgaagactggacacgggtcgtgacttcaacactggccacacccaacaacccacaccacaaaaacacctcacccatccccattccaaacccccccctccacctcccagccatacctcaatccgccaacacacccccactccaccacattcaacacacaccatccaaccaactcacacctacaccttaatccctcaacaaccccccatctccacctccccaccgacacacctagat

SEQ ID NO: 498402 - DNA, 476 bp, Homo sapiens
gatataaacaataatatgggcgacatggctaattacttatttaaaatatattagtacttgtggatattgtaaagtcacagacgttgtgggtaagggaccctttatgctgtagatggggcgtatgaatcaggatatgggatggtttgtatattggggaggtaggaatgtactaataatagaggagttattgggtatgactatgctgtgaatttaacaaataagtaatgcacgctgggagtggctagatgcggaggggtaatgataatttgtattggggatagtttgagagtaaactaaatggagaacaaggggacggactgtgtatttactattacaagggccatgtatatattgtaacaccgtactgaattgacgaaatttgtaagaaacgggaaaactattagcggaagaattaattgctattactgaacatcgaataatttaatttgcagcgatgaatatgctgtgtgcgtgaa

SEQ ID NO: 498403 - DNA, 176 bp, Homo sapiens
cattggatgctggataaattgaccggcgtgtttgctcctcgtcatccaccggtccccacaagttgagagagtgtctccccctcatcattttcctgagggacagacttaaggatgccctagcagagagtgaaggaaaagaggtttgcattcagcggttcattaaaatcgatggcaag

SEQ ID NO: 498404 - DNA, 401 bp, Homo sapiens
atcttccagtcgcagcattttagggctggaattgcatcactttattaggctatggctttcggactaagtacgattgagactgtgaccattaaggctaacactgtattgcccaggctatacggcttatttacatgcaaaggtttatcacatacaagattgtagaatggactaacggatacatattgggctattgacatattatgacatgttcccacaaagctttgcattcgataggctgagttatgacgactgaactgctgggtcacagaagccgactatggcctatgtcattaatggtgtttcatgctaagtctggctgtagaaactttactattagaacttcgaatcaggcgagcttaaacatgacattactatcagtgtctagggcactatagtgttgc

SEQ ID NO: 498405 - DNA, 612 bp, Homo sapiens
agttatcatgttaaacttgaaacatgagaatgcttctcatggatgagcaaagaaagtggtttcttgagaaggatctacttctggtgaagatgccattaacaccgttgaaatgacaacaaaggactgaaaacactgcataaacttagttgatagagcagtggcagggtttgagaggattgcctctgattttgaaagaaattctattctagctgagatggcatcaaacagcatcacatgctatagaaaaatcgtttgagggccgggtgtggtgactcatgcctataatcccagcacttgagaggcccaagcgggcagatcacctgaggtcaggagttcgagaccagccatggtgaaaccctatcccagttacttggggaggctgaggccagagagtcgcttgaaccgggaggcgaaggatgcaggtgagctgagattgagccactgcgcttcagtctgggttggcagagtgagactcggtctcaagggggaaaaaaaaaatctctagcttagattgggctttatctttcttagaaatgctccatttaagggtctataactatgctggttaactgataatatagaaataatgagtgatatgtgtatcgtaaagta

SEQ ID NO: 498406 - DNA, 102 bp, Homo sapiens
aaagtggacaacacaacggtgggattacctgacccaggttgaaaaggagtgcaaagaacacgagaagccctcctatgacactgaaacagatcctagatgagg

SEQ ID NO: 498407 - DNA, 493 bp, Homo sapiens
  misc_feature (2)..(2): n is a, c, g, or t
  misc_feature (131)..(131): n is a, c, g, or t
  misc_feature (231)..(231): n is a, c, g, or t
anaaatggaaacttggcatcacttgctataaatagaaggtaaccctacagataaacacaatgaaaaccggagtgttagtaaattccacgtgtagcccattcagactggagatctgcacacaagagggcagntacagccagactagcgcctggctgggactgtcggggatgcggtttgtggtcacaggactgggagaggagtgaggtcctcaccgagtgattccatcttctnttttttttgagacagggtctctgtcacccaggctgggtgcaggggccagtcatagttcactgcagccttgaactgctgggctcacgcaatcctcctgcctcagccttccgggtagccgagactacactatgcctggctaatttttaaattttttatagttgaggacccggtctctacaaaaagtaggaaaaaaaaaatagcgaggtgttgtggtacaacgcccatagtcccagttactcggaaggctcaggcaggaggattg

SEQ ID NO: 498408 - DNA, 321 bp, Homo sapiens
  misc_feature (2)..(2): n is a, c, g, or t
  misc_feature (131)..(131): n is a, c, g, or t
  misc_feature (231)..(231): n is a, c, g, or t
anaaatggaaacttggcatcacttgctataaatagaaggtaaccctacagataaacacaatgaaaaccggagtgttagtaaattccacgtgtagcccattcagactggagatctgcacacaagagggcagntacagccagactagcgcctggctgggactgtcggggatgcggtttgtggtcacaggactgggagaggagtgaggtcctcaccgagtgattccatcttctnttttttttgagacagggtctatttgtgtctattttactgtatgggtgcttccccatctgtctcattatcctttacgattaaatggttaca

SEQ ID NO: 498409 - DNA, 207 bp, Homo sapiens
agcatacggaggtaatgttccagaatatgccagggtatgaaccaacaggcatatgcatatcctgctatggcagctgaactatgattggttatccaatgcaacaggatattcccaataagactttagaaagtatatgtaaatgtctgtttgtcataatggctctttatattgtgtgttatctgacaaggatagttatgtaggaaacat

SEQ ID NO: 498410 - DNA, 99 bp, Homo sapiens
cattggcagaccaaagcctgtgtgtgggcacaggaccccacccagtgcctgcagcacctctcagaaaaggtagctgatactcaccaagaatttagcgcc

SEQ ID NO: 498411 - DNA, 677 bp, Homo sapiens
tggaactctgaacttttaatgggcctccgggctccccaaagggtacccggcttctgcgggcttaaggcctcagaaacttgggggtcatgggtctcaaaacaccacttggccatccactatccgggcgggtgtgggggctctttgggatggttggcatggagtgtgctgctgtccagggcatcaccaagattaaagtcctcgccatcttccagcaggcggcggtagggtggcgactctcagcctccagctgtgaccttgatgttcagcagggcctcatactccgtgggcctgtggcgcgtgtccctcgtgcccgggttcgtggtgccagcttcgtgactcagagggtgcagcaggactcccgtttgagcgtgcctccatcgtggtagggcgtagggggcctccaccttccctcgaggcgtgttcctccaagcggggccttcagaattcctcagggagtccaggtcgatctccagggactgggactggtacgtctcagctctggtgagcgtcgtctcagcagttccaacctcagctagacggtgtggtgcccccgggggtgctctcctcaatcgggctgagaccagtactgtgtctagctcctctgggttcttccgagccagctcgtcatatggggcccggatgtttggcatgatctggggaggtcccgaatttggggc

SEQ ID NO: 498412 - DNA, 545 bp, Homo sapiens
aacctggtggcactgcaggtagctgggaggagatggaagccgggagggctggcgattggagggcaggcggttggagggctggctattggagggcaggcggttggagggctggcggttggagggctggcggttggagggcaggcggttggagggcaggcggttggctttctggtcttagtcactcccagtctgaagacaaggcagaggcctagtgattcccagattcgatatgtgtcagaatcacccagaaggcttggctgttagaggccagagtgctgcgttccccagagttcccgactaggcctgtctggtgtggggcccaagaatgcatttctgaaacagtccaggtctgccaagagcctccggtgcaggtcagaggctttctgggtccacctctcttagaagcagtttgaaaaaccgtatccctgcctggtatagtgcctcacgcctgtaatcccagcactttgggaggtcgaggtgggtggatcacgaggtcaggagttcaagaccagcctggccaacatggtgaaacaccatttatacta

SEQ ID NO: 498413 - DNA, 451 bp, Homo sapiens
  misc_feature (217)..(217): n is a, c, g, or t
tcggctcggcccaagttctcaacgcattctttttcttataccatcttccattatgtactatccaagaggttgcatacagttccctgtacagtaggacctcatttcttatccattttaaatgtaatagtttatatctaacaacccaaactccccgttgagaagcttaagcttctcaacgcttggtcttgtccattcttcacgaatttatttattcttngtctaaaaggtataggatcttctttgtctaaaaggtatagtttagggttttcattctcttgtgaaggctcctatatatatttaaaaatttggcaagatttgaatgctttttttcttggtcttgtccattcttcacgaatttatttattctttgtctaaaaggtataggatcttctttgtctaaaaggtatagttagggttttcattctcttgtgaaggctccgttgagaagctt

SEQ ID NO: 498414 - DNA, 220 bp, Homo sapiens
ccgctacggtccccgcgcagcgctcaatgacggaccattacattaataagaccggggtttcacatgttgcccaggctggtctcaaactcctgagctcaggccatctgcccgcctcggcctcccaaagtgctaggattacagaaggtgcctgcttccccttcaccttccaccatgattagtaagtttcctagaggcctccccagacatgtggaactaacag

SEQ ID NO: 498415 - DNA, 143 bp, Homo sapiens
  misc_feature (41)..(41): n is a, c, g, or t
tggctaacattgcctatcacttacaagctcgtcccgatttnccggcccttctttataatttgtctaaaaggtataggatcttctttgtctaaaaggtatagttagggttttcattctcttgtgaaggctccgttgagaagctt

SEQ ID NO: 498416 - DNA, 177 bp, Homo sapiens
cctcctcctattcttctcctcttcgtttcctattttttctcctcctctcctctttctccactcctttcttttctcctcctccttctcttctcctttcctcctcctctccttcacatcttcatctcctcctccttcttctgctcccgattctcctcctctcccttctgtcgtcttctc

SEQ ID NO: 498417 - DNA, 678 bp, Homo sapiens
  misc_feature (107)..(107): n is a, c, g, or t
  misc_feature (202)..(202): n is a, c, g, or t
  misc_feature (206)..(206): n is a, c, g, or t
  misc_feature (267)..(267): n is a, c, g, or t
  misc_feature (269)..(269): n is a, c, g, or t
  misc_feature (412)..(412): n is a, c, g, or t
  misc_feature (514)..(514): n is a, c, g, or t
  misc_feature (519)..(519): n is a, c, g, or t
  misc_feature (569)..(569): n is a, c, g, or t
  misc_feature (573)..(573): n is a, c, g, or t
  misc_feature (632)..(632): n is a, c, g, or t
  misc_feature (636)..(636): n is a, c, g, or t
ggggaccaccctgttggtgggggctgtccagggccttgtcggggcatcccccaatatcagggggccccgcattagccccactcgcgggggcagccgcctaacatccngcccctgggtatgaccccccgcaggggcctgcactggccaagatccaccaggggcaatgccccccagcaggtttatgccaggacagatgcccccngccnacctctttttagaatccccgattcacattttgttcctccccaccggccagaggagaccaangngttcatgctgtccaggcttttcaatcagttcccgggtttcaaggaggtccgtttggtacccggggggcataacatcccctttgtggagtttcacaataaggtacaggcaggggcagctcccaatcccctgcagggttttaagntcccgcagaacaaccccatgaagttttcctttgccaaaaagaagccccttttccccccaggccggccccttcccctgtttgggggccccccctttccccctngggtnagccccctaaaggtaagtccccccttgggggcctttttggacccgggggngagngaggggtccccccccagcattgtacccaaagtttgtccccaaccattgccccgggggcngttnggccggaattaaaggggctttttggggttgggtttttcccca

SEQ ID NO: 498418 - DNA, 133 bp, Homo sapiens
ggtcagcaggtcgtcgataatcctcagcacaaaacccagctgcaaaccctcatctgaagaggacgaatgaggaggaccactgtggtgcatgctgattggttcccagtgcttgccccaccccctattcactggt

SEQ ID NO: 498419 - DNA, 161 bp, Homo sapiens
tgcggacacgtagtggggcggttacttatttagcttgccgaattttcgttcggtattggaatttaccaaaccaattggttcaaccacttagaacgggcctgtgaacaaccaccaagggaattcaaaaagaagtattcatctggtcattctggtcgttttcg

SEQ ID NO: 498420 - DNA, 743 bp, Homo sapiens
ggcggggagcagcaggcagagcagcggaccgaggcggccggggaccggcccgcgggctccatgggccgcggttacgcctgcccgtcgagggctggaaggcactagaagacgccgccggggactgcccagaggccgggatccccgctccacattgtgcgcaaactatgtttattctgaggtcagcgctgcgagctggactacatcggtcctcgttaaggatggcctggggaagattgcggccgaacctcccctcgccatccggactccggtccgcgcggactactccctgcttcccacctggcgagaggctggagagcggcgaaggagtcggggacgtggacggcgcggagggcatgaggagaggaatgatctcgaccgttaataaaccacatcccacaaggcaggatcgatgaacgatcctgcacggccccgcagaagactgaaacgggccaccatcctacgagaggcgatcggcgactgacagggaccgcgagacggaacccaggatccactaaacgagacgacaccgatgaacgaaaggggtgacaaggacaacacgcgctggctcacgctggggaaccagaacccaggatcgcccaggcagaccagaacacaattccccccgcagcacaagggggacaacacatcctggccggccaggcgccaccaaactacccctcggcaatccagccatacacacacacaacaccaaggccgacaccgggaccacccagcaaggaaat

SEQ ID NO: 498421 - DNA, 792 bp, Homo sapiens
gagggttattcaacacaatgctttggaagaccgatccatatctgataaacagcaatgggatgcagctatttattttatggaagaggctctgcaggctcgtctcaaggatactgaaaatgcaatttgaaaacatggtgggtccagactgaaaaagaggtggttatactggaaggaatcggaccaagaacagtgtgtgtcacaatgagaacaagaatgaatggagaagatgtggaagtgtaatgaggagcacgccaggttatctggcaagtgatgaaataaccacagtccggaagaaccttgaatcccgaggagtagaagtagatccaagctgtgattaaggatactgggcatcgaagtgtatagaagactatttttataaaaacagctctaaacgatgtgtaaccttgtgtcgaagaggttttattagtaccaaaggcattaggtagattgtgagtgtggaatgcaatgatgtggtcttgtatggggtatacaggcatgtttgttatcacggcaagtactttaagggcaacatgcttataaatactgaagttaggcgattagagtaaaaatgttcaagaggtatggaagatttgctgaagatggtgagaagagataaatgttactggtaacgcgttcaactggggaggactcaagaagttgagaatcaggaaaaactggggcttcattgagctctcatcgggaactaactaaatgtatctatagttgttctttgagacaaaataggttggcgcgctttttggggccctttaataaaggggggggaaaaggttg

SEQ ID NO: 498422 - DNA, 211 bp, Homo sapiens
tgacatatacttaactctatagccacgtctttcaacatacgtaaaaacgaatgcaaaattgaagtgggtgcccttctttctagcttatgggtagacttcttttactaagcttgtgagaactatcaaggttgcatccatccaagtgtagatctaccactagctggaccgtacatttgacctggagaactcgctcatgacgctaatggcagta

SEQ ID NO: 498423 - DNA, 905 bp, Homo sapiens
  misc_feature (702)..(702): n is a, c, g, or t
ggttcgtttatacgaatatctgattggcccagacaacagtgcatgggagggcgttttaggtggtctctaagtagaatatgtgagatgaatgaaagggtagtgaggtagtctacttaagaagatgtttctgggaaattcactagaaacaattaaaccagagtaggattgtcggtgagcttagacttctggtattccctactggccgtcccgagagagaaagtgggcgagggtctcgtggcagcgcgccaggacagagcgagcaccccatgcctatacctccctccccgagctaagtcccaggacatctgggccattgcctcggatgactgggctgacgctcttgtacgtgctcagtgagaagccgtggcgtgaagggtgctcgaacacaccaagctgctcagtatggtcgaggagataggcggaacagttgaacccgacttcccacttccgcatgacccctacaggcggggttgccctaaccagtccaggcgtactagctgtcggggaagaacagcagagtgccagggaagtgaagatcggcaatgcacccgcggcttgacgacagtgacggacgaagaagactcgtagtacgggaattgaagcaccagacaggcacatcggtagaaatcgaagggaggcatgagtcacggccatcgcagtgagcatctgaaaggcgtgtccagcaaacgttcagaggtccangaacggtgagagggggtactgaccctagtacacaagcgcttggctctggaactacttttaggcggtcctcggcaggaggtccaatcttcccaatcgggtggagacccccatggtcaaggaaagtactaccttgtggaacatgggcccaggggtcaccggtccacgttcacctctgcaacgggaggacacatttctggatcaaa

SEQ ID NO: 498424 - DNA, 1113 bp, Homo sapiens
tgcggtggcgggcgcctgtagtcccagctactcgggaggctgaggcaggagaatggcgtgaacccgggaagcggagcttgcagtgagccgagattgcgccactgcagtccgcagatccggccggggcgaataggagtcgaggactccgtcccaaaaacaaaaaaaaaaaaaaaacaaaaaaaaaaatgttggtggggcaggcactcggcggccccgcgaaaaagaatttctcagaacaccaatcggagtggggcacgcggcggcggcgcaccacagaaggtaagggagaacagaggcgcaaaaacggggtgtccccaagggagaaacccaggggatcagaaacaagacggccgggagattacccaaccacaaaaataaaaaaaccccggcgggaccaccacaggcggcgggtcgttcgagacacacctccacaaaggtgggggcgacctcgagagacagggcaaatacaggggcgagccacactaaaaacaacaaggcgagagtacaagaggcagaagcctaagataatacagaattagaggcccgccagctaggggggagacaaaacagaaagtagacgaaactcagaagacgcagaagcaagtaggagacgacgacagagaagagtacagataatgagagaaacaagcgaacagacaatacacacgagagcaagagcagactaaccaagacaagaacgagcagcgaccgccgagggagaaagagagcacagggggaagacagacgaagaagagagaggagagaagaggcgaggagcgcgaacagagacaaggaagaagagacgaggcctaggaggagagacgagacagagagcgagagcagacgggcgaggaagagcgaagggaagcagaacaacgaggaagagagaggacggagcgagaagagacaagcgacagggagagccgcagcaagagcgagacagtagcgaagcagcggacgagacaagaatagggcgaagaagggagcacacgacagagaccgcaacagagagagagaaagaccgccagtgacgagatagcaggcgaggcgaagggagagaggaaagacaggaagagaagcaacaacaagagagagagccaatgacaggataag

SEQ ID NO: 498425 - DNA, 116 bp, Homo sapiens
ggacgctggtcagtgatctccgcatgttcaagtgctggatacaggcataagctcggctggcaggttatgtatcttttctagtggttgcaattcttaggttcccagggagacatgtg

SEQ ID NO: 498426 - DNA, 742 bp, Homo sapiens
ggacgcgtgggtccgctactttggcgcaagccagggtggttggatcacttgaggtcagagagttctcgaccagcctgagcaacatgctgaaaccctgtgtctactaaaaaatacaaagagattagaccagggtgtggtggtgcatgcctgtactcccagtctactcgggcatggctgaggacacggagtaactcagttgaacagcaggcaggcacgtaggttgctatgtgagactgcagcattgcactcactgtagctccgaacctggagtcaccccacgcacatgagtagctccatcttcagaacataccaacacacacctgaaaccacggtccaggcgtcagcatggtcctcgagcgccgtgatatatcccatggcacctcttgggcacggccgacggccgcgtacctgcgaatcagccttgaagagctcacggacatctctcgcagacccagccacgacccaaccactggctgtgaaccccctatctcgtagcttacgcccattcaccacatacccacacttttagcccactgcgcgccgcccgggcctgcggcggaggggccgccccgttgcttcgggctaccccgaggccctcacctcccggggacgggccctgcatgcgccacgcgcaaggaactggcgcgttgcaacccccccggggcacacgcccgcgcacgctttggcatgctctgcacgcccggcgccatttggcgcccacttgggggctcccggcagcccc

SEQ ID NO: 498427 - DNA, 444 bp, Homo sapiens
  misc_feature (259)..(259): n is a, c, g, or t
  misc_feature (273)..(273): n is a, c, g, or t
  misc_feature (294)..(294): n is a, c, g, or t
  misc_feature (316)..(316): n is a, c, g, or t
  misc_feature (333)..(333): n is a, c, g, or t
tcaatgcttgatgtgttcggagaatgtaaaataagtgaaaatattgctgctagaacttacctttatgggtcagaatttaagtgtcttcagaacaaatagtggaggctatacgtggtgtacgcgattaatacacattatccttcacagcattgaattacaaggaggtctcatgattgcacacaccaagcagtgtagcgatgcacaatcctttctttaaagataagaacgtttttcaaccccaccagtaacatttcactcngtaagattgctaanaaaataagctgggggcctgcnatacagcgaggtgatagctacnttgatttgggtgcagcnggggttagtttccgcactgctctaagaagatcggcactatgagttaagcattgggagctcactacggccagggcattgccgcacggagctacagacccatgaccctggaag

SEQ ID NO: 498428 - DNA, 114 bp, Homo sapiens
cctaggttaggtgaagaatccaccacctcccgtagccaaacaggttctactcactcaacagtgtcactgccagacaccagcaggctcagtgaggaatctaccaccgtctacagc

SEQ ID NO: 498429 - DNA, 355 bp, Homo sapiens
catgcgcgtcttacgcgaaacgttgccgtcgttcagcaggccggtccaacgcttctcggtgctaccgacgaacgcaatactgttcagcaggcgctcaaccttgtctgcagcagaatcagccttggtgccgctcaggttgatgccgtacagctgcgcctggttcacttcttccaggttccattcccagccggagccgatcatggcgaagtcgtgcgatgcctggtcgtgggtggccgagttgaacggcatatcagtgcccgaacccgacaggaacttggcctcaccagcggtatcgacggtgaagaacgtggtgccgatggcccatggagcgccttcggtgactactggaatgctg

SEQ ID NO: 498430 - DNA, 356 bp, Homo sapiens
taatgggacaagcgccctcctgctccggagcatagcacccaaagcctcaatagaaagacgtcggcaggccctgagggttgctccatggtcatggactgcccgtactcgttcccacggtacagaaacttgatggtccaggctcagtcatcgggcagagacgctgaccacagctctggagcgctaccgaagcgctgtatacgcccctggcgtacttccatctccaggggtccagtctatgggccacatggtctcccgggctagccggatgcgcacgcttgccaattcgcccaacaacttggccctgtccgtccatttagaacgtggacccctacagaactaaaaacatgccttgaatc

SEQ ID NO: 498431 - DNA, 166 bp, Homo sapiens
ccttaaacctcactgtcccagtatctgtcagatgctcactccccatgcatggagatctgggcccagcacactgccgtgaaagcagaatgtcagttagaatgaaaaaaaccgccagaccactcaggatcacccctggcagaaggagggggcaggaggcagacaggga

SEQ ID NO: 498432 - DNA, 997 bp, Homo sapiens
  misc_feature (529)..(529): n is a, c, g, or t
tgacgcgtgtccgagtgcggcactcttgtgggtgagcctgctcccgtatgagtagctgccgccgcccgtctctctgtgtgtgtaataaggaagaggaatgtgtgttcgtgtgcggtgactgcttctggtttatgggagaccctttctgctggttgtgtcgcgcacggctcgttgttgataagtgaaaaatcttgggattttttgccggccccgcactcctttgtcgtgggaagaattggttattaccgcggggcaaaacataccctttactgggggatgtgagaaaataccgtttgtgtatgttcagtgcgggaagcccgctgttttttaatggacacagtgtcaattaaatggtccgactccatgtgagacgtggggcgccccccctgcggggagcagtgattcccggctaatctgtttatggagagacgcaggttgtgtctcgccttcccctcccactggaattgtggacagagtgcagtgtgtgctgtctctgccatgcgcggttcgtatgggatgtgagcagctntctctcttaaagggttgttctcgtccgactgacaggcgtgtgcagattacccctgcgccgaagttcactgcacgagagttctgtctcacccggagcggtgttcccaacacgtaggtgtctccacacagcaggctttgtcgctccgagtcgagaccacaccacgccgtgactctcccgaaaggagacatccatgtgatcactgacacagatacatgatgaaatcagataattgtacttcatgttgtctgtcagtgatgtgggcgcccacatagcctttctctatcttctaacaacatgacccttcacttcagctgtgcgcgtgtgtctctggaacactttgtttattttctctctcagtgtgaggatgaccataggtctctgcatattgttctcgaggagagcgagagagacccaatcaaatcacatcctcttctttataatcaagccacacaattgtccgaaaaatca

SEQ ID NO: 498433 - DNA, 968 bp, Homo sapiens
aggtatgataggtcgaggcctcggtttgtaaattaagtgcaccgagggcgagcacgtggagtttaggagctggaggaaggagaacggaggggagcgctcgtggcgcgagcgagagaaaccgcgagcgccgagcttgtgactcgagccccgtgcaacggctgaggagctacgcacgtcctattacatataccaatgatgggcatgtaagaaaaagcacagtaccaaaggaacagcacacaccacacatgatacaaaaaggccttcgatacgggataatccatatgtattaccgtcaggaagttgattaaactatacagaaggattgtttctagagacacgttatataccgactaccagccatagcgcagctacacccaccgaacactaggagaggccacgtagaggcccccaggagcagagcagagtcgagccacggatagaaacgcgccgtaggagaggataccacaacatacactagaaaaacaatcacgactagtctacatcgcaaatcagagagctaatcaagacagcgtgaggcgtccagacgaaagtacgtagagcagaaacacgaacgaaaaccaaaaaaacaacaagacagagagacaataagcaaccaaagaagagcgaccaccaagcagagacacacgacgcaaaaagagacctacaagaaaaaccgaaagaaaatcaaaccaaacacacaaaaacacgacagaacatgcacaaagaacgaagaaagaaagcacgacaaagagagactccaagagacagtacaacaagccacaatcagccaccaacaccacaacaaacatacatacctccagcaacagaaaaacaagaggaaacaaccaaagacgacaagagagaaacgcgcagaacaacagcgacctaacagcagagaaacaaagaacacgacaagaagacagccacgaaaaagacgacaaacaagacagaccgaacacaacgaaaaa

SEQ ID NO: 498434 - DNA, 986 bp, Homo sapiens
ccctggatggttgttgggagggagggaaagtcctgaaaaggaggccagttcaacatggcctctaccctggtagaaaaaaaaagtgaaaagagaagaaaaaaagaaaataaaaataaaaaggtataggacagtggtgtgtcaggattgaagtcctgcctgtggcggtggggtcatgacaggccgagtttgttgtatgcagggtggccccctgggagacgcttggcattacaacagtcgtagccgtcgaggccggcaacattacacaatcccgaagcttagggtgacaatgcgagaaatcattttcgaggcatctgtgtttcgtcacgtcccgccttgacatcccgtgtagtgtgcggtcatggatttgtccaaaagatccccttctgatcagtagttgatcgtgcactggcgtggcacatatttccaatagagaggataagcggaatacatacggtgtgttcaccaaacatgaggccgtgtaatgggtttgtttcagggaggaagagattaatttacgtgtaagatcgcgggaagcttctaatttgttaaataagtgccatttattgtggcaaggggagggtagttttgacaagaggtaatagtactcggacaataatgtggacaaaatgaatgacatatgagagaggcaaataacagtgataaggaggtaactaaggcacgagagtcagaatcacaagtgtacccccaggaagtttgttcattagagcgcttcatccgtgaaagtcttcctcagatgaagttcagcgtggaaatggtactgaggacgtactagactgcaaggcatttatactcgatgggtatatcccagacttctaccagggtaggaaatacgagaactatacttgaagggcatatccactaggcatgggggtaggttggatcttggttaccgatggtaggattgttcgctttgtaagaaagcgacacaaagtattaagtggcaatgagatcttcagatatcctaa

SEQ ID NO: 498435 - DNA, 484 bp, Homo sapiens
gcacccgaaagctaatagcggctctgaccttatattcaacttttttcttacttttttttttgagacgaagccacactctgtctccttggctggagtgtggtggcacagtctcagctcactgcaacctctgcctcccagttcaagcaattcttctgcctcagcctcccaagtagctgggattacaggcacccgccaccacgcccagctaatttttgtatttttgtagagatggggtttcacgatgttggccaggctggtctcaaacttctgacctcaagtgatctgcccaccttggcctcccaaagtgctgggattacaggtgtaagccactgcacccggcctttttaactttaaacatgttttagaattcgcctaaagatcaaaatatcatggattgaacctcatcaattgatagcagtgagtgactgaagcttccaaatcaagaaaagccagcaccaagaacttccattctaatctagagctg

SEQ ID NO: 498436 - DNA, 126 bp, Homo sapiens
tcccaaggactgagaaactggcaggaaaaacagatgcataattgtagctgaagacttgaacatcctacctctcagaaactgagacagcaaggcttgataagtataattaacatatatcaacaattc

SEQ ID NO: 498437 - DNA, 357 bp, Homo sapiens
ctcagcctggaacgaatggactcagaaaaaggagggctgtctgtaggagtgaggcgcagcttaagtttgcagagggtcgaaacgccggatgcttgccaactggagtgcagtatgagctgggtgtcactaggctctcaacatactggctttgctgctgtgcttgggcgttggtatcttcattttacagttgattaacccaagtacgtgtacttattcaagtgacaactttggggctccaccatgaggtaccactgtttaaagctagctgtgtctagttccagaaatcttaagttttacatggtgctgtaatcagcttggagtaatgatgctggcctaatggtgctcaccatgtgagcg

SEQ ID NO: 498438 - DNA, 113 bp, Homo sapiens
acgatgtgctgcggtgattctagaggatcccgacgcctctctgtgggtcgggctcagcagaactgaatcccaactcggagtggtttgagaactactctctctgtcaccgctgt

SEQ ID NO: 498439 - DNA, 375 bp, Homo sapiens
cggatgggggagccgctttttttacattcagccgaagggagcgagttctggagcgccctgttggagaaaggcatacgccaagatcaacggatgctatgaagcgctatcagggggtgcaccactgagggcttcgaagacttcaccggagacattgcttgagtggtatgagttgaggaagccccctccaaacctgttcaagatcatccagaaagctctgaaaaatggctctctccttggcttgctccatcgacatcaccagcgccggggacttcgagggccatcacgtttcagaggctggtgaaggggcacgcgtactcggtcaccggagccgaggaggttgaaagtaaacggaaagccttacagaaactgatccgg

SEQ ID NO: 498440 - DNA, 188 bp, Homo sapiens
aggtgaccgtgcagggaggctgattttgactctgagtctttattgaaataaaataattggctgggtgtggtggcttatacctgtaatcccagcactttggaaggctgaggcaggaggatcactgagcccaggagttccagaccaccctaggcaatatagcaagaccctctctctacaaaaaaaaaaaa

SEQ ID NO: 498441 - DNA, 124 bp, Homo sapiens
tgccggtccttcatctctccacctcagtgagggaccgcagtcgatcaggcccctcccacccacctcctccagtcttggatggcaactgaggggtagcaggcaggcccgagatgtgctgccgttt

SEQ ID NO: 498442 - DNA, 359 bp, Homo sapiens
  misc_feature (297)..(297): n is a, c, g, or t
agaggatcccagcgctgagcaatctagagcagaagaagagcggaccttccgcaagtcacctaccggggggtggacctcgaccagttgttggacttgtcctacgagcagctgatgcagctgtacagtgcgcgccagcggtggcggttgaacgggggcctgcggtggaagcagcactccttgttgaggcgccggcgcagggccaagagggaggcgcggcccatggagaagcgggaagttggtgaagacgcaccttgcgggacattgatcatcttacccgagattggtgggcagcagtgngtgggcgtctacaagtggcaagacctttcaacccagggtggagattcaggccggagcttgat

SEQ ID NO: 498443 - DNA, 336 bp, Homo sapiens
  misc_feature (7)..(7): n is a, c, g, or t
  misc_feature (22)..(22): n is a, c, g, or t
  misc_feature (149)..(149): n is a, c, g, or t
  misc_feature (180)..(180): n is a, c, g, or t
  misc_feature (200)..(200): n is a, c, g, or t
  misc_feature (216)..(216): n is a, c, g, or t
  misc_feature (232)..(232): n is a, c, g, or t
cagtgangcctgcagcagaacngggatttccaaccggcttccctgggccacagtggaataagaattgtctcatggctgggcatggtggctcacgcctgtaatcccagccctttgggaggttgaggcgggccaatcccttgaggtcaggngctcgagaccagcctggccaacatggtgaanccctgtctctactaaaaatncaaaattagctgggtntggtggcacacgcctntaatcccagctacttgggaggctgaggtgggagaattgcttcaacctgggaagcagaggctgcagtgagccgagatcgtgccactgcactccagtctgggcgac

SEQ ID NO: 498444 - DNA, 350 bp, Homo sapiens
  misc_feature (350)..(350): n is a, c, g, or t
aaaatgctaagtggattttcccaacagatcataatgacattacagtacatcataaaaatatccttagccagttgtgttttggactggcctggtgcatttgctggttttgatgagcaggatggggcacaggtagtcccaggggtggctgatgtgtgcatctgcgtactggcttgaacagatggcagaaccacagatagatgtagaagtttctccattttgtgtgttctgggagctcatggatattccaggacacaaaaggtggagaagagctttgttcatcctcttagcagataaacgtcctcaaaactgggttggacttactaaagttggtaacttatgttgttttttgn

SEQ ID NO: 498445 - DNA, 467 bp, Homo sapiens
  misc_feature (341)..(341): n is a, c, g, or t
  misc_feature (359)..(359): n is a, c, g, or t
  misc_feature (413)..(413): n is a, c, g, or t
gcggccgcctactactactactaaattcgcggccgcgtcgacgggaaagtgtacgagtgagggagagtgtactagtgagggaaagtgtacgagtgagtgagagtgtactagtgagggaaagtgtacgagtgagggagagtgtactagtgagggaaagtgtactagtgagggaaagtgtatgagtgagggagagtgtacgagtgagggaaagtgtacgagtgagggaaagtgtactagtgagggaaagtgtacgagtgagggaaagtgtacgagtgagggagagtgtactagtgagggaaagtgtacgagtgagggagagtgtactagtgagggaaagtgtnctagtgagggaaagtgtncgagtgagggagagtgttctagtgggggaaagtgttccagtgtgggtgagtgtncttgtgagggaaagtggtcttgtgtggggaagtggtctggtggggggttgtgtt

SEQ ID NO: 498446 - DNA, 1005 bp, Homo sapiens
tggactgtgtaccaccggcgccacttcccagtgctccctgatgtcagtgaaccctggcatggctcgctggatcaaagagctcttcgtgccataacgagcggtgtgtgtcctgcacggcggtgactgcaaacatggcttcttctcactgacagctgtggagggccaccaacgatgggctccatatcgcatctactatgaccgggcacctgcacacaaacagcccaaggcacagcaatggtgctcctacaatgacttcagcttcgtgacagcagaccaatagagagggctgtccccatgcgtaagtggctgagcacctgggcgagttcaacctgggctccacacatcgtgctcatcttcgaggcccacaaggacttcaataaacccagctgcaaaacagtgacagacaaatcctgcttaaggaggacagccctggtgctcgctcatcagcagtctcatttccttgattcatgtgcctgctacacgggcatctatttccaaagacagcagatgaagggtctttatcaagcagggaggcccatgcaggccatccatggtatgtggcctgactcaggcagtggtactgggacagtctgaccaggataggccttgcaatgacttcgggctagcaccttgtatccagaggtgcaagacaagaaggtggcagagagccacccatcatgccccttcaagctatgccagtaccattcttggctacaaataaacaagtggcaggattggaactgagtctcgagtcagcatttggacatcttggagaacaacaaactgggtaatagaacgggaaaaaaaggccatgcgtaatttcccgtggaaccagaagacgttcaagagtgggatcatcggggatagatacgaaaatctaaacatgtacgagtgatagcgttccaccacaattaacccatgaagagtgataagctggtaggggcaccattagatagaatatggcaccttaaggagtccattgattgcaccagagctgaaggtgtc

SEQ ID NO: 498447 - DNA, 429 bp, Homo sapiens
gcttcgacctgagtagctgagattacaggcatggtgcaacaatggcccgccaaatttcaaaatttgtgtaagagacgaggtttcaccatgttacgcaggctggtctggaactcctgaccataggtgatctgcccacctcagcgtccaaaagcgctgggattcaggcatgagcaccatgcccggctactgtttgcacttaaaataactagttcaaccattgtggaagacagtgtggtgattcctcaaggatctagagctagaaataccatttgacccagccatcccattattgggcatatacccacaggattataaatcatgctactataaagacacatgcacacatatgtttattgcggcactattcatgacagcgaagacttggaaccaaccagatgtccatcaatgatagactggattaagaaatgt

SEQ ID NO: 498448 - DNA, 1047 bp, Homo sapiens
gaggagctctacaggatcagcttgggggggatttgtccagtctaagaagtcccattgccaaagctattctgcaggagtggtgaatgccgagactatgtgcagacccctgaggtcttactcttggacactggtcagtattccccatcgacagtacccaaagtagccttgagttgacgtttaggtccttgcctcctttattagagaagagggcattatagactgcagttatatcctggttgaaagaaggttaaagcaacatgtttatttgcctttatctagtgaactaactcgtagagatgtacgtcagacaggaagacagtcttagacacgtgtacacgttagcagacttggcacttaagtcccttgattgctggccagaatggcgtggcatggtatggccgttaagtatgtcccaggaaccccatgaacagggctgcacttggacctctcccatacgatggtcctcgaagaggcccagtcccatacaactgtggatgtcattgcttgtcaggataaggaaagtcttagtcctagacacgcccttgggatgggtatgaaaccaccagttccaaatggacgtacatcatatccttcgaccataggagatcaaatggatccaattcatatcccaagaaaacgcatgacatagatgcactgagacaaagggacccaaaagcaaatagaagcagaggacccaaaggaaaacatgataccaaagggcacctgacatgcagagaaaccatgagaactagggaaagattcacatgatgaacggacaaggcacttggaaagccgaatttggcaaagcatatgatggctattacccagatggaaagggaacaaaagagggaaaaaacaccagatcagagaggaaaacatggataatgccatattgcacagcatagagtggcacccgtgagacacccgtatatatgacattgcaccgcatatatgtaacagtaataccgttcataggaagtccccaattatgagaagagataaaccacacgattgtagaaccccacatcaattggagtcactggagga

SEQ ID NO: 498449 - DNA, 124 bp, Homo sapiens
aagcctcggtacccttcagccagcacagtggcccacgcctgtatcccagcttttgggagactgaggctggtgaacattgtcaccctaaagaagtgactaatgttgaaagtgattgttccccgct

SEQ ID NO: 498450 - DNA, 670 bp, Homo sapiens
  misc_feature (15)..(15): n is a, c, g, or t
  misc_feature (289)..(290): n is a, c, g, or t
  misc_feature (297)..(297): n is a, c, g, or t
  misc_feature (302)..(302): n is a, c, g, or t
  misc_feature (376)..(376): n is a, c, g, or t
  misc_feature (381)..(381): n is a, c, g, or t
  misc_feature (398)..(398): n is a, c, g, or t
  misc_feature (427)..(427): n is a, c, g, or t
  misc_feature (429)..(430): n is a, c, g, or t
  misc_feature (435)..(436): n is a, c, g, or t
  misc_feature (439)..(439): n is a, c, g, or t
  misc_feature (443)..(443): n is a, c, g, or t
  misc_feature (453)..(453): n is a, c, g, or t
  misc_feature (507)..(507): n is a, c, g, or t
  misc_feature (516)..(516): n is a, c, g, or t
  misc_feature (522)..(522): n is a, c, g, or t
  misc_feature (526)..(526): n is a, c, g, or t
  misc_feature (567)..(567): n is a, c, g, or t
  misc_feature (578)..(578): n is a, c, g, or t
  misc_feature (590)..(590): n is a, c, g, or t
  misc_feature (594)..(594): n is a, c, g, or t
  misc_feature (608)..(608): n is a, c, g, or t
  misc_feature (668)..(668): n is a, c, g, or t
tatctgctgttcgcnggctgggcctccgcagcaggcttggccagccgctgacgggtcggcgggcgggtttgtgtgaacaggcacgcagctgcagattttattctgggagtgcaaccctctcaaaggttgaaggaactgatgtaacagggattgaagaagtagtaattccaaaaaagaaaacttgggataaagtagccgtacttcaggcacttgcatccacagtaaacagggataccacagctgtgccttatgtgtttcaagatgatccttaccttatgccagcatcatnnttggaancccgntcattttttactggcaaagaaatccggggagaatgtggccaagtttattattaattcataccccaaatattttnagatngacatatcttatcctcntataccgtgtttaatgcctgagtactttntnnctcanntcnaagncataagtgangccgccctgaaggaacgaattgagctcagaaaagtcaaagcctctgtggacatnttttttcancttttncaancaggaaccactgtgtctcttgaaacaacaaatagtctcttngattttttgtnttactatggtgnccangagccctcaactgnttaccattttcaacaaactggacagtcagaagcattggaagaggaaaatgatgagacatnta

SEQ ID NO: 498451 - DNA, 132 bp, Homo sapiens
  misc_feature (86)..(86): n is a, c, g, or t
gggccccgcgcgtcgcctgtcctccgagccagtcgctgacagccgcggcgccgcgagcttctcctctcctcacgaccgagagctgnctttttggcgaggttttggctgctggatgctggttctctttgtggc

SEQ ID NO: 498452 - DNA, 151 bp, Homo sapiens
tgcatgcttgctcatgcaggcaggcctcagtcagtggggtgcaggcttggcattcagcgtttcagcaagggctcatttgtttgtgggtctccatgtagttggcagtgtcaggcatcaacatcgtgctcaaggagcagggcatgaacacgca

SEQ ID NO: 498453 - DNA, 215 bp, Homo sapiens
atccaggtagatgaattaccacaccatttccaatgaatgcagtgacatttggattaattattgcactgggtaagagatgaaaatcgatatgtcgcacagaatccacaacgactgtgtggccagcattattgcgtcggtggcagcggcacacgatgtcggcggtcctgcgccagcagggccagcgccttccctttgccgtggtcgggccactgcgc

SEQ ID NO: 498454 - DNA, 158 bp, Homo sapiens
ctgtgctttgggacggcggattcgggaactgactgctgtagttcagaagaggttggctttccagagggcagtgtagagctttatgctgaaaaggtggccactagaggtccaatcttccggccggaagattggacctctctcgccgtcccaaagcacag

SEQ ID NO: 498455 - DNA, 945 bp, Homo sapiens
  misc_feature (451)..(453): n is a, c, g, or t
  misc_feature (455)..(455): n is a, c, g, or t
  misc_feature (457)..(459): n is a, c, g, or t
  misc_feature (465)..(465): n is a, c, g, or t
ggctcatgttaaagacccattgaatagtttgtgaccccagagcccatgcttcttgccagagtgtggtctttgtgggccttgtggcactctgtagagcagggatcagcaaacaatgtcctaaggcctgttttgtatgacccttgagctgaggatggtttttacacccctaaatgattaaaagcaaaagcaggccaggcgtggtggctcacgcctgtaatcccagcactttgggaggccgaggtgggtggatcacaagatcaggagatcgaaactatcctggctaacacggtgaaaccctgtctctactaaaaatacaaaaattagccgggcgtggtggcgggtgcctatagtcccagctacttgggaggctgaggcaggagaatggcgtgaacccgggaggcggagcttgcagtgagccgagacaacgccactgcactccagcctggcaacnnngngnnnctctgnctcagaaaaaaacaaacaaaaaaaaaaaaaaaaaagcagaactgtgtgacagagagtggatttgaccctcagagtccaaggtctcttaattggcattctgtggccttgtgggggccagaaagattctctagtgaggatgcagctgttcgcagtgctccctgcctctccgtggggtaagatgccagtagcagccttcactgtgtgaacacgcagatgtttaatccagaacattggctaaggggcccctggggaacccacaatttgtccctgggcaaaaaccagtgggtaaaatattcctggtctggggccaggatgcgggggtcaaagcttgtaatccccagccacttgtgggagccggaggggggcagaaacacggaagcccagggagtttgaaaccaggctgaaccgaacggggtgaaacaccggctcttactaaaaaacttaaataagtgggcatgggggggcatgcctggaatccaa

SEQ ID NO: 498456 - DNA, 306 bp, Homo sapiens
  misc_feature (144)..(144): n is a, c, g, or t
  misc_feature (208)..(208): n is a, c, g, or t
  misc_feature (229)..(229): n is a, c, g, or t
  misc_feature (244)..(244): n is a, c, g, or t
  misc_feature (278)..(278): n is a, c, g, or t
  misc_feature (289)..(289): n is a, c, g, or t
aaaaaaaatcagccggaccttcaggcttgattgaggcacatacttcctattctacaccctagtaggccccttcccctactcatcgcactaatttacactctacaacaccctatggctcactataacattcctactatctcacgntctcactgcccatagaactatacaaactctctagagccaacaacttaatatagactatgcttancacaatagcttttatagtaanagatacctctttacnggactccactatattgactccctaaagcccatgntcgaagccccncatcgctgtggtcatat

SEQ ID NO: 498457 - DNA, 457 bp, Homo sapiens
tcgatcggttcaaggcgggattgggacccagaagaatctcggtggtggttctaattctgccactagcaaggcaaacttaggtaattcatttaacgtctctaaacatgatggccagcggcaaactagggaccatattggacgggctataaaaactaaaaaatagtggccgggcacagaggttcacacctgtaatcccagcacttggggaggctagggcaggtggatggcttgaacccaggagtttgagaccagcctgggcaacatggtaaagccccatctctagaaaaaaaaatataaaaattagcggggcatggtggcatgcacctggtagtcccagctacttgggaggctgagacacaagaattgcttgaacctgggatgtggaggtcgcagtgagccaagatggcgccactgtactccatctagtctgggtgacagagcgagggtccatctaaaa

SEQ ID NO: 498458 - DNA, 133 bp, Homo sapiens
gaggcgttagatactaggctactaaccaacacactaaccatataccaatgatggcgcgatgtaacacgagaaagcacatggctaggccggaggtcattaggggggctgagagggcccctgttaggggtcatgg

SEQ ID NO: 498459 - DNA, 946 bp, Homo sapiens
  misc_feature (740)..(740): n is a, c, g, or t
gctattccccacccatccccccatctccaacggacggacgaacctcggggaccatatttgctcttgaaacgagaacaccgtctcacactgaaagtttcctatcgtgaggttcagcgtcatctagagtcaacggatgaagcataagcgttcactgtggaatttatacaacacacaaagaagaggctcggccaaacaacatccactgaatattgaacctcgccccttccccattaaaaaatcccacgcaccaacaaccaaaaacggccctccttttttctcaacgagaggacctctgcaggcccacaacctttactcgcgggctacgtccaccatcctacatcccctgcctactatccacctccgcccaaccccccctctcctcaacgctccccccccactctgtgcgcccgctctcccgcacccgcccctccccccccttcccctcagaccatcatgacacgctcccagaatcgctccccgcccaatccccccaccaccccaccagtcatgtactgtcctcgcaccaccccgccccaccccccctcctcagctaccccagaacccacgtacacaacactcctacaaaacccaccctccccccccccccacctccccccactcccaccgcctcactccccgctcgccacacacccacagagtccgcgcccccagccacccgcccccccccgtccctcccctctctctctccctctctcctctctcaccgcccaccataccgntccgtcccccttaaccaatcactgcgcccgactctcccggtctgccctcgctgccacgcacaccaccccccttccccaccccccgcgtccgtccacccacatctcgtcccctctcacacccgccgcaccgacccgactcacgtcgtcgcctctcctccacccactacagtacaccgcgcaccctcccccagcccccccgcacctgc

SEQ ID NO: 498460 - DNA, 129 bp, Homo sapiens
tgatgtcacaaaacatcttatttttgtgctgtgcccacaatttagtataatgatttttcatcagtacataccatagctgctcgattttgttgtcaatagctaccacacttgcacccatgatgagctcag

SEQ ID NO: 498461 - DNA, 174 bp, Homo sapiens
gttgactgcttacctgtaaagaaagaattatgcagaggagttcccgtcgtggctcagtggttaacgaatctgactaggaaccatgaggttgcgggttcaatccctggccttgcttccagtgggttaaggatctggcgttgctatgagctgtggtataggtcgcagacgtggctc

SEQ ID NO: 498462 - DNA, 402 bp, Homo sapiens
gactaaccccgtataccttctgcatatgaattaactagaaattactttgcaaggagagctagacagctaagactccccgataccagacgagccacctatgaacagctataagagcacacccgtctatgtagcataatattgggaagatttatagtgtgaggcgacaaacctaccgagcctggcttatacctggttgttctctgtagtaatcttagttcaactttaaatttgcccacagaaccctctaaatccccttgtaaatttaactgttagtccaaagaggaacagctctttggacactaggaaaaaaccttgtagagagagtaagaaatttaacacccatagtaggcctaaaagcagccaccaattaagaaagcgttcaagctcaacacccactaccta

SEQ ID NO: 498463 - DNA, 507 bp, Homo sapiens
aaaactgtttacaaagctacatattttagggtgatcccccttcacttttcagatctaggtagggttatagccagtttccattgcgtggagaatctgcaagggtggtgttcctgtacgggtccagagtgaactacatcaaaagtcgcttttgatatcgaggatgcaggtcactactattaagtgtaatgtgttattattcaaaggaagtactgtttactgtaaaagtttgatgaattcagtaatgattttactaaaataacatacttgttcaggggcaaaaatacggttttagggctactttaagatagaatacttaagaatttacttattttggggaccaagggaattggttaaaaagcagaatcctgggccccacttcaaggggggggggtggcggctttatattttataagatacctagtggaggtgaaaaaccacgctttattttttttttttaaaagaacagggtttaattgctttccggttggggggcggggggcaatttag

SEQ ID NO: 498464 - DNA, 428 bp, Homo sapiens
  misc_feature (1)..(1): n is a, c, g, or t
  misc_feature (19)..(19): n is a, c, g, or t
  misc_feature (41)..(41): n is a, c, g, or t
  misc_feature (58)..(58): n is a, c, g, or t
  misc_feature (109)..(109): n is a, c, g, or t
  misc_feature (112)..(112): n is a, c, g, or t
  misc_feature (137)..(137): n is a, c, g, or t
  misc_feature (194)..(194): n is a, c, g, or t
  misc_feature (393)..(393): n is a, c, g, or t
ntacattagaaaaacaggnacttaggaccaaacaaacaatnactggatactgcaatancaaaacagtatgatttatattaaaggtttccaaaggttgacctgcaaaggnagnaatattactactagatcagacaggnaaaaaaatgcattcaggaacccaagacaggaaactgccaaatgtaattaggttaagnaaaagttacccttgggccagtgtattagttttctattgctgtgtgacaaattaccccaaatttaggcagtttaaaaaacaatacccataggcagttctgtaggctcatgagtctgggcacagtgtggctggattctctgctcagggtcttaaaggctgaaataagggttggcaggacaacattcttcatggaggctctngggaagaatctgcttctaagttcattcaggttgtt

SEQ ID NO: 498465 - DNA, 172 bp, Homo sapiens
gtgtaggccctcggccgtcgtgacttgggtactcttggcgagccggtcggtatcaggacacactgtcccctgcctcaacatgtcctgcccagagggaggtcacagatataggctcgcttctcaagcatctgctgggacactttcctaatctgctcatctaggttttctggag

SEQ ID NO: 498466 - DNA, 201 bp, Homo sapiens
tcaagcttctaacgatgtacggggacatggtgaaacctcatccatacaaaaattagcagtgtgtagtggcgggcacctgtaatcccagctactcgggaggctgaggcgggatcatcagttgaacttgggaggcggaggttgcgttgagccaagattgcaccactgcactccagcctgggcacagagcaagactccatctca

SEQ ID NO: 498467 - DNA, 339 bp, Homo sapiens
  misc_feature (301)..(301): n is a, c, g, or t
acgataaattgaatgaaacttactataaattcggctgggtttttttgtttgttttgttttgtttttgagacagagtcttgctctgttacccaggctggagtgcagtggctcaatctcagctcactgcaacctctgccacccggattcaagcgattctcctgcctcagcctcccgagtagctaggactacaagcaccccccaccatgcctggctaatttttatatttttccatgttggccaggctggtctcgaactcctgacctcaggtgatccaccatccttgcctcccaaagtgctgggnttacagcatgatccaccactccgtccctatgcagtctc

SEQ ID NO: 498468 - DNA, 295 bp, Homo sapiens
tcagcgcgcgagttatacttgtgaccttgtgctcattcgagtactagcgggcgatgtagtcgcgcggacaggctgctggatgcctgggagtacgtgggggcgtcaggtgaatgtgctgcgcgcttgggtcaagcttctacaactggacagacaacgctgagctcatgaatctgccctgaggtcatctacccctgttcctgcgaagtcgagggggaagaggacaacagcgcttctgtgaggaagggtgtgctgcgagggcccctggtaataaagacccagagtggcaactacccgt

SEQ ID NO: 498469 - DNA, 391 bp, Homo sapiens
  misc_feature (3)..(3): n is a, c, g, or t
  misc_feature (266)..(266): n is a, c, g, or t
  misc_feature (391)..(391): n is a, c, g, or t
ctnacccaagctttcagatgagattgatacacaccgcctgacagcacccctggctctgactgcagcacactccatcgtcatcacacccacggagcctcaggtcacccttgatgtggcagttctaggaactggccttaggaaatctaactatgaaaccaaggttatggagtatcccacctcaggaaggaacactgaacaactgattgacagtcttcttgccgccagccagaccaccaagtggcccattaaccaagagaaccagcgcnaccagatacgctgacccgcatctcctacctctcatgtgctttgcccagcccagcctgcataccttactcatgatgtcaattcccaagtttcgctaataaaaacatctctgcaagcctcttcaggn

SEQ ID NO: 498470 - DNA, 151 bp, Homo sapiens
tctcatcatgactttatatatgttgctacctcactgtagttacttttctttttgtggtgcgaacttttttttttggccgcatctgaggaagttcccaggccagggactgaccctgtgccacagcacaaaaaccacacagcacaaaaccaaa

SEQ ID NO: 498471 - DNA, 109 bp, Homo sapiens
tcatggatttgctggtgcagtacaactaggcttaatagggacatgtgaaagtgaccctgaaaccggcaataccatttaacccagcaatccccttactgggtatataccc

SEQ ID NO: 498472 - DNA, 283 bp, Homo sapiens
acgagtacatgaactttgatttttggtgtagatgcagcagggcacatgcatgggtcacaatttccatcaggtttcatgtgcaatttcagggtggtgtcatgccattttgcaaaccaatctcactcaaccagcatggtgcgtgcaacatctcattcacctcaccatgattttcgtcagattggttccagccattcatgcttcaatgcacagcctcccatcataaaggcagtgtatacctcatgtgccaccaagttggtcaagattgcacttgctcacactttcc

SEQ ID NO: 498473 - DNA, 105 bp, Homo sapiens
cgtgtctgtccgtcattggggcacgagtcttagccgttctagattctatgtcttcttgcactggatgtccattgttcaggtgaccgcgcttgtataggtaaccat

SEQ ID NO: 498474 - DNA, 287 bp, Homo sapiens
ccggctcccgggtttaagccattccccttaagcgattctcctgagtagctgggagtacaggtgcacaccaccacacccagttaatttttcaccatgtcagtcaggagatcgagaccatcctggctaacacagtgaaatcccgtctctactaaaaatacaaaaaattagccaggtatggtggtgggcacctctagtcccagctaatttggaggctgaggcaagagaatggcgtgaacccggaggcagacttgcagtagcgagatctcacactgcactcagctggcgac

SEQ ID NO: 498475 - DNA, 351 bp, Homo sapiens
cgcatgagagtgcacacggctggagtgcacacgctcacttaggcgtcttcccttacagatctagcattcctggaggaagggcatgtaccattaaactccgccattttgcctcttggtgcataagcttgagcccatttacccaacttctgagatcttatcgagaagctgctgatcatcagtttcaagtgttttccatctatttggagactgcctttccctggtgctggctgcaaccaattactattttagagacaagtttaacaaccacctgaccatcacctgatggttgcctaacattcctggtggtggggttggggcagcactcctgccccaacaatgggaatgttgtct

SEQ ID NO: 498476 - DNA, 1225 bp, Homo sapiens
  misc_feature (168)..(168): n is a, c, g, or t
  misc_feature (720)..(720): n is a, c, g, or t
  misc_feature (858)..(858): n is a, c, g, or t
cggttatatttcccagcgagacctcaagactcgccctcaaaacaccggccgttggtgtggataatacaaaccccggtaatttcttctgatatataccgccgccgctgttgttttccaacaccgagagagaactttcttttcccgcggggtgtatttcctcggtgttcntccgcgcaagggcgcgaagactttttctaggggacgccggactcctgctgtgaaggcgcccctgttctttggttggtgggggccaaccccccctgctatataggcccctggtggggccggcggagcaaataacatttttctctggggccagaaatagttgtaaagtgccccgccccctggggaccacacatgggggacatttggggccttcttggagacgccccacaccatggggttctccccctttctaagcaccccaggggtgtccaacaccccttctttctcctgacagacacatttctccgaaacccccccggggttatattctgccccctggtccccctctagaggtacatggtctctcccgcccgggctctccggaggggcgccacagggagcttgcgccccccgagagcggggggagacatgacacactttttgtggtgaaaagaggcttctggggacacatctcctacgcactcttccgggcgccaggatctccccctggagacacatttacacggcaccaaaggcttctcgtgtcgtcgcgcntggagtgacacaaacccgggcgccaaacaccgcccagcggtatcaaaagggtttgttttcgaacacaccacaaccctccagccccgggggttccaaacaaaaacccatggggtacacgaaggcctttgggcgcctctngacacctgcgagcccagagcgttgtttcaccgagcatcttcccctcttgggacccaaggggccccctggcccaacccgcccagactgggagggccacaccaccgccctccacacgctgggcaccggcaacagctatgggccgcaggtgccccggatggagttcccacaaactgaggagagaacaactgtggcaacacctcctgagacaacccgtgcgagtgggtggaaggcccttcttacacccctccagaacacaaccctggcgccccccggaacgtagcccccccacagacctttttttttggaccccccttttcagggcccgcccttgggtcaaaatccaataaaggtttttttttaggagcca

SEQ ID NO: 498477 - DNA, 212 bp, Homo sapiens
gtcttgggagccagctgagcccgaaagctggcgaattcctcagagctgatcatgtcaggagccttctactggcagctggcgggccagggatgcgtgccgcaccacaaagcctctggaaggtgccttggactcttcgtgtgctgagggttccatgtatacctgcagcgcctcactgtccaccacgtcagctaggtattcctcctccagattga

SEQ ID NO: 498478 - DNA, 154 bp, Homo sapiens
aatgaattagcacggaaatgtgaacagtcctcattgaaaaacacttggaagttttccacacagaatttcagaattaattggatgctgacaaaaatgaagatttgggacacatgtatcatcttgtatctagaatccaggatggcctaggagaatt

SEQ ID NO: 498479 - DNA, 526 bp, Homo sapiens
  misc_feature (19)..(20): n is a, c, g, or t
  misc_feature (75)..(75): n is a, c, g, or t
  misc_feature (90)..(91): n is a, c, g, or t
catgaaaccaaacaagggnnccagactgaacacgatgagggtatgcttgaactatttacgaagatactacattcnggtctggtggaccgnngctaacagggagagccctattaacagctcttggtgtcggagcagttgaacatattaaactgaacaccagaggacgagaagttaaacagggtaacagatggtggaacaacgcgcacacaggactcgccccttacggaaccgcgacgcacgacacaacaaaccacttatcgcccttcaaccttcccgggaacaacttatatcccttcttaacgccaccatttgggggaaaaaacaacacaacttggggaaagatgaatttaaatttttttcaacgggaacaacaaacacacgaggggaaaagttcgactgggtttctgtggttcaataagtaactttcattaatcttactggagttggccagtaaacggaactttggctgcaacatggacacaacttcgaaacaaagggaaaacaaaattgcaatggaaaggaatta

SEQ ID NO: 498480 - DNA, 791 bp, Homo sapiens
  misc_feature (1)..(1): n is a, c, g, or t
  misc_feature (202)..(202): n is a, c, g, or t
  misc_feature (205)..(206): n is a, c, g, or t
  misc_feature (211)..(211): n is a, c, g, or t
  misc_feature (214)..(216): n is a, c, g, or t
  misc_feature (220)..(222): n is a, c, g, or t
  misc_feature (228)..(228): n is a, c, g, or t
  misc_feature (270)..(270): n is a, c, g, or t
  misc_feature (284)..(284): n is a, c, g, or t
  misc_feature (360)..(360): n is a, c, g, or t
  misc_feature (496)..(496): n is a, c, g, or t
  misc_feature (505)..(505): n is a, c, g, or t
  misc_feature (542)..(542): n is a, c, g, or t
  misc_feature (545)..(545): n is a, c, g, or t
  misc_feature (547)..(551): n is a, c, g, or t
  misc_feature (553)..(555): n is a, c, g, or t
  misc_feature (557)..(560): n is a, c, g, or t
  misc_feature (564)..(566): n is a, c, g, or t
  misc_feature (570)..(573): n is a, c, g, or t
  misc_feature (579)..(579): n is a, c, g, or t
  misc_feature (581)..(581): n is a, c, g, or t
  misc_feature (583)..(584): n is a, c, g, or t
  misc_feature (587)..(588): n is a, c, g, or t
  misc_feature (596)..(598): n is a, c, g, or t
  misc_feature (604)..(604): n is a, c, g, or t
  misc_feature (615)..(616): n is a, c, g, or t
  misc_feature (626)..(627): n is a, c, g, or t
  misc_feature (669)..(669): n is a, c, g, or t
  misc_feature (674)..(675): n is a, c, g, or t
  misc_feature (691)..(691): n is a, c, g, or t
  misc_feature (761)..(761): n is a, c, g, or t
ntgcccttctgtggcccatctgcgcaggccgcccaggagcccaccaggggatgggtgtgacccccaagggacaagggcagcaggggcacccgcccgcttctttacaatataaatagcattttcaaacaacataagaatacagtgtcagcgccacgccgggcgagggctgcgtgcagagggacacctccacgttttggctganacnncccanccnnnccgnnnccggcnctctccagggcaaccgcccccctcccccaccaaggaaatganaggcttgctcctgngtaacactctctctgttttccttagtcctctctagcccggggactgttaggacactcttttataatataaacattnctttttttttttttggagacagggtctcgctctgttgcccaggctggagtgcagtggtgcaatctgagctgactgcagcctcaacctcctggactcaagcaatcctcccaccacagcttcccgagtagctgggacnacaggtgcnaaccacaacacctagctaatttgtaaaaaatttgtanccncnnnnncnnncnnnngggnnngggnnnnttttanantnntgnntcagcaannntttgtntttaatataannaaattatctnntccatccctccctggggcaggagacagctaaggtggggaagnctccnnagaaggatgcagaacnggtgagggagaggcacctggagaaggcgcttccagcctgggctgaaggcgttttttctctatcagctcanccactcctaagagcagattccctcaggtga

SEQ ID NO: 498481 - DNA, 141 bp, Homo sapiens
ctaggtgactctgaggatcttacgcgctgatagctcagctccatagatttattacaactgtgattatatgttagtagtgattggcgggcgcgtggctcacgcctgtaatcccagcacttttgggaggccgaggtggcggat

SEQ ID NO: 498482 - DNA, 307 bp, Homo sapiens
gacgacatatacctgtatgctaggatttcaaatatttggtgtctgggcaggatggatctgatgtgacagatatcaaatgcactggtgcgatcccacagtagcaaaggtgatatgctgttgccgagttacttatgtaaagtccatttgtgtcagtatccctggtccaaagcaaaggctcccagtcacaagtacagtgcccacagcagccatgtcaccaatgtcagttttactcacaatgacagtcacctgatatcaactggtggaaaagacatgagcatcattcagtggaaacttgtggaaaagttat

SEQ ID NO: 498483 - DNA, 662 bp, Homo sapiens
tctgaaagcctgtcctgccaagaagttactgatgatgaggtcttagatgcaagctgcttgtagtgatgtcttaagaatgtacatgatggcatgatctcatcatttgaagaacatgtgatgctcacgaattattccatgtcattacctacgtcattgtgaatgatgatgctgagacctgccagcctctgggtcacacattatgttttgatgtgcattccctggatgcagcatgtcatgaaataactcccaaacaaattacctgcctgcacaagagtggtcacctcaccccacatccaatcactggaagtctcaacatccttttcatggaatgactcactagtaatatggtcttgcaaacacttgtgaacaccagagtcctgttcgattttgatacctttgatagcctttcactaagtattccagccgccacatgtgtggtcacccattgaccctgtgaccacttgccttcaccacttcatctcatcagaatcagtgcgggatgttgtgtgtgacaactgtacaaatgattgaatgccaatggaacgttgaacgggtaacatggttggaccaccagaggaacacttttgtaaaacagttaaaactagggcatgctcctcagtgtctctgcatccactacagcggctgactggccagccacggaa

SEQ ID NO: 498484 - DNA, 139 bp, Homo sapiens
tttcatgctttcagtcgatcggataaagacgcactgaagccctgcagtccttcaaagaagcgaactgcgagcaggaaaggacgacacagaagatgtgccacgggcagtgatgatgaacgaaccaccatcaaaaaaggca

SEQ ID NO: 498485 - DNA, 536 bp, Homo sapiens
tccacctgccttggctctcaaagtgctaggattacagacacgagccacggcctgacctgaactgtggggaaaagaaagagagatcagtttgttactgtgtctgtgtaggaagaagtagacataagagactccattttgttctgtactaagaaaaattcttttgccttgagacgctgttaatctgtaaccctacccccaaccctgtgctccctaagacatgggctgtgtcaactcagggttaaatggattaagggctgttcagggtgtgctttgttaaacaaatgcttgaaggcagcatgcttgttaagagtcatcaccactccctaatctcaagtacccagaggcacactacactgcggaagactgcagggtcctctgcctaggaaagccaggtattgtccaaggtttctccccatgtgatagtctgaaatacagcctcgtgggaagggaaagacctgactgtcccccagccagacacccgtaaagggtctgtgctgaggaggattagtaaaagaggaaggaaggcctctttgcag

SEQ ID NO: 498486 - DNA, 226 bp, Homo sapiens
acggctagcggcattatgtgaacgccatagctgcagcatgccagatccgagtcacagctcatggcaacaccggatccttaacccactgagtggggccaggattgaacccatgtccccttggatactagttgggttcgttactgctaagccatgacagaactcctgaaaagcctattctaccttgtcgccgacaaagggcaagagtgcgttcacttaatgccgctag

SEQ ID NO: 498487 - DNA, 238 bp, Homo sapiens
gctgaatcgctctggtcgtaggggatgaggccatgaagattcttcttggacgagtacagtgagcatgagcacgcgcacctcacagtggcgctgtgtggtgtggaatgtgcacgcagccctgcgaagctctgttgcccattgatgctggtagatggccatttgaagagactccatgtgtccttgtttggttgaaattggaacttggacctatctcttgctggatttcagggggagatcc

SEQ ID NO: 498488 - DNA, 428 bp, Homo sapiens
tccagggtacggaaatgggcaaagaggtaaaagagagaaaggataggaaaacagatcaagataaaacagagggagcaaggaggaaagtagaacaaattcaattagtgaaaataaagccattgtagagcaaagaataacagttggtgaccaaagaagacttccagcaacaaccacagggagagcaaaggacaaaaaaatatcgggcccaacaaaaaacaagtagaaggagactgcaaacagaactgcgaaaaacacaagcataaccggagaccaaaggggaaacctgggaaggcaaagaaagaaagaaaaaaaacaagagcgcctacatcatacaaactggaagagtgcctgaaggctggagaagccctgcaacggtaacaaaaaagagacaccaaggggccagtaacaagacagaaaaagaaggcaaa

SEQ ID NO: 498489 - DNA, 403 bp, Homo sapiens
tctctctctctctctctctctctctctctctctctctctctctagatctatcaacacccaaaaaaaaaaacaaaaaaaaaaaaaaaaaaaacaaaaaaaaagaaaaaaataaaaaaaactatagaaaaatacaaaaatatcaaaaaaaaaaagacaatcatacagataacaaaaacacccaatccatacaaaacactacagacatataaataaatacatagagacagaaacaacaaaagagatagagaaagaaaaaacacacaacagacaaatacacacacccgaccacacacacgacaacacaacaaaagcataaatccacaaaaaaaactagatacaagcaaacaccaaagacaaagagacacaaccatagaaaaaacccacacaatgcacccacagacac

SEQ ID NO: 498490 - DNA, 402 bp, Homo sapiens
gagctattgctacttttttgtactgctcaggcttagtgagaggaaagtctgaattcgaacttgaaactagcacgattctgctttaatgtacttctcactattaagaggatattaaatttgtactcaatagtatgtgtactttataatgtgccaatttctgtgtgtaggtcagaggcttaagatcaaaagcatgtcttgctcatcagaatgaatagagctacatgtggtacgctgcgtactgctcattggaattcgaaacctcagagtgttaggctggctgcctctcttgaactcccttgctctcacctttaactctcagaatgaattcataccaacgtaagagagcaaacctgcacataatcatcatctactctggtttgtgtgttactaaaacaatgaggc

SEQ ID NO: 498491 - DNA, 208 bp, Homo sapiens
acgggtacaaagccctgtctcctgtccttcagcctacccagtagcttggactatggcacgcgccaccatcattccagctagagttctgtatgtttagtttgagacatgggtttcaccatgcttggccaggctggttctcaacactcctgtacctcactgatccacctgtcctcagtcctcccaagggggatcctactagagtacgacc

SEQ ID NO: 498492 - DNA, 284 bp, Homo sapiens
  misc_feature (8)..(8): n is a, c, g, or t
  misc_feature (10)..(10): n is a, c, g, or t
  misc_feature (18)..(18): n is a, c, g, or t
  misc_feature (29)..(29): n is a, c, g, or t
  misc_feature (33)..(33): n is a, c, g, or t
  misc_feature (44)..(44): n is a, c, g, or t
  misc_feature (70)..(70): n is a, c, g, or t
  misc_feature (100)..(100): n is a, c, g, or t
  misc_feature (108)..(108): n is a, c, g, or t
  misc_feature (113)..(113): n is a, c, g, or t
  misc_feature (120)..(120): n is a, c, g, or t
  misc_feature (136)..(136): n is a, c, g, or t
  misc_feature (140)..(140): n is a, c, g, or t
  misc_feature (153)..(153): n is a, c, g, or t
  misc_feature (158)..(158): n is a, c, g, or t
  misc_feature (162)..(162): n is a, c, g, or t
  misc_feature (171)..(171): n is a, c, g, or t
  misc_feature (187)..(187): n is a, c, g, or t
  misc_feature (214)..(214): n is a, c, g, or t
  misc_feature (267)..(267): n is a, c, g, or t
tgaacttntncagaaaantttattaccanaaanatatgaatacncatgaatagtttcccaattctggggnactaagaaagagagtaaaagcaaatttttnaatttttntttanaaaagtntactttaccaattgcncaanaaaaaaagttcanaaatntggngaataaaanattcaaagaatcagcncattttcaaatagaaaattatgaaaanattatgcttttgattttttagtccaataacatggggtttttttcttctttgtntagaatttcatgaaggt

SEQ ID NO: 498493 - DNA, 297 bp, Homo sapiens
aggaaagacgagcaagggggagaggatccctatctaatacagggcccggggaggacgggctagccacaggcagaaaacagaaatgggacccctttcttacacctgaacaaaaattaactcaagagggaataaagacttaaacataaaaccataaaaccataaaccataaaaaccctagaagaaaacctaggcaataccattcaggacataggcatgggcaaagacttcatgactaaagcaccaaaagcaatggcaacaaaagccaaaatggacaaaggggatctaattaaactaaag

SEQ ID NO: 498494 - DNA, 286 bp, Homo sapiens
aggtatatcacggaacatcgtctagatatagtgctaagccgcaaatataagaacatggctatctatatacttggaaaggaagtcacataaataagtcacatgattcaagagtcaaaaagtatgatagaatatgcagtattaatctcccaccctttgtgtcctttgcttatcctgtactctatgagtaggaattttttacatgcttcgcattgatttatcatagctgacagtcttatctctctacttatcctcttagaacttacaatccaatattggctggggtacc

SEQ ID NO: 498495 - DNA, 464 bp, Homo sapiens
agtagtaaacgcctaggtggtagcctaaatagagtagcagctaacttcacatataatatagcgtaagacgctacactagacccagctattcccagtacggggacaaacctagtcgtagaccagactaggttataaaagtggaatacggcccaaccggcggcgggggaagcagggcgggtttggcagtaatatgggcgcgccacattaccgctaaccgacagcaccacctgcaacaagacaagagactaagaatacacaacaagagaagaacagagagaagcggacaatacagaataccactacaaaagggcagcaacaaaaacgagaaaataaccaccaaggaaagtcagggggactcaccggcacgggaaaaaaaaaaaggccgcggcaaaacacgggacaaccccaaaggaacaaaaacaacaggaaaccacaagggaacaaccagagaccacacggataga

SEQ ID NO: 498496 - DNA, 200 bp, Homo sapiens
ttcgggaaaatccctttccagggaggggaggataagtgggatctccccattgattctggcaaaacaatttctaaaatttttttgctttatgtgggaaccagatctaaatccccttttatgctggattttatatcttagttgggtttgaaaacgtttttatttttggaacccccccaaaataaataatggcgtttgttgta

SEQ ID NO: 498497 - DNA, 262 bp, Homo sapiens
  misc_feature (181)..(181): n is a, c, g, or t
ataccatgaaaataactgtgtaggcttcattcaggactggtgatagcgaaacaacaacgacgaaacagcaaaaaacccttgggtagtcaacaacaattgggggagaagaacaattagaggcaagaggttatttttaacgatgtggccacagttcagtctgagtttcccagtagacttttangggcatttcgccataatctattgacgtcatcccatgcagttctgcagatcagcttataagtgaaagtttaacaaggaagat

SEQ ID NO: 498498 - DNA, 424 bp, Homo sapiens
caggaggtctcgtcaggtgcggtgcgtcgggctaaagcacttcgataggtgtacgcgcgctggcggaaaagttcccggtcatctccgtgccccactggccgagaaacagggcaaccggccggttcgaggaagacttcatctctaagcgcaggaagggcctgatctggtggattaaccaacatgggcagccacccagtgctggcgcagtgcgaagtcttccaaacaactttcttgacgtggcccaagcagcaccgaacgaaaaaagcctggaaagcaggggcaaagaagggaagggcccgagaaggaacgaagatgggtggggcgccaaactttctttccctgaccccttaagacaacgcccccccggccggctgcccctttgaccttgccctgccggggggtaccgaaggcttcagaattcggt

SEQ ID NO: 498499 - DNA, 147 bp, Homo sapiens
aagtcttcggaaacatggcttagaagtgatctataatattgagcccattgatgacgtactgtgtccaacagctgaaggaatatgaggggaagactttaggtgtcagtcaccaaatgaaggcctggactttctgggtaccgatgctcg

SEQ ID NO: 498500 - DNA, 249 bp, Homo sapiens
gactcatagaggatcgtggatgaggaacgtactctagacaaaatacatttcttaagagtatacttgaatgattttctcgagaagagaaggaaaagtgagttgttactctgatccttgtaccactactgagcctgccagatgtacctttccaggctagcagcgccagcgcagggctaaaagggctagccttatgctccactggcgctatagggctagcagcttctgacccctaacactcacttaacgcac

SEQ ID NO: 498501 - DNA, 213 bp, Homo sapiens
tgctaggatcacaggtgtaagccaccacacctggccagtctttggaactttgcgtggatctgcccaggtgatgtggtattgattcttaatgttttgggatgcactttgtgggtcaggatttcagaagctggttataggcttttcaagatctttgttccttaatgctagacttacttctatctcagaagccatcgtctctaagggttgcggaac

SEQ ID NO: 498502 - DNA, 1231 bp, Homo sapiens
  misc_feature (1)..(1): n is a, c, g, or t
  misc_feature (648)..(648): n is a, c, g, or t
  misc_feature (726)..(726): n is a, c, g, or t
nccccttttcagtgatgagcgatcaaggaggacagaagaaacgtcgtgagtcgacgatctggtatgtgtgtctcttgacgtctatgacggtgtgatcgtctctctcgagctgattgtttgtctctgctttgcaagttagtcgacgtcgtttttgcctcatgagccgttttgcccgcctccctgtttagtgtgtgtgaccgctctctgtgtgtacaacgtgtttccacaactttacggggggccccgcgttgttcccccccacagggttccccggtcttccaagagtggcccgccctacttctccggggggcccgcgccggccacactggttttccggggggcccctccgcccccccccttcggggcttttgaccctttttcagggcttttggacacacaggaggctgcggccacaagttgctggggtccgggttccctccgccaacccagatttgcttcctggagaaagtcccttgctgggaaatcgaagatttgaggactactttcccgaatttgctcgctacactactcctggaggatgcttactcccgagccccgtagaggacccaccgcgtgaccccgggcccaagtacttcaattcgaagatgagtttttctcgaggattcacgaccctgccacgctggagantggggccgtccacactactggctataccctccacttgtcaccctcggcgcctcgtggagcacctcgaggagaccactnccgcccgctgtgtgttcacaacgagctgtccgctgagaactcccatttcacggcgcacatgcaccctcttcgtcacgtaacgaggctgcttctaaagaaaggggaccccccacaatgttagattataagcctttataggcacccacttatattataaagtgaaaaacgttaattgtacccaagcacgtttatcaccccccctagggcaatgattaaccaagccaccctttctcccttctccccgagtgattttgccgaaaccccccttttccccttcacgcttgtcttagaatgttctccaaatttatgaaagccttaaggccggcctaccagaaaaaggaaaaaaggcccaccaaaagttccctctccactttccagttaaaattaattaaaccaccagccagccacaccaaattaaatgaaattaaagaacaccacaatgaaattaatattgtgttgtgcaagccatttaaaaaaatccaaattaaaatttaatgtgagccca

SEQ ID NO: 498503 - DNA, 163 bp, Homo sapiens
gtagccggaggggcttcatttctgtgggagggcagagaggtaggtggcacagaagatggggctttatgctagtaaatatggatagcactgggcttcctccaacagtcccaattactcgtagccccgctctacttccccgtctttctggtccccccattttcca

SEQ ID NO: 498504 - DNA, 435 bp, Homo sapiens
tgtgatccactgcttggcttccaaagtgcgggattgagacttgagccacataccgtgctgaacactcttttaatggttagccaggccatttacaactctgccttagcccttgcttcctgcttgtgctgagcctaaagatctgggcagaggtgaaagtttagactcttcctaggccgtttcttagcatgtctcctgtccagttgtgcctttctaaatcccaggcgcatgccaggtgcttttcatgtgctccagttcaccacatttagccttggtgcctagttcttcttcccagggcattcaagctgtgtattgtactgtttatgtttctgagataagagtccggcttctgtcacccagccttgagttcaagtggcatgaacactgctcactgcagcttcagtctcttgaggtcaggtgatactcccacttcaggct

SEQ ID NO: 498505 - DNA, 688 bp, Homo sapiens
cgtcaattggcaagttcagtgttctactctagcgcagagcttatacgaagcacaatgtttgcatgagactcatacgagcataaagttcttcaatagcgtgacacattggtgcatctaggtgtaagaagttcagctacatgtttggcatttattagctagtggctggtaagcctgaccgcagacataattgctgcaagctgttaggcccagtatgggtgttactcacagtgctcaccaacataggtcatatcctagtgacataaaacctgttcatcttcgatctatcggttatgtattcaacgggatctacaggctctgcgagacacattcaaaggtgacctaagacaccatcttggacacacaccgatctccaggcacggtagcgtttgtcgccacaccgtacaattcgcgccactactgtgcaacatagacgggtgtgctctttaagctgctcgtaggtagctcgcctgatggctgaggttctagcattagctcaccttacaaagtcgctccaagttaactcgttatgcacatgatatcgaggctagccctcgtcatagcatgagtcgttatcatttcggatcagtcacatcaggtcccatatctactggttcaggtctcactctctaacgccgacacgaaatgcgggtatatggtctggttacagttgccatgtagtaacgttcag

SEQ ID NO: 498506 - DNA, 190 bp, Homo sapiens
atctgaagcattgggtgttggagctggtgactgctcccgctgaattgtgttatcctgcctggagtggtcagacagagtctactggacattgctcagacctgggtgtgagttcctgggtggtggatgctgcactgatcaccagtgaatgcatgttgcttgcgtgtgccctgtgagtgagtggcctgctgtg

SEQ ID NO: 498507 - DNA, 293 bp, Homo sapiens
atttccactggtatacatgccacaacattgattatccttgaaaacattatgctaaatgagaggaaccacattttgttttattcaatttatatataatgtccataatatgctaattacaaaatcaagaaaaatttgtggtggccttaggatggtgagggagtcccttggttttgggggaattagggagtcacatcttatgttttactgtggtttctctctggggttgatgaaaatgaccttcaatggattgtgttgacatgacagtgcgtgaatattctataaactatttaaat

SEQ ID NO: 498508 - DNA, 177 bp, Homo sapiens
tattgtgtgggttttcatgttggcagatgatgaacatggttcctgtttttaaaaactgttcgtaaatgatttcttaggtcgtaatcaatttaaccccagtaaaatgtcttgaattttattttggggtgcaagaatgttcgttttctgtttctttcctgtccttcagttgatttatta

SEQ ID NO: 498509 - DNA, 391 bp, Homo sapiens
tgttttaaaggccgcaggtttctctttttctgtagcagctaaacaagcactagcctcaagataagcagcattgaaacaaccgcagctcctccccctgccgaccctggccccacacccgtgctccaccagccgtaactagagctttccttggacaagagactcgtttcagtaacttttccctgataagagaccctgaccatagacgggttctggctggtttacagagattgcaccctcatgtgccttcatgtcctgaaagtactttttgaggtataccacctaattgtaatacgcttacatgctgccttcaccccaaggtgaacatgggtcatatgtaacatgcatgtttatccagcacacgtgtccgaataaacatgcatgtatattcgca

SEQ ID NO: 498510 - DNA, 272 bp, Homo sapiens
  misc_feature (206)..(206): n is a, c, g, or t
  misc_feature (250)..(250): n is a, c, g, or t
ggaggatcccggtcgcgagaacagtgctagcgagatagttctatccagtactttcgttatttcattggtaacaataggttatagatgaccagacaaagaagtgggtcttaacgtgtaatctgggtacagaatcagataagtttattgacgctagatagaagaacacgagaaaattatttacacttaagtccccattcgtttcacangcagacagcacccaagaagccagtgttaatataacgttatccanagctcacacaggtcaggtggca

SEQ ID NO: 498511 - DNA, 151 bp, Homo sapiens
ctcaagtgaggagcactgatggtgctgtgctggtgggcgccccacaaccctctcccccgacgtcacctgtgatccacatatgttcatgctgtctgactggggatcgtctagatgtctgaccgtgcatgtgcatgcaatgcttgtgcacttg

SEQ ID NO: 498512 - DNA, 355 bp, Homo sapiens
  misc_feature (85)..(85): n is a, c, g, or t
  misc_feature (221)..(221): n is a, c, g, or t
tgccaaaaccgaaacacaacccattcctgagcctggtgccagaacaaggtgtgaaactgacgccgcgtcattatgcctatctganaatttctgaaggctgtaatcaccgctgcaccttctgcattattccgtctatgcgcggcgacctggtgagccgtccgattggcgaagtgttaagtgaagcgaaacgtctggtagatgcgggcgttaaagagattctngtgatctcgcaggatacttccgcctatgggttgatgttaaacatcgtactggcttccacaacggcgagccggtaaaaccagcatggtcagcctgtgcgaacagttatcgaaactggggatctggacacgtctga

SEQ ID NO: 498513 - DNA, 347 bp, Homo sapiens
tcccccccctttgggggctttttcgcagtttttttttttttttttttttttttttttgggaaattaacttttttaacctttcgggggaatttttggaggttagccgggaaaactggggtaaacttgtccaaaaatggggtgggaaggggttttttttttttgggttaaaggaaaagttcctgggggggtttccttttttccttagggggggttttatccctgggcaggggttccggaattggcggttccttttttttggtttccgccggggccctgggaaaagtgagttcctggggggcctaatgggaaaacttatgggcccttttgggggtttttttgaaaccgta

SEQ ID NO: 498514 - DNA, 1028 bp, Homo sapiens
  misc_feature (779)..(779): n is a, c, g, or t
gacctcgcgttaatcggaaccatatggcgaggatgacgagagtggctggtggacgcccgagtctgatctccggggacgagtgaagaggacggggcccattgtgctggtcagactactgaaagctttggggaagaaccgcagtgttgatttcaacccctgatttcgttttcagtgcgaaggaggggacgtacgatggcagctgggccctggctgatgtcatgagccaactcatgaagaagagggccaagccgcgtacgattgagaatgaggaagattgagaaagttctgaaagaaagaggaagaacagaggatacaagaatgccaagtctgtcgaagtttgcgaacacggataacagaagcaaaggaaggctctgaaccaaaggagcatggaagaccttcataggagcaatgatgaggtaaggtctcatcacagcatgacacgcctctgagaactgactactcatcagctgatgagaacatcctcaccaagagcgagatacagctctaaccgtaaagaggatcggaagaaccaacgaagaagaacggccatggaagcagggacggattttttgaaggatgcgtctcagtacgatgaaagacctctcgtaccaggagaatgaacctttcccgcctcttctgaaggccattacaagccatgggcttcaagcgagcccacccgaatccagaaggcggtgcatacctgtgggtctatgggggaatggcatctgtgcctttgcagcactgggaaaggtaaaactgctggcgtttgcctgctgttntgagcgctggtttttaacccggaaggtcagtcaccaggattttggtgtagtgccaccgaaactgggtcggtgtcgctggcccagaggtgtgcgttgacacaccccctctgttgtggggttttttaaacagaagaccctttggaggggacacattaccaggggttatacaaagtactcactacgaaggttataaagggagtgtattcaaaagacatttcacgcccccagaggattagtatatacagcgcg

SEQ ID NO: 498515 - DNA, 149 bp, Homo sapiens
cactgattttctatcctgaaactctactgacttcatttatcagatctaggatctctttggatgaatcttgagggctttctcggtatatgatcatatcatcgatgaaaagtgacagtctgcctttctctttactgatttggatacccttt

SEQ ID NO: 498516 - DNA, 931 bp, Homo sapiens
  misc_feature (55)..(55): n is a, c, g, or t
  misc_feature (83)..(83): n is a, c, g, or t
  misc_feature (109)..(110): n is a, c, g, or t
  misc_feature (113)..(113): n is a, c, g, or t
  misc_feature (117)..(117): n is a, c, g, or t
  misc_feature (155)..(155): n is a, c, g, or t
  misc_feature (169)..(169): n is a, c, g, or t
  misc_feature (172)..(173): n is a, c, g, or t
  misc_feature (188)..(188): n is a, c, g, or t
gtgggatggccgcggcgccctctttctaagtcggcttcgagcacccttcagttcnatggccaagagcccactcgagggcgttncctcctccagaggcctgcacgcgggnncgncccnaaaggctctccatcgaaggcaaattggcctgcatgccnaaagtcttggaaanttnntggatatatgtacgngagccagcacgatggtcctacacattcagacattttcttttgtgagccgctgaaaagtacagtgtggagcctttccgtgaggaaatctcttcctataaacagttcggtcttcagggaagggatggtaaccaaactagacgggacaattatgttaggtattttataacggtattaaaacttctttaaaggtagctagggtatcggtgcaagggcttagcctagttagaaatgggggaaaaagcattggtgtggaccattgtgtaaagtgacaggagttgtaggggtttaccccttttgacaagcttccatagtcttcagacgacggcacattggatggatcccctacagttcttcttcactttgaacttggtaaaaagatgattattggacgctgtaaatcaaagttgtgatattgtctctaataaaggggggttggaagaacccaaaaaagaaaacaacagtatataccaaaaaaaagacttttttggggcgcgcgttgggcgagagaaaattttctaacacacatctgctgtggtgggggccggggggccgaagtattgtacttagaactttggcatataggttgtgcccaaaggggagaagtcttgggggctcagagaatggggtgtgtggtgttctcaaccaaataataaacgccgtcggaaccgagctggttttaaacaatgcagagggggttcgggggttacaggggtatcacacggggccagcggtgttaaccggcg

SEQ ID NO: 498517 - DNA, 298 bp, Homo sapiens
gcctgcctaattttctaatttctgtagagacaacgtctccctatgttgcccaggctggtctcggactcctgggctcaaggaatcttcccactttgggaggccaaggcaggcagatcacctgaagtcaggagttgagaccagcctgctaacatggtgaactccgtctctactaaagcacaaggattgccaggcatcgtggtgggcgcctcaaaaccagatctcggaggcaagcagagcttgcttagcctggagcgaggtgcgtagcaagtctcgcactacctatgcctggtcaagtagc

SEQ ID NO: 498518 - DNA, 290 bp, Homo sapiens
  misc_feature (55)..(55): n is a, c, g, or t
  misc_feature (83)..(83): n is a, c, g, or t
  misc_feature (109)..(110): n is a, c, g, or t
  misc_feature (113)..(113): n is a, c, g, or t
  misc_feature (117)..(117): n is a, c, g, or t
  misc_feature (155)..(155): n is a, c, g, or t
  misc_feature (169)..(169): n is a, c, g, or t
  misc_feature (172)..(173): n is a, c, g, or t
  misc_feature (188)..(188): n is a, c, g, or t
gtgggatggccgcggcgccctctttctaagtcggcttcgagcacccttcagttcnatggccaagagcccactcgagggcgttncctcctccagaggcctgcacgcgggnncgncccnaaaggctctccatcgaaggcaaattggcctgcatgccnaaagtcttggaaanttnntggatatatgtacgngagccagcacgatggtcctacacattcagacattttcttttgagcgctaagtacactgagcctcctgagaactctacaggcaggagcagtcagtcttgagag

SEQ ID NO: 498519 - DNA, 258 bp, Homo sapiens
cccggctgcccccgcaaaggccccagcgcccgaggtttacgcgggccgccccctgctgccattgcttggcggccccttccctttgctcgcgcccccagttcttccgggtttttccccgggcctttccccccgcccccagggcggggccccagggcccgggtgggccctggagcccgtggctgccctgaggctgtggccctgagactgcatcggaggcggcgcccccttttagggccgtggcctttgccaaaactgtaa

SEQ ID NO: 498520 - DNA, 161 bp, Homo sapiens
caggctcagtgtgatcagtattgggtcacatgtcattatctatcaaagtgtcagtattcatattcacacggtgcgcacatttatagacgtgtcaacatgtaagggatcatttatctacagtgagctatgtgtgtttcagtcactgatgataagtcatttcc

SEQ ID NO: 498521 - DNA, 1394 bp, Homo sapiens
tccattaaaagtaaatttatggttggtttaaaaaaaaacaacaagcgggtgcaatatgtggtgcgtgtccaagacatgtgtttggaattcgcttgggtggtcacatctctttctgccgggcttacagtgtgggcaaggctgaacagtgttcctcccaagcccttcagcattcccctttcgtggggctttccattttatatctccttctcctccttatttcttcatattcttattcttctcttttctctatattctccagtatttatatctccttttttctctatatctcgagttcttatatcacctttctctctcttgtggttttcacattacatgtgtgctcttctctccagaagaagtgtggaagaggcttgactccacgggccgtggtggaataagagaacactcctctctccacgtgaatatgtagagaacattttcatcacgtggtgactcattaccttacacaaagggtccatcacagtgcacacatatgccaggccaacatccactacaacaccatcacccggagcggttaaaaactacaacaagaggaaaataagggccaagatagagagaaaacgacctcagagaagcgcacccacacaggtggggaaaaacacccagggtgacacaatacagaagcagtaataaatcccgagagcgcacggggagaaaaagagaaagagagcaaagagcgagacaacaaattcccagcgaaagtaccaggaagcaataacagcagcgggagaaaaacaaggcaagagaaaagtgcgacgaaaactaccaccgcaaacatgaaggacagagaaactatagaaaacaagcaaccaaaagggggacaaaagaaaaaccaaaaaagaaaacggagacatcgggagaacaacccgacgctgtcgacgcagtggcacaacaaaccgaccagggacatcacgaagactcacaccaacaacacacccacacagcaaaccaacaccacacagagcaaaaagagcacacacacagcagagcaaaaggaaccaaacgcaaaatgagaaggggaaacagagacaaaaagaagaaaccggaaccgcagccgcaaaaaaaacaacagtaatacaggagaaaagaaacatctcggatgaaaaaggggcagacaacgagacaacaaacacagacaacgatcgaagaaggagaccgcgagacgaatgacgggatgccggagacggctcgagagccaagggaccagcgcgagacaaaacacaaccgaaagaggaagagagaaacggaaaaaagagagacaaaagggcaacagagacaaagcaggaggaaacaatccgaagtctcgcgaaatagagcgtacaaaggagggagagggacaggaaccggcagagcaacagcagccgacaacaagg

SEQ ID NO: 498522 - DNA, 414 bp, Homo sapiens
  misc_feature (369)..(369): n is a, c, g, or t
cgatagctaccaaccactcgctttccctgtggccttggacactgcatgctggctaggacctctacccgacgcctgctgcctctcgtggcccccaagccaagccgcctgctaccttcatcaccaaattgcactcgctccttcctggaatcctttttcctagcttcaccaccaaatcgttagcgctccttccttcttcctagcttccttcaccaaatcgcactggctcctggactcttttcctatcttcaccacgaactgctgcttgctcgcttgctcctcagtcctagcttcatcaaacactggttcctggaatcctgtctgctgctgtcttcctagattcactgaatccacttctgtgtagcacctggngcagctgccaattaatgctaggcctcaggatttaaaaaatatctt

SEQ ID NO: 498523 - DNA, 649 bp, Homo sapiens
  misc_feature (302)..(302): n is a, c, g, or t
ggccggggcgcggtggctcacgctgtaatcccagctctcagggaggctaagaggcgggaggatagcttgagcccaggagttcgagacctgcctgggcaatatagcgagaccccgttctccagaaaacggaacgaaacaaaaaaaacaccaaaggccacaacaaaaaaaaaaaaaaaaaaaaaaaatgtgtggggggcgcgcctgcggcccggagaaaagttttcaaaaacccttgttgtggggggcggcggggcccccagagaggtgtaagagggaacagagggggcaccacaagcgggtgnccccagaagacaaacaccgcggcgcgacaacgcggaccagagggcggcgtgtgcattttctacaacccaaaatatacaaaaatgagcgcggcggggcgaagcaaccgaggaggctgtttggcgcacagcaacaacctccacggagaggaggacgctgcggagagggacagaaccgcggcgggccttatcaacaccaggcggcggctctaaccaggggagacggcgcggattatataaaaatataaacgccccggccgcggcggggagatcagggaaccacacagaccgagacgcagcactgctacagaatgcatagctactcgagactaagcgcatgactagacgct

SEQ ID NO: 498524 - DNA, 101 bp, Homo sapiens
cccacgcgtccgagctgttgtacgtaatacggaggaactcatcatttttatacaggaccctaatgggaagacccaaattactaatcaattgacataaccca

SEQ ID NO: 498525 - DNA, 127 bp, Homo sapiens
gggctcgagtccgatggagttgggccgtccatgagctgcgccggggacgcgggttttcctgtacgccacatttccgcgccctcgccgtggggcggtgcttcggcgctggggtcttcccttttcactt

SEQ ID NO: 498526 - DNA, 884 bp, Homo sapiens
  misc_feature (303)..(303): n is a, c, g, or t
  misc_feature (305)..(305): n is a, c, g, or t
ccgccgcgagacttctcagtggttgccttggtacagtcgtcagcgccaagaaaatcatttatattttgggcgcgcgcctacctgatgaattcttatataaaatatggacgtcggtgtacctatctagtgggtgtataatattcaaatagaggtcccccttccgtttgtgtggaggtttatgtaaaattgaatgccccgccgctctccgacggttaaaagcgtcgaactcacgcggaggctgtgccgcccctggatgtatataaaacataatcgatgtatgttagccacgccccgttgttgcgngnacaagttcggcctccagcgcttaggttgctccgacacaaagagggtggcaggggggccgactctctcctagggaaaactcttaactctgagagagagagtggtgtgcttctacaaagattaactgagtctatacaaaaaagtctatcgcgtgtctgactctgccagagaatagattgtctcaatatagactccgtgggcgacagatactgttcttcgccctcggtatgtatgtaagtgacccacagcaggcacacagagatctctcctccgctctgtgtctgtctgcctgagtactgtaagatctctagtcacgtgatgaactcttgtctacaggtcaacggtgcgttgtgaagtaccaatatatatgggtctgctcacagctcttactatagggtatccagcgcgtccacttaacgaagtcactcacgtcgtagaccattttcagtctcccgtcatctatcaataaatgtgagttcttctttaacaatgtcgaaagagcagcaatctgaaactggctggctgaatctcgagaaaaggataggaagagcactcatccacccccgcccacaatgacaagc

SEQ ID NO: 498527 - DNA, 220 bp, Homo sapiens
gtgggaagggcagagggagaggcgccagacactaagagccagggctgtacacagggacccttcaggtcaacagctctttattaaacacctgctgcctgctctaggccagatcctagagacgcagggtgagcaagacccgtctctgtccctgagctcttggttggttgggaggtggcccttaaccagatcatcagcacacatggtaaggagtgtgtgacgg

SEQ ID NO: 498528 - DNA, 1426 bp, Homo sapiens
gctattctgatcccatcgatgacacggtgggagctgctacttctattacgtagccttacactcaaatccttcgtctatgtgtgcaccggctaaatctactgtgacctaggcagccatcgatgccatatggctgtgagtgagcctagcatttcactgaaggcttaagctcgtgggtctatggcctatatcaatattcgtctgttctttccctacatacgcccttacttccttgtactcgctgacgtgtagcttgaacgtacgtattcgtcgatagcataccttgtcttgtcaccgctgtatatagcgacagatgtgcccacgtgatgaggggccttggttggctctcttgccatactctcacccttcccctcgttctcacgtcacctacgctcggctcgtccattgctgcgtgataggctgctacgggccgtgcttcccggatcccgtgtcgcaacctggagtctatccttctcacgcttaggccgtgcgcccctatcttacaatcaacgttgaacgcccttctgcatcatcatgctactaccagtcattcattcctttaacttcccctacgctatggtagctcatccgtgctagtgcatatacccgagagcacactacgaaatcttacagtcctacattacatctataatgctcgcttcttaaagaaggccgcctttgcacatacataccctaaagtatccacaaccgtgcccctttcgtcgtcgtactagtacaaatcctcgttttcttaaaatttaaccaaggccggcctcaccgtcaccttgcatcacctggattacttcttcttaccccgttccggtagtcatgacatgggcctgtcagcgttattaaccctaggttaacctgggaacccggcacaaccctgccacattcaccctgccggtgcctgtcgaaacttccgcgctgggaacggctatgggactgaccttcccattctataattacctggactgcaccggtatttcctgtacatttccaaccgggggtcacacccctgaaaaggtctcattataatccccttattactccgtaaaccatagagtttgtgctgaacactacatgtctccccactacttggcatactcctcttccctatatactcccgtcggcagaacacactaacaaacgcacttcttcgacattacctcaagcgtcactcgcttctgggaacttctcttgattcattcccacataagacttttccactcacaatgtccccatatcatttcgctcagaactaccaacccatcattgcatcttaactcccccacttacactcggcgccttgcacaacccactcaatcccactacatccccattctcctacacttggacacccatactccctcccgcccatatccaccaaacactttctaaaaccttcttctccgtcttctccctcctc

SEQ ID NO: 498529 - DNA, 216 bp, Homo sapiens
cgaagtcggcacatgttagctgttttctggggacgctttttatctcattagcacagtgctcctatcctttgctttcacctatagatacagagactccaggaatgaaggcctaactgcactggtaactattcacatactatctttgccaatttcctgtttcctctctttttaaagacctactggaacagaagggaatagaaaaagagagattctaca

SEQ ID NO: 498530 - DNA, 315 bp, Homo sapiens
  misc_feature (15)..(15): n is a, c, g, or t
  misc_feature (106)..(106): n is a, c, g, or t
  misc_feature (149)..(150): n is a, c, g, or t
  misc_feature (155)..(155): n is a, c, g, or t
ccccccccccccgtnaataaaatccccaaaaaaattatgtctcttccccccccggggcccctttcttcccccctagaaagaccattttttagtataagtaccatgnaaaacatttttcccccggataagcctgggtcagattaaaaccnngtganctgccaattaacagcccaatatttccaatcaaccaacaagtcattattaccctcactgtcaacccaacacaggcaggttcataaggaaaggttaaaaaaagtaaaaggaactgggcaatttttaccccgcctgtttaccaaaaacatcccctttggcata

SEQ ID NO: 498531 - DNA, 233 bp, Homo sapiens
  misc_feature (10)..(10): n is a, c, g, or t
  misc_feature (54)..(54): n is a, c, g, or t
  misc_feature (61)..(61): n is a, c, g, or t
  misc_feature (90)..(90): n is a, c, g, or t
  misc_feature (104)..(104): n is a, c, g, or t
  misc_feature (138)..(139): n is a, c, g, or t
  misc_feature (213)..(214): n is a, c, g, or t
tgctggcgangtgaccttcgcagatggaggtaggcagcgggagcgggagctatncctgcgncctcccgcagcggggcccaacagctcgangaggaaggcccatngcggaggaggaggccagccaatggcggcgccagnnaggaaacggagccttgctaacgggcccaacgctggggagcagccaggccaggtggcgggcgcaacttcgagagnnggacgagggcgaggaattt

SEQ ID NO: 498532 - DNA, 387 bp, Homo sapiens
ctgttaggctgcagtgcagttgtcccagccttactgaactgaaaaatgaggtcaataaggtacgcctttgagagtcagcattaacaatcagaggccagatatgtggagttgtctgagatgggaaaaacaaacgcccaggcctgcttgagggtgcaggacgggaggagggtgaggattgaaaaactacctataaggtactatgcttattatatgagttattacaccaaaccctgtgacatgcaatttacctatataaaacacctgtacatgtacccctgaacctaaaattaaaaagtttttttttgttttttggggttttttgagacggagtctcgctctgtcacccaggctggagtgcactgcagcctcctaaaggtacaggctgat

SEQ ID NO: 498533 - DNA, 1035 bp, Homo sapiens
ggaagtggaaactcacagtgtgcagacgcctagaagtgagatatcagcagcagctgtaggcagctcaattccatgggcttcatcaatcgtgagggctaagcctgcagggcctgcattgccacaggatggggagccatcagcgcagctatcgagagactgctggggtcccagactctcctaatccctgggatccagtgccatccatgctcgttcttccccgtccctacgagagtcgcgctattcaggtgttctatctcgtcaaataccctttaactccatcttgctagcgttgtgctcccctacctgtcttctcccttcatccgtttccaaaacgagcagggtgacttgtagaagtgccatgggatcgaaccacccttcagcttctgtctcgaagaaataattggtttaattgattacgtctgctaaatagtactgctttctctccatggtctccttgtgcagctagtggctacttaaaacagtttatacaccaggcaccgttgcattgaactctaaccctccttgaccccaacatgcagcattttgccagtgctattaaagcttagccgttggactgtgccagagatcgagggaggaaccaggctctctgggtttaatgtggatacttagtcttccactctagtagccactaggggatctggtcttatgtttaacttttcggttaactctcttccttgctttttcttccctacccccctaatcccctaagcaccgaaacaaatgctagaatatcttggctctgaacgaggagccagtgaaaccacgtggtaagtgttccttcctcgggccctattccgggtcatcaggcactatcggtgggccactgttgggaacttccggcacgagggagatggccttttcccgttgacacggggattacacacgctcgggcaggaaattacaacagctggggacccaaagaacatgcgtaaagggcgaacagataccacggagaggtggggccccgcatcacaggagaggacacagggaaaccaccttgaacaacgcccggaa

SEQ ID NO: 498534 - DNA, 237 bp, Homo sapiens
tgagatgctagagtcttcatctcttcatgaaggtgcctaacacgaggcatacagtatgctcagtacactgcctcggcgtgctcgattgtaaacaaagcatctatctctgaaagctgattggctatcacggagattcttcgtgctgtggtcaaagattagcccctctcccttgtccagaaaaatgccacttgtatcaacttatctgcctttgtcggcagaattggtacttaaccttat

SEQ ID NO: 498535 - DNA, 265 bp, Homo sapiens
  misc_feature (225)..(225): n is a, c, g, or t
agatcttatgcgtgtgcttagtcgcgccgctcataagagagagctgcacagtcaactgggccgggcaggactgggctccctctgatcgatgaggtggtgagccagagcccgagccctcacacgtctgacttctctgactggtctagttttaatgccaagcagtaccccttggaccaagaggaaggtaagacatgctgccctcttgctggcccagccttctacagncaggcccccggccccagcttcccagggcggccgagcagca

SEQ ID NO: 498536 - DNA, 102 bp, Homo sapiens
gtgagtggacacatccccattccatgactgccggaggaaaagaggagacattcctgtactccccacccattaccgtactccccacgcattcctgtactcccc

SEQ ID NO: 498537 - DNA, 296 bp, Homo sapiens
  misc_feature (241)..(241): n is a, c, g, or t
cgatccacgtagtatgtacaacagaaaacgaagagaaagtttcagatggcataaaatgtggcagtgttctgttcatgcatacatttctgctcccagcaatattaccattattctcctctctgggattacagcctctttcatcaaacacaattcttacccatcctttattataaatccagcttctccattaagcctttcctgtcatagaaaagtaataacacatgccaccattttcatattngttccctttctctttaatatcttacagcacttatttactacataatcccaatcct

SEQ ID NO: 498538 - DNA, 349 bp, Homo sapiens
acctgacgagttgtccgagttatgaatatggaatgaaaggataaattcctgatgtctccattaagctcctgtgtgtaaaatactacatggctaagccgctgctatctaaagtagtgaattcgatcttgaattatatctaacaattttattctgcaaataaagatacatttcttgtatatacatggcgattactacatgaaataaaaaattgagctccaaatagaaaagggctgacccttgataaagacatcttaaattgccaaactgatgtgattacccactgtcagaactagaaacagaaggattaaaagattaagttaaaggaaggataaaagtttagtcaactgct

SEQ ID NO: 498539 - DNA, 542 bp, Homo sapiens
  misc_feature (362)..(362): n is a, c, g, or t
actgctggaccgagcgacgcatgaccccgctcaacctctacctcgacaacgccaaccccgcccaggtgcgcgaagcattggaggattacagcctggcgatcaagcaactggcggcggcgaatatcttccccggcgacatgttgctgaagaactttggcgtcacccgccacggccgcgtggtgttctacgactacgacgaaatctgctttctcaccgaagccaacttccgccatattcccgcgccgcgcacccccgaggatgaaatggcctccgagccctggtattccatcggcccgctggatgtgttccccgaagagttcccgccgttcctgtttgccgacgccgggcagcgccggttgttngatgagctgcatggcgagttgtacaacgctgactactggaagggcctgcaggacgcgattcgtgccggcaaggtgatcgacgtgttcccttataagaggaaagagcagctgctagcggcaagcttcaacagcaagtaaggcagacctgctttcacctgccccttcagcctcggcggtccg

SEQ ID NO: 498540 - DNA, 532 bp, Homo sapiens
  misc_feature (12)..(12): n is a, c, g, or t
acagaattggtnatatatattatataatgtatatatatatattaattttaattcatggagtgctatgtctttgagatcatgtaacagaatttaaaatattagggataaaagatccctggtggatcagtggctgctccaaggaagtgagagtctagattctgagtacagtttgtaagtactgcctggcttattagagccccccatggcagttttgtcatttccataagtctccctatgctgcctctgcttttacttgcatcctctggaatggtttgggagactgacgtgccagagcagtggcaagtgaatggagagttgctgagaaacgtagctcttccttgaacgaactgttccagagttaatggtgatacacaccagtgcaatatttggcttaccccacgaaagaaactgagatctatagagatgtctgaactcacagtagaaacacgggtaatttaacccacctgccacagaggactaaagaatttgtaagtagtttgtcattaggagttccagtgaaataaatgcttaa

SEQ ID NO: 498541 - DNA, 394 bp, Homo sapiens
ttaatatgggaacaccagtttctagctgtcctggaggaaccacaccatatgaaaagttggactcgagcaaggacaacataattagcccaatttagcacctggtttacatggtgtcataattgcaggcccggtggacatgctggacatatgcttagttggttcagggaccatgcagagtgccctgtgtctgcatgcacgtgtaaatgtacgcagttggatacaacggggaatgtggtaccttcagagactgtccagccatagaatgttaccaccttaaaagaacccttcaagtgtggagctttgtagtaggtgtctttcatagctcacaaacatacctcagaacaagccattcatgagttacctgtaatgggaaaataaatcattgtatcagatc

SEQ ID NO: 498542 - DNA, 2003 bp, Homo sapiens
ggaatttataaccaaaattttaaaactatttttatatttttttaaatctttaaaaattttaattactgtgatattgattatacaccttttttatagatgatttgtttaaattatatctggaaaatagagttgatttactttcagacatgaactatacaaacaggatatatttatatggcttgaggtatgttttgtaatagcgttgttctttaagtgtacatcgtaatttgacctaatttaaaaataatatattttcgaagtagtagattctcagatctttattctaacaattacatgatttgaaaacagtactcaatgagactggaaataccttttgtacctaaatgttttttaaattaatcaaaatacattctgtgagatactattaaaagtctcagtaaagtcctattttaaaggttagacactttcagagatcaaggtgctccctatactcccttgttccatcagaagctgcagtgactcttttaggtgattctaattctttcatgccttgaaattaaactatgaaattaaaggcagaaaaactggaaaacctactgcaggtccagagacttctgttttacaactgggaaacagcttgtgtactaaagtaatgagaataaaaatgttggcccaaaattacttttataaataaataattccaaaataatttcttaatttaaaatgatagcacttctcttgcacttaagaatggcatccataagattctgtatttggcatttagactaacttctagatgtatattttaataatagattcataatgttacatttaattgaaaacaaacctttatatccaatgaaaatagtataaacagaatgatttttataccaccttgttaagattggtgcttttggtaacttgtactgacacaacagacatgtgctagtatctgataacattaagtacattttatgtcgtttaatataattatttactttaaaaattgtacttcagaacatcagattttattcacattttttaactcactgaactttaataatcaggtcacctgtactctagtcagcactgtatatattcttggagtttgtacatgggacttagcaaccacactgagtgaggtaaaagcatttgatttcagatctaaaattcgtaacaacctaaatttgagaggtggctgaaatgtgatgaaaagcaatacgaaaagacaatgtaaactttgaaaaggattttagagggaaaattgcatagctttttgtaacatttacttaattttaaaactaaactcatacttttgctatctttttaatatttatctcgtttgggagtatacgtgtttttaaaatttgtgttttctatctgtttactatagtgtagctactggcttcatttaataaaaataaatgattttgaaattaaatataatatagaattcacattttatatagctctctcaaaaattaatttttattccttaagcattttaaaaacattttaaaaaatgttttgtaaatccaggtgtattttaacaattaaatgcctattttgttatatgttatacttttattcttaattctgaattttgacattttcacacaataaaaataatttatatcaatattctgtttctcttttcaattggtagatttaaatgatttcctttgggtaataaaataggtaaagattttaaaatatgattattgaaaaacagtttaaatcagtagattaaaataatgcatttttttgatactttacacacaaaacttttttctctctgcaagtttttatgtatgtgggaaagaatttgtgattttaaatgcagctacaaatagcatttcaccatatgatgttagaggatttgatgtctgtcttgcgttaaagctgttggtcaacagatatgtttttatgtatttaaaagaggctcttgtgtgcctttatgtgtaaaatgcatattacgtagtatacatgatattgtatgtaactgacttcaaatataaaactatgcatagaaacaacaaaaa

SEQ ID NO: 498543 - DNA, 107 bp, Homo sapiens
ggatttgctggtgcagtacaactaggcttactagggacatgcctcagggatactcctcaagtagccatcgctggtagtatatccaaagacaaccatcattcccccta

SEQ ID NO: 498544 - DNA, 1326 bp, Homo sapiens
agagagagagagagagagagagagagagagagagagagagagagagagagagagagagagagagagagagcttctcttgcacttaagaatggcatccataagattctgtatttggcatttagactaacttctagatgtatattttaataatagattcataatgttacatttaattgaaaacaaacctttatatccaatgaaaatagtataaacagaatgatttttataccaccttgttaagattggtgcttttggtaacttgtactgacacaacagacatgtgctagtatctgataacattaagtacattttatgtcgtttaatataattatttactttattaataatcaggtcacctgtactctagtcagcactgtatatattcttggagtttgtacatgggacttagcaaccacactgagtgaggtaaaagcatttgatttcagatctaaaattcgtaacaacctaaatttgagaggtggctgaaatgtgatgaaaagcaatacgaaaagacaatgtaaactttgaaaaggattttagagggaaaattgcatagctttttgtaacatttacttaattttaaaactaaactcatacttttgctatctttttaatatttatctcgtttgggagtatacgtgtttttaaaatttgtgttttctatctgtttactatagtgtagctactggcttcatttaataaaaataaatgattttgaaattaaatataatatagaattcacattttatatagctctctcaaaaattaatttttattccttaagcattttaaaaacattttaaaaaatgttttgtaaatccaggtgtattttaacaattaaatgcctattttgttatatgttatacttttattcttaattctgaattttgacattttcacacaataaaaataatttatatcaatattctgtttctcttttcaattggtagatttaaatgatttcctttgggtaataaaataggtaaagattttaaaatatgattattgaaaaacagtttaaatcagtagattaaaataatgcatttttttgatactttacacacaaaacttttttctctctgcaagtttttatgtatgtgggaaagaatttgtgattttaaatgcagctacaaatagcatttcaccatatgatgttagaggatttgatgtctgtcttgcgttaaagctgttggtcaacagatatgtttttatgtatttaaaagaggctcttgtgtgcctttatgtgtaaaatgcatattacgtagtatacatgatattgtatgtaactgacttcaaatataaaactatgcatagaaacaacaaaaa

SEQ ID NO: 498545 - DNA, 955 bp, Homo sapiens
agcggggatgcgttgctgttgctgtatggtgagccgtgtggcgcggcttctgtgggccggaaccttaaagatagccgacaatggctgaacatactggtgactaactgaagagagatggctgcccgtggaggccaaacactcagtcgagtacagacagaaaggaacatatgaaataacacggaccaacgaaagaatgcactgatgacaatttagtgcaaaaagagaacatcaagagacagcgaagatagaatgacgaagatgaaccgagaagtgatacatagaatatgacaatatacagatcgaatatcagagaatccgtggcaatgcagataatagcaagtaaggatatggagagaataatgcaatatattcgagacgatcaaaatcgaaaagcatatgagatgatagacatggaatgtggaatgataattgagtatatacataaagaatagcaccaaatcaagagccccaatccaataaagaaacaagagaataggaataatatacaagataagtgagacaaaacaaaactacattgatagaaaagagcaagcagcagatgccccaaagcggataagcaaacgaacaagaccagtaacaatgcagagaggaaaaactggaggagaaaatactcggaagaacactaaaggttgaccgaaaaaacaaatactccttggaaattcatgaaagacaacccaggataacacgaaaaagaaacgaaaagggaacattgagggacacgacgtgcttatgaattgaaatcaaaacctgaaaagaaaggcccgcaaggcagaaaccaaatggaaagcaaaaggaattataaccaaagacccccctaaagccccggatattgaatcaaaagaacagaacaaaaacgcaagctaaagaagccgagatcaattgggaccataaaacgagaaacccaaaacaagcaaataaagattacgctggaaac

SEQ ID NO: 498546 - DNA, 362 bp, Homo sapiens
ggataccagtgctactccacaaacaggatcaaaccagagatgaagggatgaaggtgaaaggtgataccaatgatggcggctatgcccaggctggagcaggccagaaggccataatgagcaacttcttcaataagatgaaattgacaaggccaggcacagtggctcgcgcctgtaatcccaactactcgggagggtgaggcaagagaattgcttgaatccgggaggcggaggctgcggtgagccgagatcgtgccactgcactccagcctgggcgacacagtgatgactctgtccaaaagaaaaagaaaaggaatggagttcagaaaggaaaggggcgaagtcttgtttgtggaggtagcact

SEQ ID NO: 498547 - DNA, 109 bp, Homo sapiens
ttttttggagaagtataaagcgttgaggaagtataaagcgttgagagtcatggaatcaatacaggaagcacacagagccagccacactgcagattccgaggagggtcaa

SEQ ID NO: 498548 - DNA, 105 bp, Homo sapiens
tggattccactgaggcaggctgctgcggaagaggcatgaggcacgtgggagagacccccacgggctgaatggccaggcctcagagctaggggctcgttaatgacg

SEQ ID NO: 498549 - DNA, 434 bp, Homo sapiens
tgtggaacccctatcttttactaaaaacacaaaaattagctggctgtgggggcacacacctgcctttccagctacttgagcggctgacgcatgcgaatcatttgataccagcagcggggcctgcagtgcgccgagactgggccattgtaccacagtctggccggcacagcgagaacctgtctcagataaaaacaaggccgggtgcggggtggctcacatctgtaatcccagcactttgggattgccaaggcgagtagatcacctgaggtcagggagtcgagaccagcctggccaacatggtgaaaccccgtctctactaccaatacaaaaattagccgggtgtggtggcacacgcctgtaatcccagctactagagaggctgagggaggagaactgctttgaccctggagatggaggctgaagtgcagtggcac

SEQ ID NO: 498550 - DNA, 289 bp, Homo sapiens
aggacatttagaaagatataggagagatgaaatattccactagtccaggagaaggccataaaactcatatactatacataattttagtatcctatgaaataccaataccgtactgaaataccaagtgttctagatttaaaacttgctttttaagaaatattggcatttgcggctgggtgcggtggctcatgcctgtaatcccagcactttgggaggccgaggcccgcggatcacgaggtcaggagatcgagaccatcctggccaacatggtgagaccccgtctcccaca

SEQ ID NO: 498551 - DNA, 142 bp, Homo sapiens
  misc_feature (113)..(113): n is a, c, g, or t
ggcagcagcgatttctaggatactcagtagaattagaattgtgaagatcatcagtgtagagtgaaggttaatggttgatattgctatggtggtcgcttccaattcggtgcatnagtaggttgcctgaaatcgagccctgcaa

SEQ ID NO: 498552 - DNA, 309 bp, Homo sapiens
atacggatataatactgatctccttttctgagctctccacgttagtatcagacaggtcctccggcctaagattaaggagataaatattccttctccatcttctcctcctacgatgttgacagcaaggtccgttgagccacgatgaagaacatcttatctaggttcccttgtaatttcatcatctccaagtactgctttagaaactggggagtatctggctggagatgcatggtgtctggcccaagacggaagatgggctaacatggttatcaacggaagcaacaaacttacaataaaatccccactatg

SEQ ID NO: 498553 - DNA, 330 bp, Homo sapiens
tcagctcggccctgtgtttgcacaacctagggtcagttttgcaggtggtaagccatttaccaagatagttgtaggtaagaagggcagatttattagagaaattgtgaaaatatgttgcagtgggcagctcagcagagaaggggctacctgcaaagaggcaagggctggaggaaagttttatagggtcctgctgaagggtgctacgtgtggaatgaggtcattgtgcccgcaggttgtttgtgattagctgtctctaacaattgttcatacaataattgttcatttttgttctcaacttggggctctccccaacctggggacccttcctta

SEQ ID NO: 498554 - DNA, 170 bp, Homo sapiens
atagcctgaaaatcaaatttacagtaggaaaaaatgcctgggattttgtccacttggtattattgactcacaatgtccaacaagaataatgtggtcacataaacttgatctaatgcatgatggcactgagatattttattatggcttctcaattaattaaatagagaata

SEQ ID NO: 498555 - DNA, 263 bp, Homo sapiens
gctcgaccccactggtcatggcctaatggagactctgtgtgggggttccaacctcacatttcccttctgcactgccgtagcagaggttctccatgaggggtccgcccctgcagcagacttctgcctggacatccaggcgtttccatacattctctgaaatctaggcaaagattctcaaagctcaactcttgtgttctgtgcacccacaagcccaacaccacatggaagctcccaaggcttggggcttgtgtcctctgtcgacg

SEQ ID NO: 498556 - DNA, 343 bp, Homo sapiens
  misc_feature (288)..(288): n is a, c, g, or t
ggaaccaccatatgtttttcagcagctgtaccatccttgcttgcttttctgttttgctcaactaggtaggtctgctgttctcactcatatcaagttaggtcaaatacaattgtttgacactgtggagttcccataatcctctcgaatctcatccaccctgcctctatcaacagtttttttttgactgttctctatctgaacaaacctgttaccgttttggtgggaaaagtgacctaaatgtgaacctgttcttataaaacatccatccctggggttcggtgttgggcnttctatatttatgtggccccggtcttcctgggtccgtgttcttggcctataaaac

SEQ ID NO: 498557 - DNA, 289 bp, Homo sapiens
gagaggtcgatgaagcatcaaatctcttcaggaccaactctactccacatagcttttgagattcagcagctcgtaactcgcttaacccccaataataaaccaactgagagaactctctgtgctagtaaccacgttctcctgatcaaatatcactctcctacttacaggactcaacatactagtcacagccctatactccctctacatatttaccacaaaacaatggggctcactcaaccaccaaattaacaacataaaaccctcattcacacgagaaaacaccctcatg

SEQ ID NO: 498558 - DNA, 260 bp, Homo sapiens
atgaagagatctgcacaagtgcggcatgcccagtgaagccgtatgttacgatcctggtgggatggtccttcacagtcatccttcacagtcatcagtgtgagcagacatcaaactcagaacagccagtgtattgagcaagatgagcaacatgtgggactcctacacacacatacttggctcacgacagtgtcacacatacttggctcacgcacaggtggtgtgctccatcttagactgtcgaccctgcagtgcactgcaat

SEQ ID NO: 498559 - DNA, 660 bp, Homo sapiens
cagctaacggaatataccttggcgactggctggtagaatagatcgtgcccgttcggcttagcgatcgacttatatgatgtcgacggtgtcgcgtcaactcgtaacccgtgttttcccggcgctgggtatttgcctcgaaccatggcgcccaagggcaaagtggcacgagagggaagaagcagatatttgaagcagaacagagagactctgaagtatctacctgcggatcatactggtgggccaatgccatttactgccttgtgacgaaggtcttgcttttactcatctgccatcattttgggcctggttggtcctgggctttagtaactggcagtgtatggggccagctaccactctatagagctcgatggcacgagcagcgtactctgaggatggggacctgatggcatggtggccatggaacctcaacatggagcacggcattggcacgaacaccttaacggatgttgaatcctaactgacaggcatcgtgcagggtgctcaaggctggcttctactacttactatggtctggtccttactggctttgtgggtcccatggcgggtccttttacactacttgtggggtgaactgtgctggggcccatgggttcactagtaaacagtgggaacacaaggaaccagatgacaatgatgaaa

SEQ ID NO: 498560 - DNA, 178 bp, Homo sapiens
gctcgactgcgcacctgtagtcccagctactcgagaggctgaggcagaagaatcgttggacccggaagcagaggttgcagtgagccgagattggaacactggacttcagcctgggtgacagaacgagactccatctcaaaattaattaattaattaattaattaattaattaattaat

SEQ ID NO: 498561 - DNA, 238 bp, Homo sapiens
ccactagcctcatgagtagcttggattacaggcgcccgccaccacgtccagctaatttttgtatttttagtacagacggggtttcaccatgttggtcaggctggtctcaaactcctgacctcaggtgactcaccccgcctcggcctcccaaaggattacaggtgtgagccactgtgcccagccaaatgtgtctgtttctatgtgagcatttgtaggtaatgatgagggtagtggcgtg

SEQ ID NO: 498562 - DNA, 415 bp, Homo sapiens
  misc_feature (309)..(309): n is a, c, g, or t
  misc_feature (318)..(318): n is a, c, g, or t
  misc_feature (329)..(329): n is a, c, g, or t
  misc_feature (355)..(355): n is a, c, g, or t
  misc_feature (373)..(373): n is a, c, g, or t
  misc_feature (387)..(387): n is a, c, g, or t
  misc_feature (406)..(406): n is a, c, g, or t
tgagtcagagtcttactttgtcatccaggctttcccaggctcaagtgatcctcccacctcaggctcccaaatagctgggaccactggctaattttttatagagatgggggtctcgctgtgttgctgaggctggtcccagactcatagggctcaagcccttcaccctcctcaggcctcccaaagtgctagggattacagggtgtgaggccaccacacccaggcctttaatggcacattttaaaaacttggaatttgtccattaaagtgtataggaaaaggtactgggaggcactatttcatccaaggcanttttattanttttggcacanttttttttttttcaggctcttctggnggtaaaggggtggggggngttaaatcagggcnggcacccggcattgggggntttggggcc

SEQ ID NO: 498563 - DNA, 854 bp, Homo sapiens
ggcgccgccgccgcccgcctcagcccaacatggcgatgcacaacaaggcggcgccgccgaagatcccggcacacccggcggagctggcggagctccgtgaagggggaagcaggagctgccggaaacttgtggcaaattgtggagcgacagatctatgcttttggagggaagctaccctggaaagacacctcagatgtttggcaatattattcgtggtgggatccggtatctgaccaaccaaaaaaaattccaatagcaaaagtgatcgagggaacccggaagttaaaggaagctgagggggtcttcagtaaatcctgcggttacctcagcagctgcagtaagtgcatgtgccaggagtccaggaccagctcatggaaacagagggagccagcgaaagtgggacggaaagtgactctttctccagatttccacaattcaggaaatatgagcccagccagggaggaccctgaggatctggatggctctgtgcagggagtgaacctcagaggctgttcttctacttcctcagggagtcaccaccagcagcataaaagcgaaagaataaaacccgccacagggattgctctgagttaacaaaaaaccacgaggtggctattagaagacccttagtggcgaagctccaggtgtgagcctgttccttttttgactcaaaggttaattctcactgagtggtggctccccttgtttccagacagtgtcgtgattggtttgtctccctggtgccacccccttggggccggcgtcctttgcttgacgagcggggggactggtccccggtggggggccctaagggtcccagggggtgccccatctgttggcccaccggcggtttc

SEQ ID NO: 498564 - DNA, 382 bp, Homo sapiens
ctgacatctataggatccccgcatagcttcatagtgaggatgagctctatcttcaaaagtactaaaagaccaatgttaccttaccataggccttaattccaacttagatccatctccctccaatcacggtagtccatgctacctgggacactagtttatgtgaattctgatttaccttattgtagacttgctgcctacttcgtcatgactgttagaaccctggccttcttcgtggctttccttcctttggcttaggtttgctaaagctagaagattcaattgctctttacagacttatgaggaagatagactttgtaacgcagatgtcacttctcatgccagccctgccctggttagctcttctggaggaatactgctgctg

SEQ ID NO: 498565 - DNA, 409 bp, Homo sapiens
gcaagaccctgccaaggagagtctgagctcagacacgctagctccacccccacctgatggtccttccctatgcaccctggcaggaagacaaagggcaaataaatcttgggagttctagggccccgcccactgctggttcctccccatataaccacagatgatgctttctggaaaggaccacctcctggcaggaggccaaccagcaaaaaaaatagaccattaacccaccaaaagctccattgtaccctctgccacctcacacgaacaggcactggtagccatggctgagagacccatagatgtttcacattacaggactctgcagataacctccagtaccagcctgaaactgggaagatcgctgggtggctagacccaggcatgtggactgacccaggatgtgggactg

SEQ ID NO: 498566 - DNA, 744 bp, Homo sapiens
  misc_feature (285)..(286): n is a, c, g, or t
tggcgctagtgcagcttcagccggagcgggtaggggtctcgctcgctagcttgctgtttctcggagaagctcccgagtgtccggcctaaggccatgagaaggcagtgggggtctgccatgagggcggcgagcaggcgggctgcatggtgagcgcctcccgggccggacagcccgaggcgggcccgtggagctgcagcggggtaatcctgagccgtagcccgggcctggtgctttgccacgggggcatcttcgtccccttcctgcgagctggcagcgaagtcctgnncgcggcggcgccgtcttcctgcctggcgacagttgcatgggactgacctgcgcctgcactgtgcatgtgtgtgccccaactggccgctgggtccctgtggggcgtgcgctggagctggggccgcccatgtggctgtgcactgccccagtgcgccatgcctctgagccctggcccatcctgcccctgtccctgctgggctgtccccgtgcagcccctggcttcctgtctgagcttgctgctgcatgctgagcttgcctggcttcttgggcccacattcgcgcgcctcttcgcgggactgatggcatgcggaacatgtggctgcttctcgatgcgctggctgctgggattgactgaagtgtcggatgtgacgaggatggtggatcaattgagagctgctggtgatggtttggcgctgctgggcagtgcggctaggccaaggaggagtgtgggatgtgaag

SEQ ID NO: 498567 - DNA, 898 bp, Homo sapiens
gtctaccatttaggtctcagtaaacacgtgtagttaggcctgtagtagtctgagccaacaagcgtctgagacataaaacccgtgctgctgtatagagtgaaatagattggacgtcctagaaaggaattcaaactgtcctattagcagtggaaagtccacatgggctaatactaactacttgatgcgttgaaggttggtcaacactgtggagacacccagtatctttggtaatctcttaatgtggattcccctttttcacaggttggccaggtgactcttcgttggagttgacttgacaattacttggtttccctaaaacgaccggagatttacatggcacgtatgtggccacgggggctcatgaggtaggcgtccggaatgtcacctcttgcttgggggacatttccatggaccgccacattggtccttgtccactttaaaataacgctgtggagaattgtctgttcactgctatctccaaatggaaactaagaactcaggatttggaaagttaagttctttgttcggtagctgcacgaggcttgtacaccagcttctatgtttccccttccaatataattccttttaccgacgcaagggaataactacttaccataagggcccgccccaagggtgatacaatcggtttgaaaaaccctttaaaagagtagttacccaaggagccattaaaattgcgacctggtgtccttgtccaataattcttattctatcctaattgattcccaagaacttgactgggctaatagaaatctagctgcagtttgcgcaatgggaagtaattgaaggcaacatacacgttgtttgccacagagacccaaatggagtgacccttaaggtaaacactgagacaggttactggtcagattcgcgggagaag

SEQ ID NO: 498568 - DNA, 114 bp, Homo sapiens
tgacattctgaatgcttctagtaaataccaattttttttattaggattggtggccctttcaatgggcttaaattttctctgaggggaagctagcttttgctttgccaatttgaa

SEQ ID NO: 498569 - DNA, 262 bp, Homo sapiens
cttgtaaccgcacgctagttacatccgttgttctatgtatacaccattccaaatttaaaaaggcacccggcccacaccccgaagtctcctcaccccggaaatattcttcctttcccacaggaccaacctcgctgtgcctaacaagaattccagaagtcacccatccgaaaggcactggcccatgacactctccacttccaatcttaaatcttttactctcataccttgtctcagatctctcctggtaccccttccccacgcc

SEQ ID NO: 498570 - DNA, 144 bp, Homo sapiens
gggccagatttctatggaccagcaataaaaatgagagttccaggctgaaaaacttagtacacacaagatctggttattgtatgtggaactgactggaaacaaagtagaagcctactaagatttgaagaataacattggcaaaga

SEQ ID NO: 498571 - DNA, 103 bp, Homo sapiens
tctatcagtgactcttccttttcgtgtccgagtgtacaaaacgtttccgcctcacagagaagcctgaaagcccacgggctgcagcacattgggaagcggtcag

SEQ ID NO: 498572 - DNA, 448 bp, Homo sapiens
  misc_feature (4)..(4): n is a, c, g, or t
  misc_feature (6)..(6): n is a, c, g, or t
  misc_feature (49)..(50): n is a, c, g, or t
  misc_feature (399)..(399): n is a, c, g, or t
tcgncntctaactttattagcctgaactcctccctgccagccccagggnngtcaccatgggcacagtgagcaggactgaggttagacaggtttggcccctggctctggcagcttgggacagccaagccaagggaacaacaggtgcaaaagtccaaatgttggcacttcaggtgtggccggtacccagccaggccacaaggtggatcggcgcaccatggtcctcttctggcaaagggtccactatggcaacattccttcccggacagctgctaggaacagttggtgattttagccagaaactgctgtgcccaccactcatcgaggtcaataggtacaaagttctgtagccggggatcaggagtgctctccacatactgcagcagcgtgggccactctcantcgcagggccgccatccagttgtcgctctacctgctgccaggcttcgga

SEQ ID NO: 498573 - DNA, 644 bp, Homo sapiens
actatgatgtttatggattatttaaaattcttaaaactgacttaactctttaaaaattatcttcttggctgggattataggcacgagccacctcgcccggcctgacaaatagttttttaaatcagtaaaactgtgtttatgattttgataaatatgccttctattaaataacaaggcagaattgctaagtttcctaactaaaatgacccctgataatcagtttttttcagccatagatcttcattcactggtcttttcaaaaataaatgatgatttttaaaaatcaggtttctgaactacgctagtttgcatggtcttttgttttccagaaactgccaaaatccttctattgtgcttattttcaaataattgtctctaaaattctagaaatattccctttaaacaacagaacacatttgaacagaatgaacaagtaagcaaactaaaaaaccaagaactaaaaacatggagtccatgaccagcctgggcaacacagtgaaacacgaaaccctgtctctacaaaaaaatacaaaaaactggctgggcaccgtggctcacgcctgaagtcccagcattttgggaggctgaggcgagtggatcacctgaggtcaggagttcgaggccagcctgaaaaacttggagaa

SEQ ID NO: 498574 - DNA, 353 bp, Homo sapiens
  misc_feature (32)..(32): n is a, c, g, or t
  misc_feature (65)..(65): n is a, c, g, or t
  misc_feature (74)..(74): n is a, c, g, or t
  misc_feature (339)..(339): n is a, c, g, or t
accaaggttaaatgaagttaggactgggattngggtatctggtattaagatgtatgttggttttngcccatggnttctgcttcagaactcccatagcccttgctacagtcctttgttataatgttgggtgtattaagcctcaggaaacagaatctctctcctttcctttcatctaccccaaagcaggactctaatcttcccttgcctttctaattgtgggtcttaagaccctccccagagaggatcccatcctatacactggaggaaagaatgctgacatcatgaagcttccataaaaaccaagaggactggatttggagagcttcatgagacgtgaanacacggaagttccc

SEQ ID NO: 498575 - DNA, 416 bp, Homo sapiens
  misc_feature (22)..(22): n is a, c, g, or t
  misc_feature (146)..(146): n is a, c, g, or t
  misc_feature (401)..(401): n is a, c, g, or t
gctgttgaaaatttgggggccnagaaagtccttggttgtgggggtccttgctgtgccacggtggggatgtgtagcaagcatcccttgccctctgcccattcattccctgccccatgacagtgacaacccaagactgtctcccaganatttcccacatgtattgtcccgtaggggttaaagctaccttctacttcccatgagaatgactgatccatagtacagtcccacctagggagttgtgccatgatttgcaaagttatttacccttactaaaggtactgctaagctaggtctctaatctaaaatatggaacaaaatttcacaagaggcagctgaaaaaagttttatattatcctgtttgcaatagggaatgcagttacctttaaaaaacctgaagtacntatcatagctgacag

SEQ ID NO: 498576 - DNA, 135 bp, Homo sapiens
ccatttggcggaagcgactcgtcgctgcgtcgaacgccagaattctcaacactttgcgatatgccgatcggtatcggaattggcggatggctgcaaatctgtcggcctcaaggaccgcaagcagatgcgcgtgcg

SEQ ID NO: 498577 - DNA, 200 bp, Homo sapiens
gatctgcatgctgatcttgtagaggacataaaagccagtcagattcagtgaggattcaaaagctggtacaacaaaattcttttacaaaatattaatttattattgaaaacctggaaagattatccaagggaaggtaaacgaaagagaaaaggaggccagggttcttcgtgtgcctctcacagcgggtatccgagctcgaa

SEQ ID NO: 498578 - DNA, 344 bp, Homo sapiens
gggcgtggtggctcacacctgtaatcccaacattttggagaccatcctgggcaacttggtgaagccccgtctctactaaaaaaaaacacacacaaaaagcatctgtactagaaataatgccttctgtggattgaagtgaacaataatttattctatatttcaaaatagctagaagagaagatatgaaatggtcccaacacacaaaaaaagataaatgtttgagttgatgggtatcctaattaccctgacttgattgttagaaattgtatacatgtatacatatgtacaaacctgcactttgtgcacatgtaccctaaaacttacagtataataaaaaaaaaaga

SEQ ID NO: 498579 - DNA, 1125 bp, Homo sapiens
ggaacgccggagagtcggtctctccccttctactgcctccaacacggcggctggctgtgctggctggcacatccatgggaccctgggcctggttttaaaccatccctgtccagctgccgtcactgcaccccaccgtgagcccagagagctcctgtgagtgcctgctgtgcgtgagtgcatgcctgttctggaggattattacgtcttctccccgattcctgctgcctgccgcatgccaggcctctgcgctgctgaggacgacagcaggcccagtcgcctcgcacaccatccagtcagcctgcctgcatgcagcccattaccacggctagcggtcccagatgccaacgcggccggcagcagcgcaggtggcatcacgctaccgccaagtccacgagcccatttcccatcctgcacgaagcaagcccctgccaccatgcagcttctgccatctactctcctcgcttcttcttcagcgcacagcgctcccacgacatgcacagccatcatcaacagcgatccgtctacccgaacacacacacgcgcacgactacctcacgaaggacctgcgcactccgacctctcacaacctcgcacctactacttcccgccacacaccactcatctgcctacttggcgcactccccctgacccacacgcacctcgcacacggccgtactcccacccacaccacacccactagaactcactctccatccaccgcctcccccacccacaccacccccatacccaccccaccctccacatcacacaccactccacacacccccccacaccaccccccctcacccccccccacactcccaccaccacccaccccccccccacccttcctctctccacccactactcccgcaccctccccccatcaccatatcccaccacccacccacctccccacacttcccgccccccatacccacctcacccccccctcccctcccctccacacacaccactcacccaccaccaccctccccacaccctccaccactacccactcgcaacccactcacaccttcctacaccaccctcccctccctacccaccctacatatcccaccaaccctccctcccccacccctcatctcacacaaccccaacctc

SEQ ID NO: 498580 - DNA, 1012 bp, Homo sapiens
cacttttaagacaatgaagcattatcaaaacaagaatgtataattgtcttaatatgaataataagattaagcgtttaaatgctatttgtagtcttgatcatacagcaagatcaacatataattcagggttggtcttttgttattttaggttgttttcatgttgcaatgttctatatcgttcattagttaatttgtgatattttattagtattttggaaatagcatatctgagacgtgaagcagaacattgcacaattcacttagtttgtggtttttttcgtcagctattctgagcttatttatttatttgtatgttctaatggctaaacattagccttaacaggatttttgttcccaagaaagaaaaaaacaaaaagagaaaacaaaaacaaaggaaaaacaaagacaaaagaacaagagagagaagaaagaaaaaaaagaagggcgaggggggggcgataaaaaacacataactactcaagaagcacaacacagaaaaaagcagacaataaacaaaggacatacaaatggaagcaaacaacaaagagcgaagaacaccaacatataaacaaacgaaacaacaaagaaaacacgaaaacaaagaaaccaccagcacacagcaaatcgaacaaacaaaacagcagaaacaaacaagagcgacacaaaaacaaagcagagaaaaacagaagcagaagaacaaatgacaaaaggaagaaaacgcacaaaataaatagaaaatgtaaacacacaacacagaaaaaacgaaagagaacaaaggaacacaaaaaccacgcaaaaaacaaaacagaccaaaaaaaaaaaagaaagggagcacaggagaaagcacctagactcgcgaccgcaccagagacgacaacgaagcaaagagagagcgaagaaaacgacacaggaaaacgcaaaaaaatgcgaaaggaggagaggacgataaggaaaaggactaacagcaataaaacaaacagaagaaaagaccaagcagagatcaccgaacata

SEQ ID NO: 498581 - DNA, 105 bp, Homo sapiens
  misc_feature (1)..(1): n is a, c, g, or t
nctaatgagcttacctaaataaggagataataatgaatatgaagagctagccgccacagagagaaggctccagcactgctcaatgtcagagcgcagctcactcgt

SEQ ID NO: 498582 - DNA, 482 bp, Homo sapiens
  misc_feature (137)..(138): n is a, c, g, or t
  misc_feature (140)..(140): n is a, c, g, or t
  misc_feature (166)..(166): n is a, c, g, or t
  misc_feature (228)..(228): n is a, c, g, or t
  misc_feature (238)..(238): n is a, c, g, or t
  misc_feature (300)..(301): n is a, c, g, or t
  misc_feature (323)..(323): n is a, c, g, or t
  misc_feature (359)..(359): n is a, c, g, or t
  misc_feature (471)..(471): n is a, c, g, or t
tccttcccccacccccggggcccatcccggtggcggctccggagctcgggactgctaatttcagcgaaacgattaaaagacgcccctacagctgacggcactttctctcctccggcaggaaggacgtccagcgtacnncngcccgcgcttccccgccggcgcaganaggcctcacagaatcgcacgccgctggacgcacgccgccccgcccccacggcccagcgccancgcgccccgnttctgcacgcaatcccggcctcacttgcccctcgactcctgttccgttggaggggcctgagnnaagccttgaagccgcgttgttnggccggaaggaaagccggagaagaccgggtcgactngggcaagagcggcagaatggttcgaaggaagcctgctcttgcacgcccagggagtagaagttggggcagggagcaagggtcacgtgaaggaagcgcgccgaacttgaacttngggtccgactt

SEQ ID NO: 498583 - DNA, 132 bp, Homo sapiens
ctggacatatgaaagtgccttcctacccccaggtgagtacctggtgtgttgtgactgccggggctcatgtgctagctattcccctccagaccaggtctggtcaaggaccctggggtgggaggcaaggatcgg

SEQ ID NO: 498584 - DNA, 753 bp, Homo sapiens
gcatgagggttgagtggggctaaggactgccgcatagtgtaccgagtctgagggggggagcccctcttttttagtgggggcgtacagtgacgccccaagggttgcccacgcggcgctgaaaataatggttcgaatagaaattgcctcccgcggttgatgaaaattaagctaacgacgaggaatgattgcctgccatgaacgcttaagggcctcataggtgttgccgtttcgtggcatggacagtccttggtgtgcacctctgaataatccctccggtcatacaatacatggtgtcaagatgagtattgttcactaccacactctcgtttgggcgattctactttaacgtgtctgacgccatctcacgacgcttcggtcattacgcgctgagcgctaacctccctcctcactgtttcagtacccctcggggggaggacactctgtctactctatggtacgtgtgctaccccctctcttcccgcctggagtctacaacagcacgggcttacgactacgtactggctactacggacactatttttgcgcccccgaagagatctcgttatttaaatggttttcccgccgacgtcacccgggggtgcaccacgcgcctcccacccaggtccgcatactaggcaatcgtccggtgaagcaccagtgagaacctccccgatattcttaacaactccttcgccctcgatttgcctcatgctcctaccccaaatttacgagggtttcccgcaaacatggacg

SEQ ID NO: 498585 - DNA, 100 bp, Homo sapiens
ctctactcaataaatcacagtcacactacataaagagccacaggatgacatcagtcccataagtcttaagtcctggtgtagtgtaggatgacaagcagaa

SEQ ID NO: 498586 - DNA, 161 bp, Homo sapiens
actctgaggatcccttctgatgtcctgctaggggtctggggttcttactgggatgatgaaagtattctagaaatagataatggtgatgcttgcccaaccttgtgaatctactgaaaaccactgaagtgtacacttcagagagggtgaattttagtggcata

SEQ ID NO: 498587 - DNA, 413 bp, Homo sapiens
gcctgtaatcccagcactttgggaggccaaggtgggtggatcacttgaggtcaggagttcgagaccagcctggccaacatgatgaaaccccatctctactaaaaatacaaaaaattagccgggcgtggtagcgggcgcctgtagtcccagctactcgggaggctgaggcaggagaatggcgtgaacccgggaggcggagcttgcagtgagccgagatcgcgccactgcactccagcctgggcgacagagcgagactccgtctcataggaacattaaaaatttactgaaagaaatctcttggggtggcccggtacccaattagcactattttgaccctgattacgcgcgctctctgtccgtcgttttacaacgcctcgactgggaaaactcatgtgatacccaacttaatcgcg

SEQ ID NO: 498588 - DNA, 3164 bp, Homo sapiens
  misc_feature (3038)..(3038): n is a, c, g, or t
  misc_feature (3041)..(3042): n is a, c, g, or t
  misc_feature (3044)..(3044): n is a, c, g, or t
  misc_feature (3047)..(3047): n is a, c, g, or t
  misc_feature (3050)..(3050): n is a, c, g, or t
  misc_feature (3052)..(3053): n is a, c, g, or t
  misc_feature (3061)..(3061): n is a, c, g, or t
  misc_feature (3073)..(3073): n is a, c, g, or t
  misc_feature (3078)..(3078): n is a, c, g, or t
gcggccgcctcaccagaccgcgtgcggacgggctcgcgggcggggcggggcaagctcaggccacgcccctgggcggtgcgcgcgggcggtgggtaggccgggcaggctcacgtgatgcgggccccgcggcccgccatataaacccgcgcgcccgccaggcgctgcggccgtcccgggccgtgactcctcctttcccccgccccgcctccgttcggagagccggcgggcgggcgcctctcggccaggaagcgcctcttggacgcgtgtgaccgatgcccagattgcacgaccacttctggagctgctcctgtgcgcacagcgcgaggcgccgaggccccccgcgagccagcgccgcggggctggcggccaaggttggggagatgatcaacgtttccgtgtccgggccctccctgctggcggcccacggtgccccggacgctgaccccgcgcccaggggccgcagtgctgcgatgagcggccccgagcccggcagcccctaccccaacacctggcatcatcgcctgttgcagaggagcctcgtgctcttctcggttggggtggtcctagccctggtgctcaacctgctgcagatccagaggaatgtcactctcttccccgaggaggtgatcgccaccatcttttcctccgcctggtgggtccctccctgctgcgggacagcagctgctgttgttggcctactgtacccctgtatcgacagtcacctcggagaaccccacaaatttaagagagaatgggccagtgtcatgcgctgcatagcagtttttgttggcattaaccacgccagtgctaaattggattttgccaataatgtccagctgtccttgactttagcagccctatctttgggcctttggtggacatttgatcgttccagaagtggccttgggctggggatcaccatagcttttctagctacgctgatcacgcagtttctcgtgtataatggtgtctatcagtatacatccccagatttcctctatattcgttcttggctcccttgtatatttttctcaggaggcgtcacggtggggaacataggacgacagttagctatgggtgttcctgaaaagccccatagtgattgagtcttcaaaaccaccgattctgagagcaaggaagattttggaagaaaatctgactgtggattatgacaaagattatcttttttcttaagtaatctatttagatcgggctgactgtacaaatgactcctggaaaaaactcttcacctagtctagaatagggaggtggagaatgatgacttaccctgaagtcttcccttgactgcccgcactggcgcctgtctgtgccctggagcattctgcccaggctacgtgggttcaggcaggtggcagcttcccaagtattcgatttcattcatgtgattaaaacaagttgccatatttcaaagccttgaactaagactcaattaccaacccgcagttttgtgtcagtgcccaaaggaggtaggttgatggtgcttaacaaacatgaagtatggtgtaataggaataatatttatccaaaagatttttaaaaatagggctgtgtttaaaaaaaaaaacaaaacaagaaaagcagcagtgattatagagaggtcacactctaagtggggtcgcggcgtggccacgcttcacggtcacgctcgtccgtcctgcagtggcgtgtttacatggtcacacgtgtgtgtatcaccagtgggtcaactgcttgtcattcctcccgtggcagtttgtgtagacaatcttactgagcaaaaggcaatgaaaagtcttggttcccacactgcgatatattggaattttcacctcagtttatgaagtttatttcgaaatccatagtcatctaagaatgaatacctgtctgccatgtatttcaatcttagtgagccaaaattgtttgtttgttactacagaatagagatgactgttttttgccacagccctatggaatttgcaatctgtgattgccttgtaaaaaggagagtgcatatggcactgcattaaacgtgtggtgtttctagtcaatgatattggtgagcacaatgtattcatttaatggcatagaccataccagacctaatttgcaagtattgggtcttaaacttcaagtgcaatgtatatgatgttcgagagaaggttctccattcatttcagtgctgcctggaggaaactcggcaatgatttctttcagttgtgaagttcctttcgtgttacaccctccactgaaccctcaaccttcgaaatactccagttttgtgggtttggtcatttttacttataaatttacctttttgtattttgcaatttacatgtgtttggtttgttttaaattctgtgaaagtggcttgattaaaagactccttttaaatggaagccaccagtcagcagaatggaagcttagaggaacttgcctgtgagcgctggtctttgtgtttggttttgtgatgtaacgatctttgctggggttttttgctttgttttgagggaaatgtcttggagtaaattttaagttcctggagttaatttgttttacaggaattttgttttttaaaaaaataggatcattctgaactttggaatgacccccttatatattttctgaaaatgaaaacagttacatgaaaaaaatttccaatgaagatgtcagcattttatgaaaaaccagaagttattagatgaaagcagcgagtgaatctttaaaacagacttgatcacgcacacacaataagtctttctctccgaaaccggaagtaaatctatatctgttagaaataatgtagccaaaagaatgtaaatttgaggatttttttgccaatagtttatagaaaatatatgaaccaaagtgatttgagtttgtaaaaatgtaaaatagtatgaacaaaatttgcactctaccagatttgaacatctagtgaggttcacattcatactaagttttcaacattgtgttctttttgcattcattttttacttttattaaaggttcaaaaccaaaaaaaaaaaaaaaaaaaaaanatnntntgnggngnntcgggccngaaaaagttttnaaccnttcgttggggcggggccccagtggttgtgcacccgggccaaggtgttcccaaggaaaaccccggccgaaaatggggtggggttccc

SEQ ID NO: 498589 - DNA, 3164 bp, Homo sapiens
  misc_feature (3038)..(3038): n is a, c, g, or t
  misc_feature (3041)..(3042): n is a, c, g, or t
  misc_feature (3044)..(3044): n is a, c, g, or t
  misc_feature (3047)..(3047): n is a, c, g, or t
  misc_feature (3050)..(3050): n is a, c, g, or t
  misc_feature (3052)..(3053): n is a, c, g, or t
  misc_feature (3061)..(3061): n is a, c, g, or t
  misc_feature (3073)..(3073): n is a, c, g, or t
  misc_feature (3078)..(3078): n is a, c, g, or t
gcggccgcctcaccagaccgcgtgcggacgggctcgcgggcggggcggggcaagctcaggccacgcccctgggcggtgcgcgcgggcggtgggtaggccgggcaggctcacgtgatgcgggccccgcggcccgccatataaacccgcgcgcccgccaggcgctgcggccgtcccgggccgtgactcctcctttcccccgccccgcctccgttcggagagccggcgggcgggcgcctctcggccaggaagcgcctcttggacgcgtgtgaccgatgcccagattgcacgaccacttctggagctgctcctgtgcgcacagcgcgaggcgccgaggccccccgcgagccagcgccgcggggctggcggccaaggttggggagatgatcaacgtttccgtgtccgggccctccctgctggcggcccacggtgccccggacgctgaccccgcgcccaggggccgcagtgctgcgatgagcggccccgagcccggcagcccctaccccaacacctggcatcatcgcctgttgcagaggagcctcgtgctcttctcggttggggtggtcctagccctggtgctcaacctgctgcagatccagaggaatgtcactctcttccccgaggaggtgatcgccaccatcttttcctccgcctggtgggtccctccctgctgcgggacagcagctgctgttgttggcctactgtacccctgtatcgacagtcacctcggagaaccccacaaatttaagagagaatgggccagtgtcatgcgctgcatagcagtttttgttggcattaaccacgccagtgctaaattggattttgccaataatgtccagctgtccttgactttagcagccctatctttgggcctttggtggacatttgatcgttccagaagtggccttgggctggggatcaccatagcttttctagctacgctgatcacgcagtttctcgtgtataatggtgtctatcagtatacatccccagatttcctctatattcgttcttggctcccttgtatatttttctcaggaggcgtcacggtggggaacataggacgacagttagctatgggtgttcctgaaaagccccatagtgattgagtcttcaaaaccaccgattctgagagcaaggaagattttggaagaaaatctgactgtggattatgacaaagattatcttttttcttaagtaatctatttagatcgggctgactgtacaaatgactcctggaaaaaactcttcacctagtctagaatagggaggtggagaatgatgacttaccctgaagtcttcccttgactgcccgcactggcgcctgtctgtgccctggagcattctgcccaggctacgtgggttcaggcaggtggcagcttcccaagtattcgatttcattcatgtgattagttttgtgtcagtgcccaaaggaggtaggttgatggtgcttaacaaacatgaagtatggtgtaataggaataatatttatccaaaagatttttaaaaatagggctgtgtttaaaaaaaaaaacaaaacaagaaaagcagcagtgattatagagaggtcacactctaagtggggtcgcggcgtggccacgcttcacggtcacgctcgtccgtcctgcagtggcgtgtttacatggtcacacgtgtgtgtatcaccagtgggtcaactgcttgtcattcctcccgtggcagtttgtgtagacaatcttactgagcaaaaggcaatgaaaagtcttggttcccacactgcgatatattggaattttcacctcagtttatgaagtttatttcgaaatccatagtcatctaagaatgaatacctgtctgccatgtatttcaatcttagtgagccaaaattgtttgtttgttactacagaatagagatgactgttttttgccacagccctatggaatttgcaatctgtgattgccttgtaaaaaggagagtgcatatggcactgcattaaacgtgtggtgtttctagtcaatgatattggtgagcacaatgtattcatttaatggcatagaccataccagacctaatttgcaagtattgggtcttaaacttcaagtgcaatgtatatgaaaaccaatctgagccttgtatctcttaaatatttattttttttaacgtgtgagatgttcgagagaaggttctccattcatttcagtgctgcctggaggaaactcggcaatgatttctttcagttgtgaagttcctttcgtgttacaccctccactgaaccctcaaccttcgaaatactccagttttgtgggtttggtcatttttacttataaatttacctttttgtattttgcaatttacatgtgtttggtttgttttaaattctgtgaaagtggcttgattaaaagactccttttaaatggaagccaccagtcagcagaatggaagcttagaggaacttgcctgtgagcgctggtctttgtgtttggttttgtgatgtaacgatctttgctggggttttttgctttgttttgagggaaatgtcttggagtaaattttaagttcctggagttaatttgttttacaggaattttgttttttaaaaaaataggatcattctgaactttggaatgacccccttatatattttctgaaaatgaaaacagttacatgaaaaaaatttccaatgaagatgtcagcattttatgaaaaaccagaagttattagatgaaagcagcgagtgaatctttaaaacagacttgatcacgcacacacaataagtctttctctccgaaaccggaagtaaatctatatctgttagaaataatgtagccaaaagaatgtaaatttgaggatttttttgccaatagtttatagaaaatatatgaaccaaagtgatttgagtttgtaaaaatgtaaaatagtatgaacaaaatttgcactctaccagatttgaacatctagtgaggttcacattcatactaagttttcaacattgtgttctttttgcattcattttttacttttattaaaggttcaaaaccaaaaaaaaaaaaaaaaaaaaaanatnntntgnggngnntcgggccngaaaaagttttnaaccnttcgttggggcggggccccagtggttgtgcacccgggccaaggtgttcccaaggaaaaccccggccgaaaatggggtggggttccc

SEQ ID NO: 498590 - DNA, 1370 bp, Homo sapiens
tggtcaaatgatcctttattgaatgtgttttctccttgtgtggtgcgttaacgtggcgtgggcattctccacagcaccactgtggtggagtgtcactcgaatgagtatcatgaggagtgggggccatcaagcatttacagcccatgtgacgtgggacaggtccccaggaatcttctttatcaagtggttctccagaagaagtttctgcgtggctagaggatatcgtgttgccgactatcttggtcgaagaccaagtggttgcacaaatcttcagtcaagagaggtgaattatctcccgaacgtgtgtgtttagagtggtttttccgtgtgtgtctccttctctcgtaggtctctcgtgtgagaggagatctctctgtgtgagaggggctgttgttgcgatgatactcccggggcgagagatggccaagaagaggggccacccacctctcaaactcgtgggggcccgtggctggtgactccgtgacaagtggctcggattcttcatcggtgggtaaattcgcgttcaagggcccctctttcacaggtatccacccctgtgtgtgctcctttgtggagcaaaaagtgttcatctcaaacgccagatgcttatcttttgtggggggacagacgaagaacccccaagggggcgcccagaatctttgtggagggccaaaggggcacaaacagggggacccccgaagatttcaccactctcgcgcgggttggcacccctcacaggattattcaaccgaatctttggggatccctgcgtgagggcggctcccgcacaccttcgcgagccgcgccccattgtgatggcaacacgcgcggacttagagttgtccgcgtatatagaaacccgcggaaattccgggggaaccagaacccagaaagcagaacagttttgccccccgtgtgaggccttccctcccagaagccccagggactatacctttaatcaaccttcggggcccaaatctcccaagcgcgtttctccctttaaaatccccctacgagaactctcttctttaatgaccctgacatggttagactccgatatcgccggggaggttccagcaaaacaccaacgtcactgtacaaaggggaacaacgaaagacccttgggagcaaaaccaagcgagcgcacaacgcaagccaggagcccgggttccacccgagagacaaccaatcggaggcgctaccaccccatacaggagccgggacaaaaccccccaaggagacgcccaaaggcccaacaacggcataagcgagaacaaaaagagcgccaacacacaccactcaaccgagccaacagccccacgagcacaccaacacaaccacaccacgtccatgagcgagaagaaccacat

SEQ ID NO: 498591 - DNA, 3548 bp, Homo sapiens
  misc_feature (3422)..(3422): n is a, c, g, or t
  misc_feature (3425)..(3426): n is a, c, g, or t
  misc_feature (3428)..(3428): n is a, c, g, or t
  misc_feature (3431)..(3431): n is a, c, g, or t
  misc_feature (3434)..(3434): n is a, c, g, or t
  misc_feature (3436)..(3437): n is a, c, g, or t
  misc_feature (3445)..(3445): n is a, c, g, or t
  misc_feature (3457)..(3457): n is a, c, g, or t
  misc_feature (3462)..(3462): n is a, c, g, or t
gcggccgcctcaccagaccgcgtgcggacgggctcgcgggcggggcggggcaagctcaggccacgcccctgggcggtgcgcgcgggcggtgggtaggccgggcaggctcacgtgatgcgggccccgcggcccgccatataaacccgcgcgcccgccaggcgctgcggccgtcccgggccgtgactcctcctttcccccgccccgcctccgttcggagagccggcgggcgggcgcctctcggccaggaagcgcctcttggacgcgtgtgaccgatgcccagattgcacgaccacttctggagctgctcctgtgcgcacagcgcgaggcgccgaggccccccgcgagccagcgccgcggggctggcggccaaggttggggagatgatcaacgtttccgtgtccgggccctccctgctggcggcccacggtgccccggacgctgaccccgcgcccaggggccgcagtgctgcgatgagcggccccgagcccggcagcccctaccccaacacctggcatcatcgcctgttgcagaggagcctcgtgctcttctcggttggggtggtcctagccctggtgctcaacctgctgcagatccagaggaatgtcactctcttccccgaggaggtgatcgccaccatcttttcctccgcctggtgggtccctccctgctgcgggacagcagctgctgttgttggcctactgtacccctgtatcgacagtcacctcggagaaccccacaaatttaagagagaatgggccagtgtcatgcgctgcatagcagtttttgttggcattaaccacgccagtgctaaattggattttgccaataatgtccagctgtccttgactttagcagccctatctttgggcctttggtggacatttgatcgttccagaagtggccttgggctggggatcaccatagcttttctagctacgctgatcacgcagtttctcgtgtataatggtgtctatcagtaagtgtgtgttttcaaatattggctttggcaagcttacttaactttcattaaaacatccactaagcttagatatttgcatattttatttgttattatatagaatgatacagatttaggcatgaaattctcaaaaatgctgatatccataacttaatgtaacgcaaaggaaaagcaagtagtagcagttacaaccaaacaaatatgaacattcgtaacattggatggttgatatgcgttctgcaatatccccactacagagaatctgtgatgtagaattgagccaggtgacattgactgctaaggtcacagtttcttttctcgctccaggtatacatccccagatttcctctatattcgttcttggctcccttgtatatttttctcaggaggcgtcacggtggggaacataggacgacagttagctatgggtgttcctgaaaagccccatagtgattgagtcttcaaaaccaccgattctgagagcaaggaagattttggaagaaaatctgactgtggattatgacaaagattatcttttttcttaagtaatctatttagatcgggctgactgtacaaatgactcctggaaaaaactcttcacctagtctagaatagggaggtggagaatgatgacttaccctgaagtcttcccttgactgcccgcactggcgcctgtctgtgccctggagcattctgcccaggctacgtgggttcaggcaggtggcagcttcccaagtattcgatttcattcatgtgattaaaacaagttgccatatttcaaagccttgaactaagactcaattaccaacccgcagttttgtgtcagtgcccaaaggaggtaggttgatggtgcttaacaaacatgaagtatggtgtaataggaataatatttatccaaaagatttttaaaaatagggctgtgtttaaaaaaaaaaacaaaacaagaaaagcagcagtgattatagagaggtcacactctaagtggggtcgcggcgtggccacgcttcacggtcacgctcgtccgtcctgcagtggcgtgtttacatggtcacacgtgtgtgtatcaccagtgggtcaactgcttgtcattcctcccgtggcagtttgtgtagacaatcttactgagcaaaaggcaatgaaaagtcttggttcccacactgcgatatattggaattttcacctcagtttatgaagtttatttcgaaatccatagtcatctaagaatgaatacctgtctgccatgtatttcaatcttagtgagccaaaattgtttgtttgttactacagaatagagatgactgttttttgccacagccctatggaatttgcaatctgtgattgccttgtaaaaaggagagtgcatatggcactgcattaaacgtgtggtgtttctagtcaatgatattggtgagcacaatgtattcatttaatggcatagaccataccagacctaatttgcaagtattgggtcttaaacttcaagtgcaatgtatatgaaaaccaatctgagccttgtatctcttaaatatttattttttttaacgtgtgagatgttcgagagaaggttctccattcatttcagtgctgcctggaggaaactcggcaatgatttctttcagttgtgaagttcctttcgtgttacaccctccactgaaccctcaaccttcgaaatactccagttttgtgggtttggtcatttttacttataaatttacctttttgtattttgcaatttacatgtgtttggtttgttttaaattctgtgaaagtggcttgattaaaagactccttttaaatggaagccaccagtcagcagaatggaagcttagaggaacttgcctgtgagcgctggtctttgtgtttggttttgtgatgtaacgatctttgctggggttttttgctttgttttgagggaaatgtcttggagtaaattttaagttcctggagttaatttgttttacaggaattttgttttttaaaaaaataggatcattctgaactttggaatgacccccttatatattttctgaaaatgaaaacagttacatgaaaaaaatttccaatgaagatgtcagcattttatgaaaaaccagaagttattagatgaaagcagcgagtgaatctttaaaacagacttgatcacgcacacacaataagtctttctctccgaaaccggaagtaaatctatatctgttagaaataatgtagccaaaagaatgtaaatttgaggatttttttgccaatagtttatagaaaatatatgaaccaaagtgatttgagtttgtaaaaatgtaaaatagtatgaacaaaatttgcactctaccagatttgaacatctagtgaggttcacattcatactaagttttcaacattgtgttctttttgcattcattttttacttttattaaaggttcaaaaccaaaaaaaaaaaaaaaaaaaaaanatnntntgnggngnntcgggccngaaaaagttttnaaccnttcgttggggcggggccccagtggttgtgcacccgggccaaggtgttcccaaggaaaaccccggccgaaaatggggtggggttccc

SEQ ID NO: 498592 - DNA, 227 bp, Homo sapiens
  misc_feature (128)..(128): n is a, c, g, or t
ttcaccaggaccagatcgatgacatcatcatcatgtttttttcaacaaggggttgtggaacagagtgatgatgatagtcatcggtcaggctcctgctgaagactcccctcctcccatagctccaaaanctgtgacaattccagctagtcaggtatgcacacaaaatctgaagactttgtaaaccttttggtggcccacgtagcatactcgagtctggtcctgagtga

SEQ ID NO: 498593 - DNA, 105 bp, Homo sapiens
gtgatctagaggatcccgactgatctgtgctctgttcaaagggagacaggcaggttacgagatgtcaaacagtaaacgagatttctccctgagataactagaaag

SEQ ID NO: 498594 - DNA, 3517 bp, Homo sapiens
  misc_feature (3391)..(3391): n is a, c, g, or t
  misc_feature (3394)..(3395): n is a, c, g, or t
  misc_feature (3397)..(3397): n is a, c, g, or t
  misc_feature (3400)..(3400): n is a, c, g, or t
  misc_feature (3403)..(3403): n is a, c, g, or t
  misc_feature (3405)..(3406): n is a, c, g, or t
  misc_feature (3414)..(3414): n is a, c, g, or t
  misc_feature (3426)..(3426): n is a, c, g, or t
  misc_feature (3431)..(3431): n is a, c, g, or t
gcggccgcctcaccagaccgcgtgcggacgggctcgcgggcggggcggggcaagctcaggccacgcccctgggcggtgcgcgcgggcggtgggtaggccgggcaggctcacgtgatgcgggccccgcggcccgccatataaacccgcgcgcccgccaggcgctgcggccgtcccgggccgtgactcctcctttcccccgccccgcctccgttcggagagccggcgggcgggcgcctctcggccaggtacgcggccggctgggataggggtcgcgggcgggctttggtcgcgcagcagccggtcctccccggaggtaggcgggcgcgggccctgttgggtctttgggacgcgggtcccgctggggccggggatgctgctcgctgtgagcgcgggtcccgtccgccgctggccccgggcgggcgcacgggggtctaaccttggggggcggcgctgccgcctggcccgggtgccggggttcgcgtcccgcggggccttcctcgctctttgtctcttctgagtgaacttgatgacccccttcttccaggaagcgcctcttggacgcgtgtgaccgatgcccagattgcacgaccacttctggagctgctcctgtgcgcacagcgcgaggcgccgaggccccccgcgagccagcgccgcggggctggcggccaaggttggggagatgatcaacgtttccgtgtccgggccctccctgctggcggcccacggtgccccggacgctgaccccgcgcccaggggccgcagtgctgcgatgagcggccccgagcccggcagcccctaccccaacacctggcatcatcgcctgttgcagaggagcctcgtgctcttctcggttggggtggtcctagccctggtgctcaacctgctgcagatccagaggaatgtcactctcttccccgaggaggtgatcgccaccatcttttcctccgcctggtgggtccctccctgctgcgggacagcagctgctgttgttggcctactgtacccctgtatcgacagtcacctcggagaaccccacaaatttaagagagaatgggccagtgtcatgcgctgcatagcagtttttgttggcattaaccacgccagtgctaaattggattttgccaataatgtccagctgtccttgactttagcagccctatctttgggcctttggtggacatttgatcgttccagaagtggccttgggctggggatcaccatagcttttctagctacgctgatcacgcagtttctcgtgtataatggtgtctatcagtatacatccccagatttcctctatattcgttcttggctcccttgtatatttttctcaggaggcgtcacggtggggaacataggacgacagttagctatgggtgttcctgaaaagccccatagtgattgagtcttcaaaaccaccgattctgagagcaaggaagattttggaagaaaatctgactgtggattatgacaaagattatcttttttcttaagtaatctatttagatcgggctgactgtacaaatgactcctggaaaaaactcttcacctagtctagaatagggaggtggagaatgatgacttaccctgaagtcttcccttgactgcccgcactggcgcctgtctgtgccctggagcattctgcccaggctacgtgggttcaggcaggtggcagcttcccaagtattcgatttcattcatgtgattaaaacaagttgccatatttcaaagccttgaactaagactcaattaccaacccgcagttttgtgtcagtgcccaaaggaggtaggttgatggtgcttaacaaacatgaagtatggtgtaataggaataatatttatccaaaagatttttaaaaatagggctgtgtttaaaaaaaaaaacaaaacaagaaaagcagcagtgattatagagaggtcacactctaagtggggtcgcggcgtggccacgcttcacggtcacgctcgtccgtcctgcagtggcgtgtttacatggtcacacgtgtgtgtatcaccagtgggtcaactgcttgtcattcctcccgtggcagtttgtgtagacaatcttactgagcaaaaggcaatgaaaagtcttggttcccacactgcgatatattggaattttcacctcagtttatgaagtttatttcgaaatccatagtcatctaagaatgaatacctgtctgccatgtatttcaatcttagtgagccaaaattgtttgtttgttactacagaatagagatgactgttttttgccacagccctatggaatttgcaatctgtgattgccttgtaaaaaggagagtgcatatggcactgcattaaacgtgtggtgtttctagtcaatgatattggtgagcacaatgtattcatttaatggcatagaccataccagacctaatttgcaagtattgggtcttaaacttcaagtgcaatgtatatgaaaaccaatctgagccttgtatctcttaaatatttattttttttaacgtgtgagatgttcgagagaaggttctccattcatttcagtgctgcctggaggaaactcggcaatgatttctttcagttgtgaagttcctttcgtgttacaccctccactgaaccctcaaccttcgaaatactccagttttgtgggtttggtcatttttacttataaatttacctttttgtattttgcaatttacatgtgtttggtttgttttaaattctgtgaaagtggcttgattaaaagactccttttaaatggaagccaccagtcagcagaatggaagcttagaggaacttgcctgtgagcgctggtctttgtgtttggttttgtgatgtaacgatctttgctggggttttttgctttgttttgagggaaatgtcttggagtaaattttaagttcctggagttaatttgttttacaggaattttgttttttaaaaaaataggatcattctgaactttggaatgacccccttatatattttctgaaaatgaaaacagttacatgaaaaaaatttccaatgaagatgtcagcattttatgaaaaaccagaagttattagatgaaagcagcgagtgaatctttaaaacagacttgatcacgcacacacaataagtctttctctccgaaaccggaagtaaatctatatctgttagaaataatgtagccaaaagaatgtaaatttgaggatttttttgccaatagtttatagaaaatatatgaaccaaagtgatttgagtttgtaaaaatgtaaaatagtatgaacaaaatttgcactctaccagatttgaacatctagtgaggttcacattcatactaagttttcaacattgtgttctttttgcattcattttttacttttattaaaggttcaaaaccaaaaaaaaaaaaaaaaaaaaaanatnntntgnggngnntcgggccngaaaaagttttnaaccnttcgttggggcggggccccagtggttgtgcacccgggccaaggtgttcccaaggaaaaccccggccgaaaatggggtggggttccc

SEQ ID NO: 498595 - DNA, 126 bp, Homo sapiens
ccagaatacagtgaaaaagaaagaacaaagaaatggaacagactgaagaatagaaagagagactcaagaattcctatttctaaaaatgttcataatattgaatgtacattacaccgtcatatctct

SEQ ID NO: 498596 - DNA, 3287 bp, Homo sapiens
  misc_feature (3161)..(3161): n is a, c, g, or t
  misc_feature (3164)..(3165): n is a, c, g, or t
  misc_feature (3167)..(3167): n is a, c, g, or t
  misc_feature (3170)..(3170): n is a, c, g, or t
  misc_feature (3173)..(3173): n is a, c, g, or t
  misc_feature (3175)..(3176): n is a, c, g, or t
  misc_feature (3184)..(3184): n is a, c, g, or t
  misc_feature (3196)..(3196): n is a, c, g, or t
  misc_feature (3201)..(3201): n is a, c, g, or t
gcggccgcctcaccagaccgcgtgcggacgggctcgcgggcggggcggggcaagctcaggccacgcccctgggcggtgcgcgcgggcggtgggtaggccgggcaggctcacgtgatgcgggccccgcggcccgccatataaacccgcgcgcccgccaggcgctgcggccgtcccgggccgtgactcctcctttcccccgccccgcctccgttcggagagccggcgggcgggcgcctctcggccaggtacgcggccggctgggataggggtcgcgggcgggctttggtcgcgcagcagccggtcctccccggagggaagcgcctcttggacgcgtgtgaccgatgcccagattgcacgaccacttctggagctgctcctgtgcgcacagcgcgaggcgccgaggccccccgcgagccagcgccgcggggctggcggccaaggttggggagatgatcaacgtttccgtgtccgggccctccctgctggcggcccacggtgccccggacgctgaccccgcgcccaggggccgcagtgctgcgatgagcggccccgagcccggcagcccctaccccaacacctggcatcatcgcctgttgcagaggagcctcgtgctcttctcggttggggtggtcctagccctggtgctcaacctgctgcagatccagaggaatgtcactctcttccccgaggaggtgatcgccaccatcttttcctccgcctggtgggtccctccctgctgcgggacagcagctgctgttgttggcctactgtacccctgtatcgacagtcacctcggagaaccccacaaatttaagagagaatgggccagtgtcatgcgctgcatagcagtttttgttggcattaaccacgccagtgctaaattggattttgccaataatgtccagctgtccttgactttagcagccctatctttgggcctttggtggacatttgatcgttccagaagtggccttgggctggggatcaccatagcttttctagctacgctgatcacgcagtttctcgtgtataatggtgtctatcagtatacatccccagatttcctctatattcgttcttggctcccttgtatatttttctcaggaggcgtcacggtggggaacataggacgacagttagctatgggtgttcctgaaaagccccatagtgattgagtcttcaaaaccaccgattctgagagcaaggaagattttggaagaaaatctgactgtggattatgacaaagattatcttttttcttaagtaatctatttagatcgggctgactgtacaaatgactcctggaaaaaactcttcacctagtctagaatagggaggtggagaatgatgacttaccctgaagtcttcccttgactgcccgcactggcgcctgtctgtgccctggagcattctgcccaggctacgtgggttcaggcaggtggcagcttcccaagtattcgatttcattcatgtgattaaaacaagttgccatatttcaaagccttgaactaagactcaattaccaacccgcagttttgtgtcagtgcccaaaggaggtaggttgatggtgcttaacaaacatgaagtatggtgtaataggaataatatttatccaaaagatttttaaaaatagggctgtgtttaaaaaaaaaaacaaaacaagaaaagcagcagtgattatagagaggtcacactctaagtggggtcgcggcgtggccacgcttcacggtcacgctcgtccgtcctgcagtggcgtgtttacatggtcacacgtgtgtgtatcaccagtgggtcaactgcttgtcattcctcccgtggcagtttgtgtagacaatcttactgagcaaaaggcaatgaaaagtcttggttcccacactgcgatatattggaattttcacctcagtttatgaagtttatttcgaaatccatagtcatctaagaatgaatacctgtctgccatgtatttcaatcttagtgagccaaaattgtttgtttgttactacagaatagagatgactgttttttgccacagccctatggaatttgcaatctgtgattgccttgtaaaaaggagagtgcatatggcactgcattaaacgtgtggtgtttctagtcaatgatattggtgagcacaatgtattcatttaatggcatagaccataccagacctaatttgcaagtattgggtcttaaacttcaagtgcaatgtatatgaaaaccaatctgagccttgtatctcttaaatatttattttttttaacgtgtgagatgttcgagagaaggttctccattcatttcagtgctgcctggaggaaactcggcaatgatttctttcagttgtgaagttcctttcgtgttacaccctccactgaaccctcaaccttcgaaatactccagttttgtgggtttggtcatttttacttataaatttacctttttgtattttgcaatttacatgtgtttggtttgttttaaattctgtgaaagtggcttgattaaaagactccttttaaatggaagccaccagtcagcagaatggaagcttagaggaacttgcctgtgagcgctggtctttgtgtttggttttgtgatgtaacgatctttgctggggttttttgctttgttttgagggaaatgtcttggagtaaattttaagttcctggagttaatttgttttacaggaattttgttttttaaaaaaataggatcattctgaactttggaatgacccccttatatattttctgaaaatgaaaacagttacatgaaaaaaatttccaatgaagatgtcagcattttatgaaaaaccagaagttattagatgaaagcagcgagtgaatctttaaaacagacttgatcacgcacacacaataagtctttctctccgaaaccggaagtaaatctatatctgttagaaataatgtagccaaaagaatgtaaatttgaggatttttttgccaatagtttatagaaaatatatgaaccaaagtgatttgagtttgtaaaaatgtaaaatagtatgaacaaaatttgcactctaccagatttgaacatctagtgaggttcacattcatactaagttttcaacattgtgttctttttgcattcattttttacttttattaaaggttcaaaaccaaaaaaaaaaaaaaaaaaaaaanatnntntgnggngnntcgggccngaaaaagttttnaaccnttcgttggggcggggccccagtggttgtgcacccgggccaaggtgttcccaaggaaaaccccggccgaaaatggggtggggttccc

SEQ ID NO: 498597 - DNA, 164 bp, Homo sapiens
tgattaaggttgactaagttaatctcattgatggctcatcagagaatgagaatagccagccagtgctgttttacaaatgcactggagggaaaaacgaaatacatctactattccctaatatatatggcttggcacccatgagaaaagcctctagccccccgaaa

SEQ ID NO: 498598 - DNA, 430 bp, Homo sapiens
agtattcaagctttcatatagtagattctgtataccacgagcaggatggagtgaatggcccttggtatagcctagtaacagtgctaaaaatcccagagctaggtaacggttcatagagccttacataaggctattcttcagggactgacatgtgtcaggtgcgcttagcgtcagtacgcagcatgagagaatagcgcctagggattctgtaggatgtagagaatctcatgttgctttaccaggtgtagactctatacacttgtcgatcgaataagggaaagtgctcccattcgcagttaatgcagcatattgggtctcaaggcacttaggttatcatgtgagcatccctgagggaataatatgccacttaagaggaaatacaggccactccagtctcaatctcacaaggactgctactccttgggtcata

SEQ ID NO: 498599 - DNA, 3855 bp, Homo sapiens
  misc_feature (564)..(564): n is a, c, g, or t
  misc_feature (710)..(711): n is a, c, g, or t
  misc_feature (758)..(759): n is a, c, g, or t
  misc_feature (771)..(771): n is a, c, g, or t
  misc_feature (3729)..(3729): n is a, c, g, or t
  misc_feature (3732)..(3733): n is a, c, g, or t
  misc_feature (3735)..(3735): n is a, c, g, or t
  misc_feature (3738)..(3738): n is a, c, g, or t
  misc_feature (3741)..(3741): n is a, c, g, or t
  misc_feature (3743)..(3744): n is a, c, g, or t
  misc_feature (3752)..(3752): n is a, c, g, or t
  misc_feature (3764)..(3764): n is a, c, g, or t
  misc_feature (3769)..(3769): n is a, c, g, or t
aagacaacgatcccagaggaggaggcgagcatactgctacaaaatacccaagcagggcggggcctttgccaaaagagtctccgtggcccctagagcgggccccagggtagttgctaacggttcagcaagaaattgaccttttctgcagccacctacctaagtggcagaggaaccccaacctctggcagacggtccgcatcccccatgtatggcaggagtgtacaggcgcgtcgggtcaccggggggccatgcctcggagaacccgattgcagctctccctgcacatcggtccaatgtcagcttccagacctggagctccagacgcgggcctgggggtcatctgaatgtaaccttcactttagagtcaccatactctcataatctgcactgttttaataaaatcttagtaattctctgtaaggagacggcgagtgaccatggaaatatttcatctcgtgcagggtctcattgtttatctcatggcgaaaatatacttttttaatggttggatgtaaacatgaactcaaacacgttttatttattaagatacaacctgaaccacanaaacaaggagatcaaagatgaagtggcttagacagaagtttcagtctctctccccagactgtctggaggtgagtggatggcgcttcatgaggttgctggggacccctgtctgctgggtctcttgctctgttgtcctgttacgacanncggtgcatggcatggcacatggtcggcatggtagatgctgggttgcnnccacacccacantcccttggggggcggcgctgccgcctggcccgggtgccggggttcgcgtcccgcggggccttcctcgctctttgtctcttctgagtgaacttgatgacccccttcttccaggaagcgcctcttggacgcgtgtgaccgatgcccagattgcacgaccacttctggagctgctcctgtgcgcacagcgcgaggcgccgaggccccccgcgagccagcgccgcggggctggcggccaaggttggggagatgatcaacgtttccgtgtccgggccctccctgctggcggcccacggtgccccggacgctgaccccgcgcccaggggccgcagtgctgcgatgagcggccccgagcccggcagcccctaccccaacacctggcatcatcgcctgttgcagaggagcctcgtgctcttctcggttggggtggtcctagccctggtgctcaacctgctgcagatccagaggaatgtcactctcttccccgaggaggtgatcgccaccatcttttcctccgcctggtgggtccctccctgctgcgggacagcagctgctgttgttggcctactgtacccctgtatcgacagtcacctcggagaaccccacaaatttaagagagaatgggccagtgtcatgcgctgcatagcagtttttgttggcattaaccacgccagtgctaaattggattttgccaataatgtccagctgtccttgactttagcagccctatctttgggcctttggtggacatttgatcgttccagaagtggccttgggctggggatcaccatagcttttctagctacgctgatcacgcagtttctcgtgtataatggtgtctatcagtatacatccccagatttcctctatattcgttcttggctcccttgtatatttttctcaggaggcgtcacggtggggaacataggacgacagttagctatgggtgttcctgaaaagccccatagtgattgagtcttcaaaaccaccgattctgagagcaaggaagattttggaagaaaatctgactgtggattatgacaaagattatcttttttcttaagtaatctatttagatcgggctgactgtacaaatgactcctggaaaaaactcttcacctagtctagaatagggaggtggagaatgatgacttaccctgaagtcttcccttgactgcccgcactggcgcctgtctgtgccctggagcattctgcccaggctacgtgggttcaggcaggtggcagcttcccaagtattcgatttcattcatgtgattaaaacaagttgccatatttcaaagccttgaactaagactcaattaccaacccgcagttttgtgtcagtgcccaaaggaggtaggttgatggtgcttaacaaacatgaagtatggtgtaataggaataatatttatccaaaagatttttaaaaatagggctgtgtttaaaaaaaaaaacaaaacaagaaaagcagcagtgattatagagaggtcacactctaagtggggtcgcggcgtggccacgcttcacggtcacgctcgtccgtcctgcagtggcgtgtttacatggtcacacgtgtgtgtatcaccagtgggtcaactgcttgtcattcctcccgtggcagtttgtgtagacaatcttactgagcaaaaggcaatgaaaagtcttggttcccacactgcgatatattggaattttcacctcagtttatgaagtttatttcgaaatccatagtcatctaagaatgaatacctgtctgccatgtatttcaatcttagtgagccaaaattgtttgtttgttactacagaatagagatgactgttttttgccacagccctatggaatttgcaatctgtgattgccttgtaaaaaggagagtgcatatggcactgcattaaacgtgtggtgtttctagtcaatgatattggtgagcacaatgtattcatttaatggcatagaccataccagacctaatttgcaagtattgggtcttaaacttcaagtgcaatgtatatgaaaaccaatctgagccttgtatctcttaaatatttattttttttaacgtgtgagatgttcgagagaaggttctccattcatttcagtgctgcctggaggaaactcggcaatgatttctttcagttgtgaagttcctttcgtgttacaccctccactgaaccctcaaccttcgaaatactccagttttgtgggtttggtcatttttacttataaatttacctttttgtattttgcaatttacatgtgtttggtttgttttaaattctgtgaaagtggcttgattaaaagactccttttaaatggaagccaccagtcagcagaatggaagcttagaggaacttgcctgtgagcgctggtctttgtgtttggttttgtgatgtaacgatctttgctggggttttttgctttgttttgagggaaatgtcttggagtaaattttaagttcctggagttaatttgttttacaggaattttgttttttaaaaaaataggatcattctgaactttggaatgacccccttatatattttctgaaaatgaaaacagttacatgaaaaaaatttccaatgaagatgtcagcattttatgaaaaaccagaagttattagatgaaagcagcgagtgaatctttaaaacagacttgatcacgcacacacaataagtctttctctccgaaaccggaagtaaatctatatctgttagaaataatgtagccaaaagaatgtaaatttgaggatttttttgccaatagtttatagaaaatatatgaaccaaagtgatttgagtttgtaaaaatgtaaaatagtatgaacaaaatttgcactctaccagatttgaacatctagtgaggttcacattcatactaagttttcaacattgtgttctttttgcattcattttttacttttattaaaggttcaaaaccaaaaaaaaaaaaaaaaaaaaaanatnntntgnggngnntcgggccngaaaaagttttnaaccnttcgttggggcggggccccagtggttgtgcacccgggccaaggtgttcccaaggaaaaccccggccgaaaatggggtggggttccc

SEQ ID NO: 498600 - DNA, 131 bp, Homo sapiens
tgctgcgattacaggcatgagccaccgagcctgaacagtcacactttgaaaaagcagtgacagctcctatgcgtgtctgtgcttacgtgtgtatgttgaacgccgagaaattcagtggagatacatgcaac

SEQ ID NO: 498601 - DNA, 616 bp, Homo sapiens
gggccggtgtccgcctctacggtctggaacctgctcaccccttgctctacagccgcttggctcctccagcaccacctgctgcggacccgggaacccctcaccttctcagcaagaccccaccgggagcccttttgggggcaccacctccgcttgtgcccgccccccggcccagttccccagactaggggcccgtgggcgcagctcgggactgacatggtgaggggaacagggggggggtcaggggcagaaggtgccatctcccctgaccgtgttagccaggtcctaggggctgagcgtgtgaagcgcaggactgggagaggcagaggtcagtaagcctcaccagccacctctgaggtcatggaacctgggaacagaagcctcaacccccacaagaccaagcatcacatggagtgtagggtcactgggagagcagaggtcacagcctctagagaagggagaggggcgtgtgcatgggactgtggctcatctcgggggccatggggcctcctgaggtacacctatgcccctgtaacgggcctctaggccctgggcctgcctacccaagggctcactaagccagaggccaaagtgcccactcccgttacacctaccagcc

SEQ ID NO: 498602 - DNA, 2214 bp, Homo sapiens
gcggccgcctcaccagaccgcgtgcggacgggctcgcgggcggggcggggcaagctcaggccacgcccctgggcggtgcgcgcgggcggtgggtaggccgggcaggctcacgtgatgcgggccccgcggcccgccatataaacccgcgcgcccgccaggcgctgcggccgtcccgggccgtgactcctcctttcccccgccccgcctccgttcggagagccggcgggcgggcgcctctcggccaggaagcgcctcttggacgcgtgtgaccgatgcccagattgcacgaccacttctggagctgctcctgtgcgcacagcgcgaggcgccgaggccccccgcgagccagcgccgcggggctggcggccaaggttggggagatgatcaacgtttccgtgtccgggccctccctgctggcggcccacggtgccccggacgctgaccccgcgcccaggggccgcagtgctgcgatgagcggccccgagcccggcagcccctaccccaacacctggcatcatcgcctgttgcagaggagcctcgtgctcttctcggttggggtggtcctagccctggtgctcaacctgctgcagatccagaggaatgtcactctcttccccgaggaggtgatcgccaccatcttttcctccgcctggtgggtccctccctgctgcgggacagcagctgctgttgttggcctactgtacccctgtatcgacagtcacctcggagaaccccacaaatttaagagagaatgggccagtgtcatgcgctgcatagcagtttttgttggcattaaccacgccagtgctaaattggattttgccaataatgtccagctgtccttgactttagcagccctatctttgggcctttggtggacatttgatcgttccagaagtggccttgggctggggatcaccatagcttttctagctacgctgatcacgcagtttctcgtgtataatggtgtctatcagtatacatccccagatttcctctatattcgttcttggctcccttgtatatttttctcaggaggcgtcacggtggggaacataggacgacagttagctatgggtgttcctgaaaagccccatagtgattgagtcttcaaaaccaccgattctgagagcaaggaagattttggaagaaaatctgactgtggattatgacaaagattatcttttttcttaagtaatctatttagatcgggctgactgtacaaatgactcctggaaaaaactcttcacctagtctagaatagggaggtggagaatgatgacttaccctgaagtcttcccttgactgcccgcactggcgcctgtctgtgccctggagcattctgcccaggctacgtgggttcaggcaggtggcagcttcccaagtattcgatttcattcatgtgattaaaacaagttgccatatttcaaagccttgaactaagactcaattaccaacccgcagttttgtgtcagtgcccaaaggaggtaggttgatggtgcttaacaaacatgaagtatggtgtaataggaataatatttatccaaaagatttttaaaaatagggctgtgtttaaaaaaaaaaacaaaacaagaaaagcagcagtgattatagagaggtcacactctaagtggggtcgcggcgtggccacgcttcacggtcacgctcgtccgtcctgcagtggcgtgtttacatggtcacacgtgtgtgtatcaccagtgggtcaactgcttgtcattcctcccgtggcagtttgtgtagacaatcttactgagcaaaaggcaatgaaaagtcttggttcccacactgcgatatattggaattttcacctcagtttatgaagtttatttcgaaatccatagtcatctaagaatgaatacctgtctgccatgtatttcaatcttagtgagccaaaattgtttgtttgttactacagaatagagatgactgttttttgccacagccctatggaatttgcaatctgtgattgccttgtaaaaaggagagtgcatatggcactgcattaaacgtgtggtgtttctagtcaatgatattggtgagcacaatgtattcatttaatggcatagaccataccagacctaatttgcaagtattgggtcttaaacttcaagtgcaatgtatatgaaaccatctgaccttgtatctcttgatatttatttttttaacgtgtgagcgcttgggagatcctctaga

SEQ ID NO: 498603 - DNA, 121 bp, Homo sapiens
ggctgccttgaggacccgcgcagaggaggtgtgccccctttgctgtcagtgctgtccagctgtccacctcctctgtgctgtccacctcctctgtgctgtccagcctcctctgtgctgtcca

SEQ ID NO: 498604 - DNA, 3248 bp, Homo sapiens
  misc_feature (3122)..(3122): n is a, c, g, or t
  misc_feature (3125)..(3126): n is a, c, g, or t
  misc_feature (3128)..(3128): n is a, c, g, or t
  misc_feature (3131)..(3131): n is a, c, g, or t
  misc_feature (3134)..(3134): n is a, c, g, or t
  misc_feature (3136)..(3137): n is a, c, g, or t
  misc_feature (3145)..(3145): n is a, c, g, or t
  misc_feature (3157)..(3157): n is a, c, g, or t
  misc_feature (3162)..(3162): n is a, c, g, or t
gcggccgcctcaccagaccgcgtgcggacgggctcgcgggcggggcggggcaagctcaggccacgcccctgggcggtgcgcgcgggcggtgggtaggccgggcaggctcacgtgatgcgggccccgcggcccgccatataaacccgcgcgcccgccaggcgctgcggccgtcccgggccgtgactcctcctttcccccgccccgcctccgttcggagagccggcgggcgggcgcctctcggccaggaagcgcctcttggacgcgtgtgaccgatgcccagattgcacgaccacttctggagctgctcctgtgcgcacagcgcgaggcgccgaggccccccgcgagccagcgccgcggggctggcggccaaggttggggagatgatcaacgtttccgtgtccgggccctccctgctggcggcccacggtgccccggacgctgaccccgcgcccaggggccgcagtgctgcgatgagcggccccgagcccggcagcccctaccccaacacctggcatcatcgcctgttgcagaggagcctcgtgctcttctcggttggggtggtcctagccctggtgctcaacctgctgcagatccagaggaatgtcactctcttccccgaggaggtgatcgccaccatcttttcctccgcctggtgggtccctccctgctgcgggacagcagctgctgttgttggcctactgtacccctgtatcgacagtcacctcggagaaccccacaaatttaagagagaatgggccagtgtcatgcgctgcatagcagtttttgttggcattaaccacgccagtgctgtatccttaattttctgtgctacgtccagaaaattggattttgccaataatgtccagctgtccttgactttagcagccctatctttgggcctttggtggacatttgatcgttccagaagtggccttgggctggggatcaccatagcttttctagctacgctgatcacgcagtttctcgtgtataatggtgtctatcagtatacatccccagatttcctctatattcgttcttggctcccttgtatatttttctcaggaggcgtcacggtggggaacataggacgacagttagctatgggtgttcctgaaaagccccatagtgattgagtcttcaaaaccaccgattctgagagcaaggaagattttggaagaaaatctgactgtggattatgacaaagattatcttttttcttaagtaatctatttagatcgggctgactgtacaaatgactcctggaaaaaactcttcacctagtctagaatagggaggtggagaatgatgacttaccctgaagtcttcccttgactgcccgcactggcgcctgtctgtgccctggagcattctgcccaggctacgtgggttcaggcaggtggcagcttcccaagtattcgatttcattcatgtgattaaaacaagttgccatatttcaaagccttgaactaagactcaattaccaacccgcagttttgtgtcagtgcccaaaggaggtaggttgatggtgcttaacaaacatgaagtatggtgtaataggaataatatttatccaaaagatttttaaaaatagggctgtgtttaaaaaaaaaaacaaaacaagaaaagcagcagtgattatagagaggtcacactctaagtggggtcgcggcgtggccacgcttcacggtcacgctcgtccgtcctgcagtggcgtgtttacatggtcacacgtgtgtgtatcaccagtgggtcaactgcttgtcattcctcccgtggcagtttgtgtagacaatcttactgagcaaaaggcaatgaaaagtcttggttcccacactgcgatatattggaattttcacctcagtttatgaagtttatttcgaaatccatagtcatctaagaatgaatacctgtctgccatgtatttcaatcttagtgagccaaaattgtttgtttgttactacagaatagagatgactgttttttgccacagccctatggaatttgcaatctgtgattgccttgtaaaaaggagagtgcatatggcactgcattaaacgtgtggtgtttctagtcaatgatattggtgagcacaatgtattcatttaatggcatagaccataccagacctaatttgcaagtattgggtcttaaacttcaagtgcaatgtatatgaaaaccaatctgagccttgtatctcttaaatatttattttttttaacgtgtgagatgttcgagagaaggttctccattcatttcagtgctgcctggaggaaactcggcaatgatttctttcagttgtgaagttcctttcgtgttacaccctccactgaaccctcaaccttcgaaatactccagttttgtgggtttggtcatttttacttataaatttacctttttgtattttgcaatttacatgtgtttggtttgttttaaattctgtgaaagtggcttgattaaaagactccttttaaatggaagccaccagtcagcagaatggaagcttagaggaacttgcctgtgagcgctggtctttgtgtttggttttgtgatgtaacgatctttgctggggttttttgctttgttttgagggaaatgtcttggagtaaattttaagttcctggagttaatttgttttacaggaattttgttttttaaaaaaataggatcattctgaactttggaatgacccccttatatattttctgaaaatgaaaacagttacatgaaaaaaatttccaatgaagatgtcagcattttatgaaaaaccagaagttattagatgaaagcagcgagtgaatctttaaaacagacttgatcacgcacacacaataagtctttctctccgaaaccggaagtaaatctatatctgttagaaataatgtagccaaaagaatgtaaatttgaggatttttttgccaatagtttatagaaaatatatgaaccaaagtgatttgagtttgtaaaaatgtaaaatagtatgaacaaaatttgcactctaccagatttgaacatctagtgaggttcacattcatactaagttttcaacattgtgttctttttgcattcattttttacttttattaaaggttcaaaaccaaaaaaaaaaaaaaaaaaaaaanatnntntgnggngnntcgggccngaaaaagttttnaaccnttcgttggggcggggccccagtggttgtgcacccgggccaaggtgttcccaaggaaaaccccggccgaaaatggggtggggttccc

SEQ ID NO: 498605 - DNA, 2195 bp, Homo sapiens
  misc_feature (2032)..(2032): n is a, c, g, or t
  misc_feature (2063)..(2063): n is a, c, g, or t
  misc_feature (2090)..(2091): n is a, c, g, or t
  misc_feature (2124)..(2124): n is a, c, g, or t
  misc_feature (2171)..(2171): n is a, c, g, or t
  misc_feature (2195)..(2195): n is a, c, g, or t
gcggccgcctcaccagaccgcgtgcggacgggctcgcgggcggggcggggcaagctcaggccacgcccctgggcggtgcgcgcgggcggtgggtaggccgggcaggctcacgtgatgcgggccccgcggcccgccatataaacccgcgcgcccgccaggcgctgcggccgtcccgggccgtgactcctcctttcccccgccccgcctccgttcggagagccggcgggcgggcgcctctcggccaggaagcgcctcttggacgcgtgtgaccgatgcccagattgcacgaccacttctggagctgctcctgtgcgcacagcgcgaggcgccgaggccccccgcgagccagcgccgcggggctggcggccaaggttggggagatgatcaacgtttccgtgtccgggccctccctgctggcggcccacggtgccccggacgctgaccccgcgcccaggggccgcagtgctgcgatgagcggccccgagcccggcagcccctaccccaacacctggcatcatcgcctgttgcagaggagcctcgtgctcttctcggttggggtggtcctagccctggtgctcaacctgctgcagatccagaggaatgtcactctcttccccgaggaggtgatcgccaccatcttttcctccgcctggtgggtccctccctgctgcgggacagcagctgctgttgttggcctactgtacccctgtatcgacagtcacctcggagaaccccacaaatttaagagagaatgggccagtgtcatgcgctgcatagcagtttttgttggcattaaccacgccagtgctaaattggattttgccaataatgtccagctgtccttgactttagcagccctatctttgggcctttggtggacatttgatcgttccagaagtggccttgggctggggatcaccatagcttttctagctacgctgatcacgcagtttctcgtgtataatggtgtctatcagtatacatccccagatttcctctatattcgttcttggctcccttgtatatttttctcaggaggcgtcacggtggggaacataggacgacagttagctatgggtgttcctgaaaagccccatagtgattgagtcttcaaaaccaccgattctgagagcaaggaagattttggaagaaaatctgactgtggattatgacaaagattatcttttttcttaagtaatctatttagatcgggctgactgtacaaatgactcctggaaaaaactcttcacctagtctagaatagggaggtggagaatgatgacttaccctgaagtcttcccttgactgcccgcactggcgcctgtctgtgccctggagcattctgcccaggctacgtgggttcaggcaggtggcagcttcccaagtattcgatttcattcatgtgattaaaacaagttgccatatttcaaagccttgaactaagactcaattaccaacccgcagttttgtgtcagtgcccaaaggaggtaggttgatggtgcttaacaaacatgaagtatggtgtaataggaataatatttatccaaaagatttttaaaaatagggctgtgtttaaaaaaaaaaacaaaacaagaaaagcagcagtgattatagagaggtcacactctaagtggggtcgcggcgtggccacgcttcacggtcacgctcgtccgtcctgcagtggcgtgtttacatggtcacacgtgtgtgtatcaccagtgggtcaactgcttgtcattcctcccgtggcagtttgtgtagacaatcttactgagcaaaaggcaatgaaaagtcttggttcccacactgcgatatattggaattttcacctcagtttatgaagtttatttcgaaatccatagtcatctaagaatgaatacctgtctgccatgtatttcaatcttagtgagccaaaattgtttgtttgttactacagaatagagatgactgttttttgccacagccctatggaatttgcaatctgtgattgccttgtcacatgatcattaatgcatagccatacagactaatngaagattggtctaactcaagtcatgatatanaccatctgagctgatcctaatataatnnttaacgggaatgtcagaaggtctcatcatcagnctgctgaggactcgcatgatctttcagtggaagtcttcggtacactnactgaccctactcgaaactcagtn

SEQ ID NO: 498606 - DNA, 325 bp, Homo sapiens
tttccgattaagagtgcttgagttaaatgcatctgttgaacgtggaatacaagtcgttcgagagaaagtgaaaaattctgctcactcaactgtctccagcagtcgctcagatgggcaagccgcgtccgccttttaagattgtgattctgtatgaagcacattctatgacctcccctgctcacgctaccttcaagacctaccatgtacccagcgatcgaaaaccacccgattctgtcttatctgtaactatttcactccccttaatcgaccccctgacctctccatgttcaaaattccgcttccagcctctgtcagcacctctcat

SEQ ID NO: 498607 - DNA, 3617 bp, Homo sapiens
  misc_feature (3491)..(3491): n is a, c, g, or t
  misc_feature (3494)..(3495): n is a, c, g, or t
  misc_feature (3497)..(3497): n is a, c, g, or t
  misc_feature (3500)..(3500): n is a, c, g, or t
  misc_feature (3503)..(3503): n is a, c, g, or t
  misc_feature (3505)..(3506): n is a, c, g, or t
  misc_feature (3514)..(3514): n is a, c, g, or t
  misc_feature (3526)..(3526): n is a, c, g, or t
  misc_feature (3531)..(3531): n is a, c, g, or t
gcggccgcctcaccagaccgcgtgcggacgggctcgcgggcggggcggggcaagctcaggccacgcccctgggcggtgcgcgcgggcggtgggtaggccgggcaggctcacgtgatgcgggccccgcggcccgccatataaacccgcgcgcccgccaggcgctgcggccgtcccgggccgtgactcctcctttcccccgccccgcctccgttcggagagccggcgggcgggcgcctctcggccaggtacgcggccggctgggataggggtcgcgggcgggctttggtcgcgcagcagccggtcctccccggagggaagcgcctcttggacgcgtgtgaccgatgcccagattgcacgaccacttctggagctgctcctgtgcgcacagcgcgaggcgccgaggccccccgcgagccagcgccgcggggctggcggccaaggttggggagatgatcaacgtttccgtgtccgggccctccctgctggcggcccacggtgccccggacgctgaccccgcgcccaggggccgcagtgctgcgatgagcggccccgagcccggcagcccctaccccaacacctggcatcatcgcctgttgcagaggagcctcgtgctcttctcggttggggtggtcctagccctggtgctcaacctgctgcagatccagaggaatgtcactctcttccccgaggaggtgatcgccaccatcttttcctccgcctggtgggtccctccctgctgcgggacagcagctgctgttgttggcctactgtacccctgtatcgacagtcacctcggagaaccccacaaatttaagagagaatgggccagtgtcatgcgctgcatagcagtttttgttggcattaaccacgccagtgctaaattggattttgccaataatgtccagctgtccttgactttagcagccctatctttgggcctttggtggacatttgatcgttccagaagtggccttgggctggggatcaccatagcttttctagctacgctgatcacgcagtttctcgtgtataatggtgtctatcagtaagtgtgtgttttcaaatattggctttggcaagcttacttaactttcattaaaacatccactaagcttagatatttgcatattttatttgttattatatagaatgatacagatttaggcatgaaattctcaaaaatgctgatatccataacttaatgtaacgcaaaggaaaagcaagtagtagcagttacaaccaaacaaatatgaacattcgtaacattggatggttgatatgcgttctgcaatatccccactacagagaatctgtgatgtagaattgagccaggtgacattgactgctaaggtcacagtttcttttctcgctccaggtatacatccccagatttcctctatattcgttcttggctcccttgtatatttttctcaggaggcgtcacggtggggaacataggacgacagttagctatgggtgttcctgaaaagccccatagtgattgagtcttcaaaaccaccgattctgagagcaaggaagattttggaagaaaatctgactgtggattatgacaaagattatcttttttcttaagtaatctatttagatcgggctgactgtacaaatgactcctggaaaaaactcttcacctagtctagaatagggaggtggagaatgatgacttaccctgaagtcttcccttgactgcccgcactggcgcctgtctgtgccctggagcattctgcccaggctacgtgggttcaggcaggtggcagcttcccaagtattcgatttcattcatgtgattaaaacaagttgccatatttcaaagccttgaactaagactcaattaccaacccgcagttttgtgtcagtgcccaaaggaggtaggttgatggtgcttaacaaacatgaagtatggtgtaataggaataatatttatccaaaagatttttaaaaatagggctgtgtttaaaaaaaaaaacaaaacaagaaaagcagcagtgattatagagaggtcacactctaagtggggtcgcggcgtggccacgcttcacggtcacgctcgtccgtcctgcagtggcgtgtttacatggtcacacgtgtgtgtatcaccagtgggtcaactgcttgtcattcctcccgtggcagtttgtgtagacaatcttactgagcaaaaggcaatgaaaagtcttggttcccacactgcgatatattggaattttcacctcagtttatgaagtttatttcgaaatccatagtcatctaagaatgaatacctgtctgccatgtatttcaatcttagtgagccaaaattgtttgtttgttactacagaatagagatgactgttttttgccacagccctatggaatttgcaatctgtgattgccttgtaaaaaggagagtgcatatggcactgcattaaacgtgtggtgtttctagtcaatgatattggtgagcacaatgtattcatttaatggcatagaccataccagacctaatttgcaagtattgggtcttaaacttcaagtgcaatgtatatgaaaaccaatctgagccttgtatctcttaaatatttattttttttaacgtgtgagatgttcgagagaaggttctccattcatttcagtgctgcctggaggaaactcggcaatgatttctttcagttgtgaagttcctttcgtgttacaccctccactgaaccctcaaccttcgaaatactccagttttgtgggtttggtcatttttacttataaatttacctttttgtattttgcaatttacatgtgtttggtttgttttaaattctgtgaaagtggcttgattaaaagactccttttaaatggaagccaccagtcagcagaatggaagcttagaggaacttgcctgtgagcgctggtctttgtgtttggttttgtgatgtaacgatctttgctggggttttttgctttgttttgagggaaatgtcttggagtaaattttaagttcctggagttaatttgttttacaggaattttgttttttaaaaaaataggatcattctgaactttggaatgacccccttatatattttctgaaaatgaaaacagttacatgaaaaaaatttccaatgaagatgtcagcattttatgaaaaaccagaagttattagatgaaagcagcgagtgaatctttaaaacagacttgatcacgcacacacaataagtctttctctccgaaaccggaagtaaatctatatctgttagaaataatgtagccaaaagaatgtaaatttgaggatttttttgccaatagtttatagaaaatatatgaaccaaagtgatttgagtttgtaaaaatgtaaaatagtatgaacaaaatttgcactctaccagatttgaacatctagtgaggttcacattcatactaagttttcaacattgtgttctttttgcattcattttttacttttattaaaggttcaaaaccaaaaaaaaaaaaaaaaaaaaaanatnntntgnggngnntcgggccngaaaaagttttnaaccnttcgttggggcggggccccagtggttgtgcacccgggccaaggtgttcccaaggaaaaccccggccgaaaatggggtggggttccc

SEQ ID NO: 498608 - DNA, 321 bp, Homo sapiens
aagcacatggaatgaggtctcatgactaccaacccaacaccacactcatattgtatgaacgtatatctggagcttagaggacagcacttaataaggacccaagggagtgtgacctccaccagctgcaaaacgaggctggggcttttacaagctccattaacaatatccaggcttttaaaaaaaaatctcatttcactctgttttccaacataattcctaaaatgatcctttttaatatctaacactttccaaatgttcgctctgtacttacaaaccccgccccattccaacccaatctactttctttggattgagtgattg

SEQ ID NO: 498609 - DNA, 211 bp, Homo sapiens
  misc_feature (12)..(12): n is a, c, g, or t
  misc_feature (63)..(63): n is a, c, g, or t
  misc_feature (77)..(77): n is a, c, g, or t
  misc_feature (161)..(161): n is a, c, g, or t
  misc_feature (170)..(170): n is a, c, g, or t
ccagcagcggcnaggcgccacacctaagaggggggccatgggttgctggtgcgcttccactgngcagggttatgcgntcccggggagaggccccccacgcgcgcctgcggcgtttcgcgtgcctgcgcggctttcgcctaaccgcgttctgcggcgggggncatctacgncctcggtcctcggccctccgtccgtccgtcggaactccccg

SEQ ID NO: 498610 - DNA, 476 bp, Homo sapiens
  misc_feature (36)..(36): n is a, c, g, or t
  misc_feature (92)..(92): n is a, c, g, or t
  misc_feature (127)..(127): n is a, c, g, or t
  misc_feature (248)..(248): n is a, c, g, or t
  misc_feature (464)..(464): n is a, c, g, or t
tagttccacgggcccctatgcggacatttgcaagtnccggctcggagtcgggtagccccagggggtggttgggccccggtggagcaataacnattcactgcagtgtggcttgctggaagccccccancctaacggggagtgcatcacatcaaggggaccaccaacgtggtacaaaagaatctgaacaacagcccttgagttccagatttttccactgaaatagtctacccaaatgagaaggaatcagnaaagtaattctggtaatatgacaaggtaataaaacaaggttctataacatccccaaaagaccacactagctccccagcaatgggtaataaaacaaggttctataacatccccaaaagaccacactagctccccagcaatgggtccaaatcaagaagtctctgaattgcgaaataaataactcagaaggttgattattaagctactcagggagatanccagggaaaggt

SEQ ID NO: 498611 - DNA, 685 bp, Homo sapiens
ggtcaaaatggctgcgcccagcgtgcgcgggtatcctctgaagttggggttcaagattcttgcccgtgagagcgaacgagcctgccgtacttcgtgattttgaaacacctgggtctgggcttcccgggcgagcggtggaacctgtgagaacgtttctacaatggtgggctcagctctcaggagaggtgcccatgcgatatgtctagctggtgagtaaggccagtcacatctccagaggcatcagcagccgaggcctgggcgatcgaggcctcctgacagtgagagatgtgccacccaaagagctccaggcagtcgtgggtggagcgggctgggcaaatcctacccttcaggacgaccacaggaacatcacccggaaggtcctcagcagagtaggcaggaaccgtgcacaagcaggagcatcaccctctgtggctgatcaaggagagggtgaatggagcagccttctacacagtcagttactgtgggcctgcttttgggagcccgttgttctcggtgctacagagatagctattctaccaagatgagtcgacgagtctggcagaactttgatcagcctgctcatcccagctgatcaccccagtcacggaagaagggggacaactattacctgaatcggactcgcatgctgagagcgcacacgtctgcacaccagtgggacttggta

SEQ ID NO: 498612 - DNA, 274 bp, Homo sapiens
tggaaaaaaaaatgtctcagcaggcatgcttgggagatcagatgtggtaggcaggcctcggggtcctttccttgaagcagagcactggccaaatcatggcagagcagcaagggtaaaaatgccctcttggccaagtgcctcatgtatgtgcctcctctgctttgtcacttggcagccgggctgacacaggcaccacattggtttggtggaccttggacgaccccagtgatgctggacacgtgaccgtgcgggtactagaacgtcacgcaggggc

SEQ ID NO: 498613 - DNA, 200 bp, Homo sapiens
gctagactaaaaaaaaacttgtttacacacaactgaaaatagaatcttacttgataatacaaaagctaccatcagaagaaatcccttcaggatcattaacgccacttcctattgctctgacattttctaatagtacgttttaaagttattcattaagatcaccgtgaaaacaaattccaaacagagaaccacacacgtac

SEQ ID NO: 498614 - DNA, 335 bp, Homo sapiens
ttcatggtggctcatgcctgtataccccagcatgaggctgagatgggtggatcaccgaaggtcaggagttcaagaccagcctagccaacatggtgaaaccccatctctgctaaaaacacaaaaattagccaggtgtggtggtgggtgcccgtaagcccagctacttgggaggctgaggcaggagaattgcttgaacccgggaggtggaggttgcaatgagctgagatcatgccactgcactccagcctgggtgacagaacgagactctgtctcacaaaaataagtaaagctagacccagtggtgtagaggtggaacgtacttctcatcagccttt

SEQ ID NO: 498615 - DNA, 224 bp, Homo sapiens
gaagcgcacgatggttcccacccgatgagcacagccgaacgcctgaacgcagacatacttcctaatttctacaccctaagtaggctcctttcccctaatcattcgcattaattttacattcaaaacaccttaggctcattaaaacattctaattaattcactcttcattggcccaagaaattatcaaattccttgagcccaaaaacttaataatgacctagctt

SEQ ID NO: 498616 - DNA, 611 bp, Homo sapiens
  misc_feature (91)..(91): n is a, c, g, or t
  misc_feature (202)..(202): n is a, c, g, or t
cgggtctcatcactcccctggggaagaggtgccacgcgccagtgtgggcgcccagtcacttgggttcagcaccacaaggattaggatgganatgacctgctccttcccccccacggctcccatgcagcaaggtcgggggaccccgctgagtaccccctgggctcgggccccgtttgttgggggacctgcgggcagccccccnacaaggcatttgccaagggctcaggagcccaggtggggggacccatttccttggggttttttgcccccagggtcccggtcccttgcagctcccccagggtggggggcaggggggggggcagcttcggggacaatttggtcccccgctcctcccttttggggaaatccagcccccgaacccaaagcccccaaaattgcagcatcatgtattttggggcccccccgggcggggggggggggggaggcttccggggtcccccccccctcaagccccccccccgccccgcccgtcatggggggggggttgaagccaaaaaaaaaaaaccccttgggtttttttttttggatttttttttttaaaaaaaggtattttttccagggggtttaaattgaaggaaaaacccaagcca

SEQ ID NO: 498617 - DNA, 344 bp, Homo sapiens
taactaaaggtggaaaaactctaccattagatcatttaaggaccaagctttatcaaacgcccacttcttattggatgttctgaatggtatcgcgccgggctatgttgattatgatctagtcacccctggtaacaccgaggaagaaaggtacgcaaacgcaagattggctatttctattgctagaaagttgggtgctttgatttggttggtgccagaagatatcaacgaagttcgtgcaagattaattattacttttatcgcttcgttaatgactttgaacaaatgagccaacatacaactttcgtaacctgttttctactcagctttcttgttccaatgctccg

SEQ ID NO: 498618 - DNA, 151 bp, Homo sapiens
gaggaggctgaggaggaggtggctagagcttcagtcactggggaaagcagggaacagtgtgactcttattcatccagctgtctgtggctgtccactgtgtgcacttgctgttttccctgtccacatccatgctgtacagacaccaccatta

SEQ ID NO: 498619 - DNA, 383 bp, Homo sapiens
  misc_feature (1)..(1): n is a, c, g, or t
  misc_feature (355)..(355): n is a, c, g, or t
  misc_feature (367)..(367): n is a, c, g, or t
nattcggcatgaggtgtttggaagacagtgctgccagtgtttttctggtaattcctctttagatgctgtcattttcagaagaagctgatgtaaatgcctctacaacctaaagcccaggtgagctatgttgccttggtttgattatctaacgattccttaatctaacattgcaataagactgtgaagtagaagacagaaacttttttgtctatggtattagaagacagaagccctgggtgctgcttttaggggcagcatgtatcttttccttctccaagctggctggaggaagtgttctcaaagtgctgtggggaaaagaaaccatcatgattcatttatgtggaatatcagatangtaaattattanggactttgagcaaacc

SEQ ID NO: 498620 - DNA, 185 bp, Homo sapiens
ttgctatctttatcagaaagatcagaatcagaatctgaaaggtcataaaaacgtttcaagtactctgcagtgctatggttaatgtggtaccctcttatccacagcatagttcaacttgaacttttttttttgagatggaatcttgcactccagcctgggggacacgacgggatccgtctcaaaaa

SEQ ID NO: 498621 - DNA, 1012 bp, Homo sapiens
  misc_feature (332)..(332): n is a, c, g, or t
gggcaggcatctgattgtcttacacagtcatttgcagtccccagctgccctatatagcagcatggcctgatgtgcacatagatcagttagcctatgtgagataacagaaagacttgaatgttggtgcccagcgactggtccatacgctgaccgctagagatattgtgtccgccagaggtcttgaccaatcagattgcgctagcagttaccagtgagtgagaatgagatcttgtgaggcctgaatagcccagtggagcgattcactaggtaggaacgctaggtcaagcccgtaaggaaaatagcaagccctgatagcacacaataatttcttnctatgcaagggcagtggtacgagcctggactattttgccctctggatagtgcaaatctgtcgggactcgtccgtgacttctgattaccaacatgtttatacttatcctaagtgttgtcttttctcattgtgatatttcgtgctacgttctgtctctcctcatatctacctgggagcccacagccgtgaattacggtatgaatcatgatgaatactgttaccatttcctggtagcacttgcagtttcaggtaagtgcttgcggggccattactcaggttatgtgacgtgatttgcacaagcagagcacctatgggaagtcctatcaggtatatgatgctgtgggtctggtaataacctttgtgttggctaaactggtgtactgtctgtcgtgtgtcgtgtgtctggtggccactgtgttgtgacgacgacgacgacgaggagacgacgacctttggaaccaaatcagaattggtgtccgggaatgtgttgcaggccttagggatacggggattcatggacctgttttggttaccagcaataggaaagtcgactcagggattgccttcctcttggaccaggctttggcaccttagcaggtttcaccctccaggtactgactattacgcaaaacggatttggggcccactgtcggaagtcggcttaccagatgccggcaaaaa

SEQ ID NO: 498622 - DNA, 636 bp, Homo sapiens
cacacggggatatgagtgcagcatgacacatttctgtccgatctgccacggtgatgatatactagtagtgtcagatgttcgaggacgacggtgatgacacatctctaggatagtgacctggatccagaggagctggcaggagtcagggagacatcagggtctaagggaccaaaagcgtatgcgacttactagaatgtgcaagatagatacagagtgaggaggaggaggagaatccactagctggataccactaggacaggaaaaggcagaaactagcagagaagaacaagccaacctagtgagttctacaaagaggcagacttatgactagaggatacaggaggacgatgccgatgagagccactggcagatacaagtacaggacccagctgttatatctgagaaccgggcggacagggacggaatgcaatacacagcaagaaagacagcgagctgccaacaagacaccacacacttatcctgttttgacacagaccaagaagactaactgtactaccccatggtaccagagagtgacaagccccctaaggggaacgagacggatatctacagagggaaaagaaagcatggccacttggcacttgaaaggaggaagaaaaagagataggcatctaa

SEQ ID NO: 498623 - DNA, 135 bp, Homo sapiens
gttaacgggcacctttggcgtaacacccacaaccgcgcgcttatgcggccctacaagggcgtcctgtgccggattttctcttccccttggggggggttttcaccccaagaccgtcactccgttgcagcatttacg

SEQ ID NO: 498624 - DNA, 873 bp, Homo sapiens
agcggcgctcgcctgcggcgctgctggctccagaccgccctccggtatcgcgaccctgtcggaatggtattaggctatatcttcatgctgggcttcatcaccaggccgttcctcacagattcctgtcccttcttgtgttccatggtatgtccggtataccgtctagacatcatctagctaccttgggtgcctccagccctaggctcccagagcctcatggcgttatctccttcattccatccatgctcggaacatgcaccctggctggcattgtgtgctcagggtaactatcggtagcagccgagtagcaagcaactagtaacttataacaactagtgatgcttgagcgtggattccgagaacggctgcgcagacctgggggtgccttgcctaggcattatcccatgccgtgatggccattcttcgactctcattgtgcgaccgggagactccctgacatgaccactgcatacgaccccgaggtctagaaacctacttggtgctggggaacaacattgttcgcgacatgacaggtacaaccccgagacatttgcctgcggggacattggttgggatctcgtggggcttgtcgccttttgcggttggctttcgcaatgatgccattgggccaaaagactgggtgatgccaggatcctccgggaataaaattctgtagcatatattggtggcacaatgaactagcctagaaatacaagtctaaagaggagaccatgttcacgttcggggcgcaccttaaccagcgaacacgaagccaccatcctcgcagttgcacggttaagaagaattccccactggccacggtgcggacctaaatgttgttggacctgccactctccttgccaatggccttgg

SEQ ID NO: 498625 - DNA, 621 bp, Homo sapiens
atcagtgaagaagccctaagagcagatggctttggagacaatccttctattccctgtttggtagcagagaatctttcagcgcccgggaagcttctggggccctgcgtggtgggctatgggatatactatttcatctacagtacatggaagggacgcaccctttatctggaggatatctatgtgatgccggaatatcggggtcaagggattggttcccaaataatcaaaaaggtggcttaggtggccttggataagggctgctcccaattccgcctggccgtcctggactggaaccagagggccatggacttgttcaaggccctaggagcccaagattttacggaaacttagggctggccctttttttgctttcaaggaaaggcaaccagaaagttggcaggaaagtgacgccctccctaggaggatttctgtttttagtttttccttccccatcagctgaagcccttttcaaagactacgtccccagacccttatgcttaggcctccctggaggaaggagggttaggggtgcctatcctccagtattggaaaagcaaaatttagggagagaccttttttccttgtttagggtgaaaaataaataaaaatttcatgtcctta

SEQ ID NO: 498626 - DNA, 163 bp, Homo sapiens
cctgatatcaaagaactaggttctccagggatattttaaatttcccactggacattcacgagtggatatcacaggtgtataatgatcagtgtcttttgttcaaaatgttagcaagggttgttaactgatatagtaaatttcatcaccaatggcaatcaagctt

SEQ ID NO: 498627 - DNA, 325 bp, Homo sapiens
caagactttcaggattaagcgattcctggccaaaaaacaaaagcaaaattgtccccttcccccgggggttgggatgaaaactggaaataaaatcggggccccctcccaaaggggcccttggagaaaaacccagctgggtttttaaggaattgcccatgaaagggcccccatttttttgctgtttgaaggtcccggtcatgttcccaaatcaagctgaaaatgtcccccccatttggggattttgaggggttttcctctttgaatttgttatgaacccgttggtgggggggattcagtaataaaaatgtaaggcctttttttttta

SEQ ID NO: 498628 - DNA, 2926 bp, Homo sapiens
  misc_feature (2800)..(2800): n is a, c, g, or t
  misc_feature (2803)..(2804): n is a, c, g, or t
  misc_feature (2806)..(2806): n is a, c, g, or t
  misc_feature (2809)..(2809): n is a, c, g, or t
  misc_feature (2812)..(2812): n is a, c, g, or t
  misc_feature (2814)..(2815): n is a, c, g, or t
  misc_feature (2823)..(2823): n is a, c, g, or t
  misc_feature (2835)..(2835): n is a, c, g, or t
  misc_feature (2840)..(2840): n is a, c, g, or t
gcggccgcctcaccagaccgcgtgcggacgggctcgcgggcggggcggggcaagctcaggccacgcccctgggcggtgcgcgcgggcggtgggtaggccgggcaggctcacgtgatgcgggccccgcggcccgccatataaacccgcgcgcccgccaggcgctgcggccgtcccgggccgtgactcctcctttcccccgccccgcctccgttcggagagccggcgggcgggcgcctctcggccaggaagcgcctcttggacgcgtgtgaccgatgcccagattgcacgaccacttctggagctgctcctgtgcgcacagcgcgaggcgccgaggccccccgcgagccagcgccgcggggctggcggccaaggttggggagatgatcaacgtttccgtgtccgggccctccctgctggcggcccacggtgccccggacgctgaccccgcgcccaggggccgcagtgctgcgatgagcggccccgagcccggcagcccctaccccaacacctggcatcatcgcctgttgcagaggagcctcgtgctcttctcggttggggtggtcctagccctggtgctcaacctgctgcagatccagaggaatgtcactctcttccccgaggaggtgatcgccaccatcttttcctccgcctggtgggtccctccctgctgcgggacagcagctggtatacatccccagatttcctctatattcgttcttggctcccttgtatatttttctcaggaggcgtcacggtggggaacataggacgacagttagctatgggtgttcctgaaaagccccatagtgattgagtcttcaaaaccaccgattctgagagcaaggaagattttggaagaaaatctgactgtggattatgacaaagattatcttttttcttaagtaatctatttagatcgggctgactgtacaaatgactcctggaaaaaactcttcacctagtctagaatagggaggtggagaatgatgacttaccctgaagtcttcccttgactgcccgcactggcgcctgtctgtgccctggagcattctgcccaggctacgtgggttcaggcaggtggcagcttcccaagtattcgatttcattcatgtgattaaaacaagttgccatatttcaaagccttgaactaagactcaattaccaacccgcagttttgtgtcagtgcccaaaggaggtaggttgatggtgcttaacaaacatgaagtatggtgtaataggaataatatttatccaaaagatttttaaaaatagggctgtgtttaaaaaaaaaaacaaaacaagaaaagcagcagtgattatagagaggtcacactctaagtggggtcgcggcgtggccacgcttcacggtcacgctcgtccgtcctgcagtggcgtgtttacatggtcacacgtgtgtgtatcaccagtgggtcaactgcttgtcattcctcccgtggcagtttgtgtagacaatcttactgagcaaaaggcaatgaaaagtcttggttcccacactgcgatatattggaattttcacctcagtttatgaagtttatttcgaaatccatagtcatctaagaatgaatacctgtctgccatgtatttcaatcttagtgagccaaaattgtttgtttgttactacagaatagagatgactgttttttgccacagccctatggaatttgcaatctgtgattgccttgtaaaaaggagagtgcatatggcactgcattaaacgtgtggtgtttctagtcaatgatattggtgagcacaatgtattcatttaatggcatagaccataccagacctaatttgcaagtattgggtcttaaacttcaagtgcaatgtatatgaaaaccaatctgagccttgtatctcttaaatatttattttttttaacgtgtgagatgttcgagagaaggttctccattcatttcagtgctgcctggaggaaactcggcaatgatttctttcagttgtgaagttcctttcgtgttacaccctccactgaaccctcaaccttcgaaatactccagttttgtgggtttggtcatttttacttataaatttacctttttgtattttgcaatttacatgtgtttggtttgttttaaattctgtgaaagtggcttgattaaaagactccttttaaatggaagccaccagtcagcagaatggaagcttagaggaacttgcctgtgagcgctggtctttgtgtttggttttgtgatgtaacgatctttgctggggttttttgctttgttttgagggaaatgtcttggagtaaattttaagttcctggagttaatttgttttacaggaattttgttttttaaaaaaataggatcattctgaactttggaatgacccccttatatattttctgaaaatgaaaacagttacatgaaaaaaatttccaatgaagatgtcagcattttatgaaaaaccagaagttattagatgaaagcagcgagtgaatctttaaaacagacttgatcacgcacacacaataagtctttctctccgaaaccggaagtaaatctatatctgttagaaataatgtagccaaaagaatgtaaatttgaggatttttttgccaatagtttatagaaaatatatgaaccaaagtgatttgagtttgtaaaaatgtaaaatagtatgaacaaaatttgcactctaccagatttgaacatctagtgaggttcacattcatactaagttttcaacattgtgttctttttgcattcattttttacttttattaaaggttcaaaaccaaaaaaaaaaaaaaaaaaaaaanatnntntgnggngnntcgggccngaaaaagttttnaaccnttcgttggggcggggccccagtggttgtgcacccgggccaaggtgttcccaaggaaaaccccggccgaaaatggggtggggttccc

SEQ ID NO: 498629 - DNA, 212 bp, Homo sapiens
aggtaattgaatcactgaatcatcattatcgtgagaaaagcaggtctttcacatgcttttctcctgatagtgaataaggctcaagagatctgatggttttataagtgggagtttccctgcacaacctctctctctctctttgcctcctgccattcatgtaagacatgacttactcctctttgccttccaccatgattgtgaggcctccctag

SEQ ID NO: 498630 - DNA, 2603 bp, Homo sapiens
  misc_feature (2477)..(2477): n is a, c, g, or t
  misc_feature (2480)..(2481): n is a, c, g, or t
  misc_feature (2483)..(2483): n is a, c, g, or t
  misc_feature (2486)..(2486): n is a, c, g, or t
  misc_feature (2489)..(2489): n is a, c, g, or t
  misc_feature (2491)..(2492): n is a, c, g, or t
  misc_feature (2500)..(2500): n is a, c, g, or t
  misc_feature (2512)..(2512): n is a, c, g, or t
  misc_feature (2517)..(2517): n is a, c, g, or t
gcggccgcctcaccagaccgcgtgcggacgggctcgcgggcggggcggggcaagctcaggccacgcccctgggcggtgcgcgcgggcggtgggtaggccgggcaggctcacgtgatgcgggccccgcggcccgccatataaacccgcgcgcccgccaggcgctgcggccgtcccgggccgtgactcctcctttcccccgccccgcctccgttcggagagccggcgggcgggcgcctctcggccaggaagcgcctcttggacgcgtgtgaccgatgcccagaagtggccttgggctggggatcaccatagcttttctagctacgctgatcacgcagtttctcgtgtataatggtgtctatcagtatacatccccagatttcctctatattcgttcttggctcccttgtatatttttctcaggaggcgtcacggtggggaacataggacgacagttagctatgggtgttcctgaaaagccccatagtgattgagtcttcaaaaccaccgattctgagagcaaggaagattttggaagaaaatctgactgtggattatgacaaagattatcttttttcttaagtaatctatttagatcgggctgactgtacaaatgactcctggaaaaaactcttcacctagtctagaatagggaggtggagaatgatgacttaccctgaagtcttcccttgactgcccgcactggcgcctgtctgtgccctggagcattctgcccaggctacgtgggttcaggcaggtggcagcttcccaagtattcgatttcattcatgtgattaaaacaagttgccatatttcaaagccttgaactaagactcaattaccaacccgcagttttgtgtcagtgcccaaaggaggtaggttgatggtgcttaacaaacatgaagtatggtgtaataggaataatatttatccaaaagatttttaaaaatagggctgtgtttaaaaaaaaaaacaaaacaagaaaagcagcagtgattatagagaggtcacactctaagtggggtcgcggcgtggccacgcttcacggtcacgctcgtccgtcctgcagtggcgtgtttacatggtcacacgtgtgtgtatcaccagtgggtcaactgcttgtcattcctcccgtggcagtttgtgtagacaatcttactgagcaaaaggcaatgaaaagtcttggttcccacactgcgatatattggaattttcacctcagtttatgaagtttatttcgaaatccatagtcatctaagaatgaatacctgtctgccatgtatttcaatcttagtgagccaaaattgtttgtttgttactacagaatagagatgactgttttttgccacagccctatggaatttgcaatctgtgattgccttgtaaaaaggagagtgcatatggcactgcattaaacgtgtggtgtttctagtcaatgatattggtgagcacaatgtattcatttaatggcatagaccataccagacctaatttgcaagtattgggtcttaaacttcaagtgcaatgtatatgaaaaccaatctgagccttgtatctcttaaatatttattttttttaacgtgtgagatgttcgagagaaggttctccattcatttcagtgctgcctggaggaaactcggcaatgatttctttcagttgtgaagttcctttcgtgttacaccctccactgaaccctcaaccttcgaaatactccagttttgtgggtttggtcatttttacttataaatttacctttttgtattttgcaatttacatgtgtttggtttgttttaaattctgtgaaagtggcttgattaaaagactccttttaaatggaagccaccagtcagcagaatggaagcttagaggaacttgcctgtgagcgctggtctttgtgtttggttttgtgatgtaacgatctttgctggggttttttgctttgttttgagggaaatgtcttggagtaaattttaagttcctggagttaatttgttttacaggaattttgttttttaaaaaaataggatcattctgaactttggaatgacccccttatatattttctgaaaatgaaaacagttacatgaaaaaaatttccaatgaagatgtcagcattttatgaaaaaccagaagttattagatgaaagcagcgagtgaatctttaaaacagacttgatcacgcacacacaataagtctttctctccgaaaccggaagtaaatctatatctgttagaaataatgtagccaaaagaatgtaaatttgaggatttttttgccaatagtttatagaaaatatatgaaccaaagtgatttgagtttgtaaaaatgtaaaatagtatgaacaaaatttgcactctaccagatttgaacatctagtgaggttcacattcatactaagttttcaacattgtgttctttttgcattcattttttacttttattaaaggttcaaaaccaaaaaaaaaaaaaaaaaaaaaanatnntntgnggngnntcgggccngaaaaagttttnaaccnttcgttggggcggggccccagtggttgtgcacccgggccaaggtgttcccaaggaaaaccccggccgaaaatggggtggggttccc

SEQ ID NO: 498631 - DNA, 3225 bp, Homo sapiens
  misc_feature (3099)..(3099): n is a, c, g, or t
  misc_feature (3102)..(3103): n is a, c, g, or t
  misc_feature (3105)..(3105): n is a, c, g, or t
  misc_feature (3108)..(3108): n is a, c, g, or t
  misc_feature (3111)..(3111): n is a, c, g, or t
  misc_feature (3113)..(3114): n is a, c, g, or t
  misc_feature (3122)..(3122): n is a, c, g, or t
  misc_feature (3134)..(3134): n is a, c, g, or t
  misc_feature (3139)..(3139): n is a, c, g, or t
gcggccgcctcaccagaccgcgtgcggacgggctcgcgggcggggcggggcaagctcaggccacgcccctgggcggtgcgcgcgggcggtgggtaggccgggcaggctcacgtgatgcgggccccgcggcccgccatataaacccgcgcgcccgccaggcgctgcggccgtcccgggccgtgactcctcctttcccccgccccgcctccgttcggagagccggcgggcgggcgcctctcggccaggtacgcggccggctgggataggggtcgcgggcgggctttggtcgcgcagcagccggtcctccccggaggtaggcgggcgcgggccctgttgggtctttgggacgcgggtcccgctggggccggggatgctgctcgctgtgagcgcgggtcccgtccgccgctggccccgggcgggcgcacgggggtctaaccttggggggcggcgctgccgcctggcccgggtgccggggttcgcgtcccgcggggccttcctcgctctttgtctcttctgagtgaacttgatgacccccttcttccaggaagcgcctcttggacgcgtgtgaccgatgcccagattgcacgaccacttctggagctgctcctgtgcgcacagcgcgaggcgccgaggccccccgcgagccagcgccgcggggctggcggccaaggttggggagatgatcaacgtttccgtgtccgggccctccctgctggcggcccacggtgccccggacgctgaccccgcgcccaggggccgcagtgctgcgatgagcggccccgagcccggcagcccctaccccaacacctggcatcatcgcctgttgcagaggagcctcgtgctcttctcggttggggtggtcctagccctggtgctcaacctgctgcagatccagaggaatgtcactctcttccccgaggaggtgatcgccaccatcttttcctccgcctggtgggtccctccctgctgcgggacagcagctggtatacatccccagatttcctctatattcgttcttggctcccttgtatatttttctcaggaggcgtcacggtggggaacataggacgacagttagctatgggtgttcctgaaaagccccatagtgattgagtcttcaaaaccaccgattctgagagcaaggaagattttggaagaaaatctgactgtggattatgacaaagattatcttttttcttaagtaatctatttagatcgggctgactgtacaaatgactcctggaaaaaactcttcacctagtctagaatagggaggtggagaatgatgacttaccctgaagtcttcccttgactgcccgcactggcgcctgtctgtgccctggagcattctgcccaggctacgtgggttcaggcaggtggcagcttcccaagtattcgatttcattcatgtgattaaaacaagttgccatatttcaaagccttgaactaagactcaattaccaacccgcagttttgtgtcagtgcccaaaggaggtaggttgatggtgcttaacaaacatgaagtatggtgtaataggaataatatttatccaaaagatttttaaaaatagggctgtgtttaaaaaaaaaaacaaaacaagaaaagcagcagtgattatagagaggtcacactctaagtggggtcgcggcgtggccacgcttcacggtcacgctcgtccgtcctgcagtggcgtgtttacatggtcacacgtgtgtgtatcaccagtgggtcaactgcttgtcattcctcccgtggcagtttgtgtagacaatcttactgagcaaaaggcaatgaaaagtcttggttcccacactgcgatatattggaattttcacctcagtttatgaagtttatttcgaaatccatagtcatctaagaatgaatacctgtctgccatgtatttcaatcttagtgagccaaaattgtttgtttgttactacagaatagagatgactgttttttgccacagccctatggaatttgcaatctgtgattgccttgtaaaaaggagagtgcatatggcactgcattaaacgtgtggtgtttctagtcaatgatattggtgagcacaatgtattcatttaatggcatagaccataccagacctaatttgcaagtattgggtcttaaacttcaagtgcaatgtatatgaaaaccaatctgagccttgtatctcttaaatatttattttttttaacgtgtgagatgttcgagagaaggttctccattcatttcagtgctgcctggaggaaactcggcaatgatttctttcagttgtgaagttcctttcgtgttacaccctccactgaaccctcaaccttcgaaatactccagttttgtgggtttggtcatttttacttataaatttacctttttgtattttgcaatttacatgtgtttggtttgttttaaattctgtgaaagtggcttgattaaaagactccttttaaatggaagccaccagtcagcagaatggaagcttagaggaacttgcctgtgagcgctggtctttgtgtttggttttgtgatgtaacgatctttgctggggttttttgctttgttttgagggaaatgtcttggagtaaattttaagttcctggagttaatttgttttacaggaattttgttttttaaaaaaataggatcattctgaactttggaatgacccccttatatattttctgaaaatgaaaacagttacatgaaaaaaatttccaatgaagatgtcagcattttatgaaaaaccagaagttattagatgaaagcagcgagtgaatctttaaaacagacttgatcacgcacacacaataagtctttctctccgaaaccggaagtaaatctatatctgttagaaataatgtagccaaaagaatgtaaatttgaggatttttttgccaatagtttatagaaaatatatgaaccaaagtgatttgagtttgtaaaaatgtaaaatagtatgaacaaaatttgcactctaccagatttgaacatctagtgaggttcacattcatactaagttttcaacattgtgttctttttgcattcattttttacttttattaaaggttcaaaaccaaaaaaaaaaaaaaaaaaaaaanatnntntgnggngnntcgggccngaaaaagttttnaaccnttcgttggggcggggccccagtggttgtgcacccgggccaaggtgttcccaaggaaaaccccggccgaaaatggggtggggttccc

SEQ ID NO: 498632 - DNA, 2449 bp, Homo sapiens
  misc_feature (80)..(80): n is a, c, g, or t
  misc_feature (123)..(123): n is a, c, g, or t
  misc_feature (262)..(262): n is a, c, g, or t
  misc_feature (2323)..(2323): n is a, c, g, or t
  misc_feature (2326)..(2327): n is a, c, g, or t
  misc_feature (2329)..(2329): n is a, c, g, or t
  misc_feature (2332)..(2332): n is a, c, g, or t
  misc_feature (2335)..(2335): n is a, c, g, or t
  misc_feature (2337)..(2338): n is a, c, g, or t
  misc_feature (2346)..(2346): n is a, c, g, or t
  misc_feature (2358)..(2358): n is a, c, g, or t
  misc_feature (2363)..(2363): n is a, c, g, or t
cacttacataacgggctttatataagggcctcagcagcgtaatttcacctgaggcagagaattatcctaattttgcaggngagagctgtggctcacggggccagagccatgaagacggcgcangggagctgggagagctggcctcggtctccagttctctgcacatgtcccacctctcaatcttgttgcttcagtcaaagaaagtgtcaatatttcccatgttaggacctacttaattggtaattaaaatatttatacattnagtgctaattttctctttccttttttttttcctttctacacatagggtgttcctgaaaagccccatagtgattgagtcttcaaaaccaccgattctgagagcaaggaagattttggaagaaaatctgactgtggattatgacaaagattatcttttttcttaagtaatctatttagatcgggctgactgtacaaatgactcctggaaaaaactcttcacctagtctagaatagggaggtggagaatgatgacttaccctgaagtcttcccttgactgcccgcactggcgcctgtctgtgccctggagcattctgcccaggctacgtgggttcaggcaggtggcagcttcccaagtattcgatttcattcatgtgattaaaacaagttgccatatttcaaagccttgaactaagactcaattaccaacccgcagttttgtgtcagtgcccaaaggaggtaggttgatggtgcttaacaaacatgaagtatggtgtaataggaataatatttatccaaaagatttttaaaaatagggctgtgtttaaaaaaaaaaacaaaacaagaaaagcagcagtgattatagagaggtcacactctaagtggggtcgcggcgtggccacgcttcacggtcacgctcgtccgtcctgcagtggcgtgtttacatggtcacacgtgtgtgtatcaccagtgggtcaactgcttgtcattcctcccgtggcagtttgtgtagacaatcttactgagcaaaaggcaatgaaaagtcttggttcccacactgcgatatattggaattttcacctcagtttatgaagtttatttcgaaatccatagtcatctaagaatgaatacctgtctgccatgtatttcaatcttagtgagccaaaattgtttgtttgttactacagaatagagatgactgttttttgccacagccctatggaatttgcaatctgtgattgccttgtaaaaaggagagtgcatatggcactgcattaaacgtgtggtgtttctagtcaatgatattggtgagcacaatgtattcatttaatggcatagaccataccagacctaatttgcaagtattgggtcttaaacttcaagtgcaatgtatatgaaaaccaatctgagccttgtatctcttaaatatttattttttttaacgtgtgagatgttcgagagaaggttctccattcatttcagtgctgcctggaggaaactcggcaatgatttctttcagttgtgaagttcctttcgtgttacaccctccactgaaccctcaaccttcgaaatactccagttttgtgggtttggtcatttttacttataaatttacctttttgtattttgcaatttacatgtgtttggtttgttttaaattctgtgaaagtggcttgattaaaagactccttttaaatggaagccaccagtcagcagaatggaagcttagaggaacttgcctgtgagcgctggtctttgtgtttggttttgtgatgtaacgatctttgctggggttttttgctttgttttgagggaaatgtcttggagtaaattttaagttcctggagttaatttgttttacaggaattttgttttttaaaaaaataggatcattctgaactttggaatgacccccttatatattttctgaaaatgaaaacagttacatgaaaaaaatttccaatgaagatgtcagcattttatgaaaaaccagaagttattagatgaaagcagcgagtgaatctttaaaacagacttgatcacgcacacacaataagtctttctctccgaaaccggaagtaaatctatatctgttagaaataatgtagccaaaagaatgtaaatttgaggatttttttgccaatagtttatagaaaatatatgaaccaaagtgatttgagtttgtaaaaatgtaaaatagtatgaacaaaatttgcactctaccagatttgaacatctagtgaggttcacattcatactaagttttcaacattgtgttctttttgcattcattttttacttttattaaaggttcaaaaccaaaaaaaaaaaaaaaaaaaaaanatnntntgnggngnntcgggccngaaaaagttttnaaccnttcgttggggcggggccccagtggttgtgcacccgggccaaggtgttcccaaggaaaaccccggccgaaaatggggtggggttccc

SEQ ID NO: 498633 - DNA, 1591 bp, Homo sapiens
gcggccgcctcaccagaccgcgtgcggacgggctcgcgggcggggcggggcaagctcaggccacgcccctgggcggtgcgcgcgggcggtgggtaggccgggcaggctcacgtgatgcgggccccgcggcccgccatataaacccgcgcgcccgccaggcgctgcggccgtcccgggccgtgactcctcctttcccccgccccgcctccgttcggagagccggcgggcgggcgcctctcggccaggaagcgcctcttggacgcgtgtgaccgatgcccagattgcacgaccacttctggagctgctcctgtgcgcacagcgcgaggcgccgaggccccccgcgagccagcgccgcggggctggcggccaaggttggggagatgatcaacgtttccgtgtccgggccctccctgctggcggcccacggtgccccggacgctgaccccgcgcccaggggccgcagtgctgcgatgagcggccccgagcccggcagcccctaccccaacacctggcatcatcgcctgttgcagaggagcctcgtgctcttctcggttggggtggtcctagccctggtgctcaacctgctgcagatccagaggaatgtcactctcttccccgaggaggtgatcgccaccatcttttcctccgcctggtgggtccctccctgctgcgggacagcagctgctgttgttggcctactgtacccctgtatcgacagtcacctcggagaaccccacaaatttaagagagaatgggccagtgtcatgcgctgcatagcagtttttgttggcattaaccacgccagtgctaaattggattttgccaataatgtccagctgtccttgactttagcagccctatctttgggcctttggtggacatttgatcgttccagaagtggccttgggctggggatcaccatagcttttctagctacgctgatcacgcagtttctcgtgtataatggtgtctatcagtaagtgtgtgttttcaaatattggctttggcaagcttacttaactttcattaaaacatccactaagcttagatatttgcatattttatttgttattatatagaatgatacagatttaggcatgaaattctcaaaaatgctgatatccataacttaatgtaacgcaaaggaaaagcaagtagtagcagttacaaccaaacaaatatgaacattcgtaacattggatggttgatatgcgttctgcaatatccccactacagagaatctgtgatgtagaattgagccaggtgacattgactgctaaggtcacagtttcttttctcgctccaggtatacatccccagatttcctctatattcgttcttggctcccttgtatatttttctcaggaggcgtcacggtggggaacataggacgacagttagctatggtaagtgacatgcatccatttaatcttctacacattcgccgtcatctttacccttgatccgactgacttgtccttgattcccttccacttggcgtacatatattctggttcagaattccagtgacagtacctgtgaaaagctatatgaaacactacgtctgagtacccgcaatccttgaaactaa

SEQ ID NO: 498634 - DNA, 187 bp, Homo sapiens
cagaaaatcactcacagacatccccctgcctcagaaaatcactcacagtcatccccctgcctcagaaaatcactcacagtcatccccctgcctcagaaaatcactcactctcatcctcctgcctcagaaaatcactcacaatcatccccctgcgtcagaaaatcactcactgtcatcccgtcgacgc

SEQ ID NO: 498635 - DNA, 1104 bp, Homo sapiens
  misc_feature (978)..(978): n is a, c, g, or t
  misc_feature (981)..(982): n is a, c, g, or t
  misc_feature (984)..(984): n is a, c, g, or t
  misc_feature (987)..(987): n is a, c, g, or t
  misc_feature (990)..(990): n is a, c, g, or t
  misc_feature (992)..(993): n is a, c, g, or t
  misc_feature (1001)..(1001): n is a, c, g, or t
  misc_feature (1013)..(1013): n is a, c, g, or t
  misc_feature (1018)..(1018): n is a, c, g, or t
ccccgggctgcaggaattcgggcacgagatgaaaaccaatctgagccttgtatctcttaaatatttattttttttaacgtgtgagatgttcgagagaaggttctccattcatttcagtgctgcctggaggaaactcggcaatgatttctttcagttgtgaagttcctttcgtgttacaccctccactgaaccctcaaccttcgaaatactccagttttgtgggtttggtcatttttacttataaatttacctttttgtattttgcaatttacatgtgtttggtttgttttaaattctgtgaaagtggcttgattaaaagactccttttaaatggaagccaccagtcagcagaatggaagcttagaggaacttgcctgtgagcgctggtctttgtgtttggttttgtgatgtaacgatctttgctggggttttttgctttgttttgagggaaatgtcttggagtaaattttaagttcctggagttaatttgttttacaggaattttgttttttaaaaaaataggatcattctgaactttggaatgacccccttatatattttctgaaaatgaaaacagttacatgaaaaaaatttccaatgaagatgtcagcattttatgaaaaaccagaagttattagatgaaagcagcgagtgaatctttaaaacagacttgatcacgcacacacaataagtctttctctccgaaaccggaagtaaatctatatctgttagaaataatgtagccaaaagaatgtaaatttgaggatttttttgccaatagtttatagaaaatatatgaaccaaagtgatttgagtttgtaaaaatgtaaaatagtatgaacaaaatttgcactctaccagatttgaacatctagtgaggttcacattcatactaagttttcaacattgtgttctttttgcattcattttttacttttattaaaggttcaaaaccaaaaaaaaaaaaaaaaaaaaaanatnntntgnggngnntcgggccngaaaaagttttnaaccnttcgttggggcggggccccagtggttgtgcacccgggccaaggtgttcccaaggaaaaccccggccgaaaatggggtggggttccc

SEQ ID NO: 498636 - DNA, 833 bp, Homo sapiens
gcggccgcctcaccagaccgcgtgcggacgggctcgcgggcggggcggggcaagctcaggccacgcccctgggcggtgcgcgcgggcggtgggtaggccgggcaggctcacgtgatgcgggccccgcggcccgccatataaacccgcgcgcccgccaggcgctgcggccgtcccgggccgtgactcctcctttcccccgccccgcctccgttcggagagccggcgggcgggcgcctctcggccaggaagcgcctcttggacgcgtgtgaccgatgcccagattgcacgaccacttctggagctgctcctgtgcgcacagcgcgaggcgccgaggccccccgcgagccagcgccgcggggctggcggccaaggttggggagatgatcaacgtttccgtgtccgggccctccctgctggcggcccacggtgccccggacgctgaccccgcgcccaggggccgcagtgctgcgatgagcggccccgagcccggcagcccctaccccaacacctggcatcatcgcctgttgcagaggagcctcgtgctcttctcggttggggtggtcctagccctggtgctcaacctgctgcagatccagaggaatgtcactctcttccccgaggaggtgatcgccaccatcttttcctccgcctggtgggtccctccctgctgcgggacagcagctggtgagtacccctcctggttcttctggaagtaaaaagggtgtcttttcggttgaaagtacttttcagcctataagaaacatgcatttgaaactggaactatccacagattgaaagtgtgcatctccagtcttgggatttagagaaatgaa

SEQ ID NO: 498637 - DNA, 220 bp, Homo sapiens
ctccgtgagactggtccagcttctcagcctggcattcaagttcctcctgaccgtctctgtgctcccctccatttccccatccagcctcggctgcttggagcagttcctgggcacacctcctatctgccctgtcctagatgccccaggggggtggcatggctccctccccacgatctccaaggctctcagcccctgggggcagacaaatcccaccctctgg

SEQ ID NO: 498638 - DNA, 247 bp, Homo sapiens
  misc_feature (65)..(65): n is a, c, g, or t
atatatatagtgtgtatatatattgtggatatatatatagcgggtatatgtagtggatatatatngtatatatatattgtggatatacacacacacacaatagctgggcattgtagtgcatgcttgtagtcccagttactcaggaggctgaggtagaaggataacctgagcccagggagattgaggctgcagtgagccgtgatcagtcgctccattgccctccagcctgggcgacagagaccctgtc

SEQ ID NO: 498639 - DNA, 956 bp, Homo sapiens
gacctgggacgggtctgggcggtctcggtggtaggcatggggttcgctacacccattcacagcggcaggacgcacttgtcttagcagttctcgctgagcgcgctagttgccgttctacgctccggcactctgtgttcatcagcaagcgccctggcgtctgggtcctcagcatgcctagccttgggagcgtactcgtcgtcgtccacctcctcttcgccctcgtccttgcaccgaactcgccatcccagatcggcgcgccgtgctcaagcctgggggtcggcgaccccgggaaggaggggtttgagcgctccaggaggcctggagagctcggatctgcgagtccctggagcagcagcacacagtggcttctgggccggagggaggacacggtgtcacccgtggactggggtgtcgtatgcccgagttcgagctgctcagtgaccctgaggatgaacacttgtgttgccaacctgatgcaagctgttgcaaggagaagcctgggcccaggcgctggttgggtctccgagccctgcgcggcctgtggttgcctacgcctgttggtaaatgccggggtgggcaaaggcaatattggggcctggctacagcgagcgtgtggcctgtggggggcgcctggttggacggtctgccttggaggcagtggcagaagaccttgaccacactggggttggggcccagcttgtgaacttcgacccccaggccttggtggtccaaccttaccaaggttgagccctctgttgtctgggcttgggttcaaggactctttggccccaggacccggggtctggtttaggtctccgcaatattccctatccccccggggttacgcatatcctgggcgtggtagacccgggttccggtctcacagagaagctgcctcctcttgtgaatccctagcggggtgtgagacaccctggggggcgcgccgcccacagaga

SEQ ID NO: 498640 - DNA, 170 bp, Homo sapiens
  misc_feature (4)..(4): n is a, c, g, or t
gttnatcccctatgcttcacaacgcagagcagcaaagtcttctattttaaaataaaggagattactaccgctacttgtgctgaggttgccgctcgtcataccaagaaagggattgtcgatcagtcacaacatgcataccatgaagcttttgaaatcagcaaataatcgtg

SEQ ID NO: 498641 - DNA, 1065 bp, Homo sapiens
  misc_feature (16)..(16): n is a, c, g, or t
  misc_feature (197)..(197): n is a, c, g, or t
  misc_feature (237)..(237): n is a, c, g, or t
  misc_feature (239)..(239): n is a, c, g, or t
  misc_feature (247)..(247): n is a, c, g, or t
  misc_feature (273)..(273): n is a, c, g, or t
  misc_feature (275)..(275): n is a, c, g, or t
  misc_feature (841)..(841): n is a, c, g, or t
  misc_feature (849)..(849): n is a, c, g, or t
  misc_feature (877)..(877): n is a, c, g, or t
  misc_feature (903)..(903): n is a, c, g, or t
  misc_feature (945)..(945): n is a, c, g, or t
  misc_feature (949)..(949): n is a, c, g, or t
  misc_feature (980)..(980): n is a, c, g, or t
  misc_feature (1033)..(1033): n is a, c, g, or t
gccgcggcgcccgccncacccgcgcgccgccgccgcgccggcccgcgccgcgcgcgccgcgccgcgccacccacgccaccccacccccactagctcgcgcgcgccctctcacgctcgccctcgctcacgcacccccacgctcccacgcccacccccacgccctcgcgcgcgcgcccgcacacgcgctcgcacgcgcncgcgcgctcgcacacgcgcacgcgcgcgtgctgtcgcgcncncgcgcgcncgcgcgctcgcgcgcgcgcgcgcgcncnctctctccacacccactctcacccgcacacgcgctcactctccccgcgtacgcaccccccccacacgcgcgcacccacacccccactccccctcaccctctctcactcgcccacccacaccacacaccccctcgcgcacactccctcgccctcgcccgcacacactctcacactcaccctcccacccacacacactctccccccccccccctccgctcacgccacacacccccccgcgccacacacacacccacactcccacacccaccccctctcgcccacccacaccctcacccacgccacacacgcccacacacaccccacgcccgcaccctccctcgcccacaccacactccctcccgcccactctcactcactctcaccctctcccacccactcccctcgctccacccactccccctcactcgccccccttccaccgcccccccccttccgcgcaacccgccccgcccccccaccccccgccccccccccccccctttgcatattcactgtgaaactttgcatttcaacaaagcaactcacttcagcatttcaattcatgnacctcatnacaagcactcaatgcatcactgcctgtnctcgcaattgcaagcaaagggaaggncaatacattggcattatcacaaactatgccccatgcaaatgnactncatggcaggcaagctgcacagcagcaatacnccacgcccttgcgcccagcatgcattgctgcgcatttatgcaaaaaccccttntaaaagcaagcatgcatggcaagcaatttgct

SEQ ID NO: 498642 - DNA, 539 bp, Homo sapiens
  misc_feature (6)..(6): n is a, c, g, or t
  misc_feature (67)..(68): n is a, c, g, or t
  misc_feature (74)..(74): n is a, c, g, or t
  misc_feature (76)..(76): n is a, c, g, or t
  misc_feature (82)..(82): n is a, c, g, or t
  misc_feature (87)..(87): n is a, c, g, or t
  misc_feature (89)..(89): n is a, c, g, or t
  misc_feature (336)..(336): n is a, c, g, or t
  misc_feature (345)..(345): n is a, c, g, or t
  misc_feature (449)..(449): n is a, c, g, or t
atctantgaatactcctcctcctctaacgggtatgctaatgaggacaaatggggagcaggaggctgnnctgagntngacgangaagngnaaaggtggggaggaagaggaggaggaagaagaaggtgatggtgaggaagaggatggagatgaagatgaggaagctgagtcagctacgggcaagcgggcagctgaagatgatgaggatgacgatgtcgataccaagaagcagaagaccgacgaggatgactagactttcaaaaaaaaaaaaaaaaaaaaaaaaaaaaaagcggccgctcgaattcgcggccgctcgacgtcgacgcgcagaatttccngggcgtccnggggctgcgagaagacgacagaaggggggacgtccagatcggtgacatcgtcacagtgggcgatgccggcctctgagcaagacatgcgcttcaacgtgctcaangtcaccaaggctgccggcaccaagaagcagtttccagaagttctgaggctggacatcggcccgctccccacaatgtgtttttttctcctt

SEQ ID NO: 498643 - DNA, 991 bp, Homo sapiens
ctctagactgttccaggctgcctgcggattaaagtgggggtgactgtaaaaaataaaaaaaaaaaaaaaaaaaaaaaaaaaaaaaaaaaaaaaaaaaaaaaaaaaaaaaaaaaaaaaaaaaaaaaaaaaaaaaaaaaaaaaaaagaaaaaaaaaaaaaaaacaaaaaaaaaaaaaaaaaagaaaaaaaaaaaaaaaaaaaaaaaaagaaaaaaaaaaaaacaaaagcgcgccgcccggcgcgacgcagatacaccacagagggcagcccaaaacacccacacaacgcgggtgtgtgttaagtctcacgtggaagaggagcgggccataacagataggagaggtaatgatgtatataattaggagcagagacggtagggtgagggacgtagagcagatagctgagcagagacagagaggagagagaggcgcgagaggcaggggaaagaagagaagcgatggcacgttgtctagtcgggtgatcgaagcgaaggaggcaggagcagcagggtcgcggagaggaggaggaaagaggcagcggagcgaaagagagagagagggaaatctggggcgggagcgagaggagtgaaagagagcaggagagagagcgggacaagtgggtgggagaataggcgagaagcgccggagaccgagcggatgaagtgagcaagtgagcggggcgaagagaggatcgtcacaaggacggacgagcggcgtcgcgcggacgcagtggagcacggcgaagcggccacaggagcgataccgaagagggagacagaaacgtagccaggaagcactacgaacggcacgacgagacagcaggcggcgagccgaaagcgcagcagcactagtgatacgacaagagccaggaagacatagaccgatcgaccaaccgccgatctgcagagcgctaagcgctagcggcgagaaggacagaagccagcacagaaaccaaagcgacagcgccgcagagacgaaacagcgtaaggaaac

SEQ ID NO: 498644 - DNA, 386 bp, Homo sapiens
tatgctgtcagagttcccgaatctcgagagtgtgcaactgtagcagggaacactgaagattttaggtcaaccacgagaacctaggaagagatactggatgtgttcctgtaaggacaccagtcatatgggatggaggcacactctgtgtccagatatgacctcactttgaacgttaactaatttctacttggcaatgggccctaattttcaacaaaggtgaaccttttggcagggacagggtgttagcacttcaactatatctttctattttggggttggggggtgagacacatatttaaccacataacaccataccaacacaagcttttcacataatggcctatcttctggcctcaccctatatgcacaactgtgtcgagaattcg

SEQ ID NO: 498645 - DNA, 187 bp, Homo sapiens
gagcttaagaaaaagaaaaaaaaagagaaaagggatgctaaaaaaaaattaaagaacacatgattttccttcaaattcctagggattgtctctctctgtcgcccaggctggagtgcagtggtgggatctcggctcactgcaacctccacctcccaggttcaagcaattctcccgtctcagccttccg

SEQ ID NO: 498646 - DNA, 368 bp, Homo sapiens
  misc_feature (6)..(6): n is a, c, g, or t
  misc_feature (67)..(68): n is a, c, g, or t
  misc_feature (74)..(74): n is a, c, g, or t
  misc_feature (76)..(76): n is a, c, g, or t
  misc_feature (82)..(82): n is a, c, g, or t
  misc_feature (87)..(87): n is a, c, g, or t
  misc_feature (89)..(89): n is a, c, g, or t
  misc_feature (239)..(239): n is a, c, g, or t
  misc_feature (241)..(241): n is a, c, g, or t
  misc_feature (248)..(248): n is a, c, g, or t
  misc_feature (251)..(251): n is a, c, g, or t
  misc_feature (333)..(333): n is a, c, g, or t
atctantgaatactcctcctcctctaacgggtatgctaatgaggacaaatggggagcaggaggctgnnctgagntngacgangaagngnaaaggtggggaggaagaggaggaggaagaagaaggtgatggtgaggaagaggatggagatgaagatgaggaagctgagtcagctacgggcaagcgggcagctgaagatgatgaggatgacgatgtcgataccaagaagcaggggcgtctntnccatttnttncctcttccacaacttccttcttctcctttaagtccttggtggtgatttcggagctggtgtcctcgtgccgaattcggcaggncaagcgtgcccccacgctggaagtaactccgcacg

SEQ ID NO: 498647 - DNA, 93 bp, Homo sapiens
  misc_feature (38)..(38): n is a, c, g, or t
  misc_feature (72)..(72): n is a, c, g, or t
ggagtccgtaggggaggtgatggccagccaagacgatnccactcggcaacccaacagttttccaaccacccngggtggaactaatagaaaaga

SEQ ID NO: 498648 - DNA, 1513 bp, Homo sapiens
ttttaatagaatgatttttattatttgaagccgctgaggttaagtggcaagagataaacagacatacaacccctctctggaaaggatgaggaaatctgcatcctcaaagggaaaagggaggcccacctgactgcagtgtggaagctcggtgtaaagggagggcatgagaggactggagaggtgccaggtgtggaccatcctgggacaccagcctggtcactttcctaggaccgctcaatgccttctcctgtcagtgtcgcaccccactgggttcatccttccactttcacacttggggcgcggggaagggctgaatgcaggcaccactggtcacgagggcgtgactgggcaattcctccttcggcgggcgcccacctcctggcacccgtggcacagctccgggaacggctgcgggcccagccgctgcttccccgatagcgccgccgcagttccccggagacagaagtagagccggaccgccggaaaccgtagatccggggaggtcggggccgcggtgaactccagttcaccaggacaggaagtgacagcggaacgccggaaaccgcagatccacggaggtcagggccgcggagagctgtagttccccggaaccggaagtgatggcggacctccggaaaccgtagattccgggcggtcggagccgccgggagctgtagttctcccgcggctcagagaagtaggcagagagcggacctggcggccgggcagcatggcggggctggagctcttgtcggaccaggctaccgggtggacgggcggcgcgccggggagctgcgcaagatccaggcgcggatgggcgtgttcgcgcaggctgacggctcggcctacattgagcagggcaacaccaaggcactggctgtggtctacggcccgcacgagatccggggctcccgggctcgagccctgccggacagggccctagtgaactgtcaatatagttcagcgaccttcagcacaggtgagcgcaagcgacggccacatggggaccgtaagtcctgtgagatgggcctgcagctccgccagactttcgaagcagccatcctcacacagctgcacccacgctcccagattgatatctatgtgcaggtgctacaggcagatggtgggacctatgcagcttgtgtgaatgcagccacgctggcagtgctggatgccgggatacccatgagagactttgtgtgtgcgtgctcagctggcttcgtggacggcacagccctggcggacctcagccatgtggaggaagcagctggtggcccccagctggccctggccctgctgccagcctcaggacagattgcgctgcttgagatggatgcccggctgcacgaggaccacctggagcgggtgttggaggctgctgcccaggctgcccgagatgtgcacaccctcttagatcgagtggtccggcagcatgtgcgtgaggcctctatcttgctgggggactgaccacccagccacccatgtccagaataaaaccctcctctgcccacac

SEQ ID NO: 498649 - DNA, 222 bp, Homo sapiens
catagtatgaccttgtcttctacaaaaaaaaattagccattagccaggcgcagtggtcacgcctgtaatcccagcactttgggaggccaaggcaggtggatcacctgaggtcaggagttcgaggccatcctggccaacatggtgaacccacatctctattaaaaatatgaaaattagccgggcatggtggcgtgcacttgtgaatcccagctattcaggaag

SEQ ID NO: 498650 - DNA, 1623 bp, Homo sapiens
ttttaatagaatgatttttattatttgaagccgctgaggttaagtggcaagagataaacagacatacaacccctctctggaaaggatgaggaaatctgcatcctcaaagggaaaagggaggcccacctgactgcagtgtggaagctcggtgtaaagggagggcatgagaggactggagaggtgccaggtgtggaccatcctgggacaccagcctggtcactttcctaggaccgctcaatgccttctcctgtcagtgtcgcaccccactgggttcatccttccactttcacacttggggcgcggggaagggctgaatgcaggcaccactggtcacgagggcgtgactgggcaattcctccttcggcgggcgcccacctcctggcacccgtggcacagctccgggaacggctgcgggcccagccgctgcttccccgatagcgccgccgcagttccccggagacagaagtagagccggaccgccggaaaccgtagatccggggaggtcggggccgcggtgaactccagttcaccaggacaggaagtgacagcggaacgccggaaaccgcagatccacggaggtcagggccgcggagagctgtagttccccggaaccggaagtgatggcggacctccggaaaccgtagattccgggcggtcggagccgccgggagctgtagttctcccgcggctcagagaagtaggcagagagcggacctggcggccgggcagcatggcggggctggagctcttgtcggaccaggctaccgggtggacgggcggcgcgccggggagctgcgcaagatccaggcgcggatgggcgtgttcgcgcaggctgacggctcggcctacattgagcagggcaacaccaaggcactggctgtggtctacggcccgcacgagatccggggctcccgggctcgagccctgccggacagggccctagtgaactgtcaatatagttcagcgaccttcagcacaggtgagcgcaagcgacggccacatggggaccgtaagtcctgtgagatgggcctgcagctccgccagactttcgaagcagccatcctcacacagctgcacccacgctcccagattgatatctatgtgcaggtgctacaggcagatggtgggacctatgcagcttgtgtgaatgcagccacgctggcagtgctggatgccgggatacccatgagagactttgtgtgtgcgtgctcagctggcttcgtggacggcacagccctggcggacctcagccatgtggaggaagcagctggtggcccccagctggccctggccctgctgccagcctcaggacagattgcgctgcttgagatggatgcccggctgcacgaggaccacctggagcgggtgttggaggctgctgcccaggctgcccgagatgtgcacaccctcttagatcgagtggtccggcagcatgtgcgtgaggcctctatcttgctgggggactgaccacccagccacccatgtccagaataaaaccctcctctgcccacaccaaaaaaaaaacaagaaaaccaagacaaagaaaaaaaacaaagagaagaggaacacgaggacacagaaaagaagaaaagagacgagagaggagaagagggagaagaagga

SEQ ID NO: 498651 - DNA, 371 bp, Homo sapiens
ccatccggatatctattgaacatagaagcatatgttatatgagtacaagaagctttctcctcgcacacgcttacatcagtactaataatatactgatattaacaatcataaacaaacaacactaagcgttattaattatatggttaacccaacacaggagtgcaccaaggaaagattcaaagaagtcaaaggaactcggcaaacacaaaccccgcctgtttaccaaaaaacatcacctctagcattactagtattagaggcaatgcctgcccagtgacaccagtttaacggccgcggtattctgaccgtgcaaaggtagcataatcacttgttctccaaataaggacttgtatgaatccgcaaggcaaaaa

SEQ ID NO: 498652 - DNA, 442 bp, Homo sapiens
gagaacatggaatatttggtttcctgttcctatgttagtttgttaaggataatggcctccagccccatccatgttcctgcaaaggacatgatctttctttggcaaccactttttactgtcgccatagttcttccttttctagaatgtcatattggaatcatatagtatgtagccttttcagactggcttctttcacttaataatatgcaattaaggttcctccatgtcatttcatggcttaatagtgcatttatttttagcactgaataatactccattgtctagatgaatagtttatccattcacctattgaaagacttcttggtggtttccaagttttggcaattatgaataaagctgttgtaaacatctttgtgcaggtttttctatgggcatgtttttaattcatttgaataaataccaagagcttcagtgctggaaa

SEQ ID NO: 498653 - DNA, 1792 bp, Homo sapiens
ttttaatagaatgatttttattatttgaagccgctgaggttaagtggcaagagataaacagacatacaacccctctctggaaaggatgaggaaatctgcatcctcaaagggaaaagggaggcccacctgactgcagtgtggaagctcggtgtaaagggagggcatgagaggactggagaggtgccaggtgtggaccatcctgggacaccagcctggtcactttcctaggaccgctcaatgccttctcctgtcagtgtcgcaccccactgggttcatccttccactttcacacttggggcgcggggaagggctgaatgcaggcaccactggtcacgagggcgtgactgggcaattcctccttcggcgggcgcccacctcctggcacccgtggcacagctccgggaacggctgcgggcccagccgctgcttccccgatagcgccgccgcagttccccggagacagaagtagagccggaccgccggaaaccgtagatccggggaggtcggggccgcggtgaactccagttcaccaggacaggaagtgacagcggaacgccggaaaccgcagatccacggaggtcagggccgcggagagctgtagttccccggaaccggaagtgatggcggacctccggaaaccgtagattccgggcggtcggagccgccgggagctgtagttctcccgcggctcagagaagtaggcagagagcggacctgggctaccgggtggacgggcggcgcgccggggagctgcgcaagatccaggcgcggatgggcgtgttcgcgcaggctgacggctcggcctacattgagcagggcaacaccaaggcactggctgtggtctacggcccgcacgaggcgagtgggcgcgcgggatggggaatcgtgtggccgtgggagctgcggggcagccgggctgagcgctggctcggggacttgaggggcaacggccggcgcgcctcagtctacacagccgatgctcagcaccgcatctcactcggagtaaacgcaagtccttagtgtgctgcgcggtggtcctgcctttctcatcggcctctgtccctgcgccctccttcctctttgcggctcttcaacgtgctaggcactcccccactcgctccctctcctttcagctctactccgacgtcactccttcccagacgaccttattatccacgcatccggggctcccgggctcgagccctgccggacagggccctagtgaactgtcaatatagttcagcgaccttcagcacaggtgagcgcaagcgacggccacatggggaccgtaagtcctgtgagatgggcctgcagctccgccagactttcgaagcagccatcctcacacagctgcacccacgctcccagattgatatctatgtgcaggtgctacaggcagatggtgggacctatgcagcttgtgtgaatgcagccacgctggcagtgctggatgccgggatacccatgagagactttgtgtgtgcgtgctcagctggcttcgtggacggcacagccctggcggacctcagccatgtggaggaagcagctggtggcccccagctggccctggccctgctgccagcctcaggacagattgcgctgcttgagatggatgcccggctgcacgaggaccacctggagcgggtgttggaggctgctgcccaggctgcccgagatgtgcacaccctcttagatcgagtggtccggcagcatgtgcgtgaggcctctatcttgctgggggactgaccacccagccacccatgtccagaataaaaccctcctctgcccacac

SEQ ID NO: 498654 - DNA, 344 bp, Homo sapiens
caggatgcttctcagcatagcagccagaatgaccttgtaaaaatctttacatgagacatcactcctactgctcaaaagcatcagtggctttcgcacctctaacaataaaagccaaagtcctaatgatgatcaaaaaaattatgttatatgggcctctattacctatttgagcttatcttcttgttcacagtgctctagttcacaatggtctactggctgctcctccacatctctgatatggttccagattagggctgtttcaagtgttagcgggttccgcttggtgttgctctttccttttgctttcttaaagcgtttattcataagtcgccttttctgtgacg

SEQ ID NO: 498655 - DNA, 194 bp, Homo sapiens
tggaactgagaaaagtgaacaggaggaggaaaaggaagatcttgaaagggtggggtattgcctgctggagcagcctgaagcgaaactcaccgttgcagaaagagtacatgctggcaggatcattcacaagctgtttgtgacatcccagagggctgcagctatgactccaccagaggaggaattgaagagaatgg

SEQ ID NO: 498656 - DNA, 367 bp, Homo sapiens
  misc_feature (37)..(37): n is a, c, g, or t
  misc_feature (94)..(94): n is a, c, g, or t
tccaggtcagccagtctatgtaaaggttcctctggtnaactttgtagaaagttaaagtctgtactaaaaggttattatttatggaatctgtttnatgtggaaatagaatcgtggctggagctgacgttggcaatttaagacctgctaagtgagtgaacaaaatttgctaatatcaattaatgacctgcatgctttttctttaccctgactcattccttactggtaggatcagtcttttcagtatttgggttatggttcaatgagccagaaaagtaactttgtagtatcagaatgtcatccaactgtatatttactttattgtaaataatggtgaacagtggtcaataaatagttttatattccttta

SEQ ID NO: 498657 - DNA, 1834 bp, Homo sapiens
ttttaatagaatgatttttattatttgaagccgctgaggttaagtggcaagagataaacagacatacaacccctctctggaaaggatgaggaaatctgcatcctcaaagggaaaagggaggcccacctgactgcagtgtggaagctcggtgtaaagggagggcatgagaggactggagaggtgccaggtgtggaccatcctgggacaccagcctggtcactttcctaggaccgctcaatgccttctcctgtcagtgtcgcaccccactgggttcatccttccactttcacacttggggcgcggggaagggctgaatgcaggcaccactggtcacgagggcgtgactgggcaattcctccttcggcgggcgcccacctcctggcacccgtggcacagctccgggaacggctgcgggcccagccgctgcttccccgatagcgccgccgcagttccccggagacagaagtagagccggaccgccggaaaccgtagatccggggaggtcggggccgcggtgaactccagttcaccaggacaggaagtgacagcggaacgccggaaaccgcagatccacggaggtcagggccgcggagagctgtagttccccggaaccggaagtgatggcggacctccggaaaccgtagattccgggcggtcggagccgccgggagctgtagttctcccgcggctcagagaagtaggcagagagcggacctggcggccgggcagcatggcggggctggagctcttgtcggaccaggctaccgggtggacgggcggcgcgccggggagctgcgcaagatccaggcgcggatgggcgtgttcgcgcaggctgacggctcggcctacattgagcagggcaacaccaaggcactggctgtggtctacggcccgcacgaggcgagtgggcgcgcgggatggggaatcgtgtggccgtgggagctgcggggcagccgggctgagcgctggctcggggacttgaggggcaacggccggcgcgcctcagtctacacagccgatgctcagcaccgcatctcactcggagtaaacgcaagtccttagtgtgctgcgcggtggtcctgcctttctcatcggcctctgtccctgcgccctccttcctctttgcggctcttcaacgtgctaggcactcccccactcgctccctctcctttcagctctactccgacgtcactccttcccagacgaccttattatccacgcatccggggctcccgggctcgagccctgccggacagggccctagtgaactgtcaatatagttcagcgaccttcagcacaggtgagcgcaagcgacggccacatggggaccgtaagtcctgtgagatgggcctgcagctccgccagactttcgaagcagccatcctcacacagctgcacccacgctcccagattgatatctatgtgcaggtgctacaggcagatggtgggacctatgcagcttgtgtgaatgcagccacgctggcagtgctggatgccgggatacccatgagagactttgtgtgtgcgtgctcagctggcttcgtggacggcacagccctggcggacctcagccatgtggaggaagcagctggtggcccccagctggccctggccctgctgccagcctcaggacagattgcgctgcttgagatggatgcccggctgcacgaggaccacctggagcgggtgttggaggctgctgcccaggctgcccgagatgtgcacaccctcttagatcgagtggtccggcagcatgtgcgtgaggcctctatcttgctgggggactgaccacccagccacccatgtccagaataaaaccctcctctgcccacac

SEQ ID NO: 498658 - DNA, 147 bp, Homo sapiens
ccccccgcccctttgttcctcatgtccccatgtttctctgcctctgcgtcttagcacctttcttctggccaaagttttctgtaaattttctccttttttccttctttcttttttttttttttataaattaatttgctttccgttcca

SEQ ID NO: 498659 - DNA, 320 bp, Homo sapiens
cagcacactccaacaccgggattcgacacacagccaccgccatggagaccagttctcccaacaagctcatccgcctgtcatcggctttgttcctctgagggctgaaaagcgatgcaaacataatctgccgaacagagtccttggtttgctcctggaaataactgcacatcatttcaagacgctgaagctcctgaagggcattcagtctcttgggctgcgtgcgctcccttgggcacctggaacacgaactcctccagcagctccacggggcccttgtccacgatgggcagcggcgcgtctcagctggctcctgaagtaga

SEQ ID NO: 498660 - DNA, 970 bp, Homo sapiens
ttttaatagaatgatttttattatttgaagccgctgaggttaagtggcaagagataaacagacatacaacccctctctggaaaggatgaggaaatctgcatcctcaaagggaaaagggaggcccacctgactgcagtgtggaagctcggtgtaaagggagggcatgagaggactggagaggtgccaggtgtggaccatcctgggacaccagcctggtcactttcctaggaccgctcaatgccttctcctgtcagtgtcgcaccccactgggttcatccttccactttcacacttggggcgcggggaagggctgaatgcaggcaccactggtcacgagggcgtgactgggcaattcctccttcggcgggcgcccacctcctggcacccgtggcacagctccgggaacggctgcgggcccagccgctgcttccccgatagcgccgccgcagttccccggagacagaagtagagccggaccgccggaaaccgtagatccggggaggtcggggccgcggtgaactccagttcaccaggacaggaagtgacagcggaacgccggaaaccgcagatccacggaggtcagggccgcggagagctgtagttccccggaaccggaagtgatggcggacctccggaaaccgtagattccgggcggtcggagccgccgggagctgtagttctcccgcggctcagagaagtaggcagagagcggacctggcggccgggcagcatggcggggctggagctcttgtcggaccaggctaccgggtggacgggcggcgcgccggggagctgcgcaagatccaggcgcggatgggcgtgttcgcgcaggctgacggctcggcctacattgagcagggcaacaccaaggcactggctgtggtctacggcccgcacgagctgacggctcggcctacattgagcagggcaacaccaaggcactggctgtggtctacgggcccgcacgagg

SEQ ID NO: 498661 - DNA, 353 bp, Homo sapiens
atcacacccaggtatcactgtgctgtcctttgctgtgagatttagaaatgtagttaagagctatgtgaaaacagacaatattagtttaggtcgggaactcgagatattgtgatcaaatagttaacatcaggaagatcattaggctggcttcatagggaaacttggccagtgaccagcacatatatttagaacccttcctgttttatgtgtgtacctggttcaccgctcaggtcatacctgcctctgacaggtacagttgtttcttggaaatcctgcaacctagcagttttactaacttgattagcttgagctgacagactgttagtacagatatctggccacagctgatgggg

SEQ ID NO: 498662 - DNA, 494 bp, Homo sapiens
gtcggccaagtgtacgagatgcacgtatctgggtcggcctctacgccctgatcatcggcaccgcgctgtacctggcagctggttgccgctgatgctggtgggcctgcccagcctctatggcgcctggctcggttacctgtttggaatcagccaacacgtgggcctggccgaagatgtgctcgaccaccgcagtaactgccgcaccatctacatgaaccgcgtgctgcgctttatctacatgaacatgaactaccacctcgaacatcacatgtacccgatggtgccttaccacgcgctcagtcaactgcacgaagagatccgcagcgactgcccgccgccgtacgccaacttgtggcaggcctaccaggaaatcattccgacgatctggcgccagcgcagcgaccccggctatttcgtccaacgccccacccgtggcgagggagcttgctcccgctgggctgcgcagcaaccccaataacccttcagacctacag

SEQ ID NO: 498663 - DNA, 1745 bp, Homo sapiens
tatattttctctcctctttttgtggggaaaaccccaaaacaaaaaaatccatctctctccccccctctcttttttttcccagaaaaagggagttgttgcaaaaacaaaaggggggtgtggggggggggagatctcctctcaccaccatctctccgcgggtttataacccccaggtgtatcccccgtggggtgtgggcacctgagcggcctcttatggcgccaagagtcctctctctcgagagaggacaatataaaaaaaaagattataatagaggaagaggtcgtcttcctcttctacaagaaacagagatgaaacacctctctctctataccctctctcttctccccaaaatatcatccccaaactctctccctctcacgcgtgtgcgccactctcttaaacactcataaagagaagagaccacacggtgacaagtagaggtgtgagagagatatatccaccatctatctcacccacaacacaccacactactaatctcacccacacaccacacaccacaccacacaccacgagtctctctctcttatctttacacacacacacacaacatcgtgacgatataaactctctctctccccgcgagagagaagagagaagagaccacacacagtgcggacacacaccacacacacacacagagagacgctgtgagggcggtctcaaagagagaaggagagagagcgcggggagacacacacgtgctgagtgacacacaagcgggggaaacacacacactctccgcgagggagaaaacaaaacaaaggtgaggagtaccccaccctctactatgtagagcagctactaatctccccccaacaaaagctactctctcctactagaatagaccagcccccgcccgcgccaccactatttcatctccacaaaaaaaagagaggagaggccacacagcggtgggggccccctactaaggcgcagcgaccacctcagaagaggggagcaataaaagaggagaaaacaagaaggggccccccccccaagcggggagccccccaaagataacaaacataacgccatgcggcgtagtcggaacaaaacaaagcagtcactggtagcaggaccaacggaccagaccaacaacaacctggacagacacaccacacccctctacagagtagaagcagagcagcggcgacctcacacacacaccaaagtgagtggtgcgcccccccaccggatgcaccgctgggagcgaccagcaacagcagagaaccaacacccaagcagaaaatatgacaaggcacactcctcaccacaacaaaacaacaccgtgtgattagactgaaaacgatgcttactcctactccgacgaagacgagacggcaacgcccccacctacgccaggccgaactaaacacacacccgagacgcgctaccaccacaccgcgcccaaactaaccgacgagaacgagtaatgttctccggaccccccaccctcgctagcctcttcagggagagccgccggaccaaatctctccccgcgcacaacacactacctaaacacagaatcgaccgggcctcgacaacaccgcgtgagaggcgaggtccgacgtctccccccgccgcgcgtacaaacaaaggagctacccaaacgacggcggctacttcccttcccccacaacgatagagaacgaccctagcacccacccgaccgcagtacttccacaagcacaggtcccacctcactagagagtgcgactcccga

SEQ ID NO: 498664 - DNA, 789 bp, Homo sapiens
ccattgttggcgtggcttcctctgcggcgcgtggactcctccggggtgtatttccgggggacccttgtccagcgtggagtcggattgggccggatttttcccaggcctgttgtgtgtgatgtctgtgggagtctggctgcgctcatgaggacaagccaggctgttgttacacaaggctccctctgtttcgggactggtatctatagagtaacactggggtataggggccggggccacccaaatgtgtacacctgcggggccacccattcgtccaccccagtgtgcacgcctgcaggctggagactggaccgctgactgcaccagcgcccccagaacatacactgtgaactcaatctccagggctccaatccatgcctagaaaacctctcgcttcctcagcctccaaagtggtagctgggaggtagtaaggtggaggtacacatgggtggattcatacatgacccaacatgggggcaaaaggtattgaagacacagcctcccccagccagccccaagctgggccgaggcagcagatttgtgcatatctgccatcaccatgtctcataaggagcagcgggaacggagcattcaggggcctcctcagtgaaggtggtggggcatgccggatctgggctgtggggcccattgggccacgctcttgaggaagcccaggcatcggaggaccatggaaaacagacgggtctgagactgatattgttttaacagctcggcagggtggacattcagtggtaccttggatgagtatcagtttttgggccccttgcttaa

SEQ ID NO: 498665 - DNA, 1669 bp, Homo sapiens
agagaaggcagctgccgacacagtcttggctcccccgaagaagctccagctcatggctcaggatgccttccgagatgtgggcatcaggtacaggagcgacgtcacctcgatctcatctacaactttggctgccacctcacagatgactataggccaggcgttgaccctgcactatcagatcctgtgttggcccggcgccttcgggaaaaccggagtttggccatgagtcggctggatgaggtcatctccaaatatgcaatgttgcaagacaaaagtgaggagggcgagagaaaaaagagaagagctcggctccaaggcacctcttcccactctgcagacacccccgaagcctccttggattctggtgagggccctagtggaatggcatcccaggggtgcccttctgcctccagagctgagacagatgacgaagacgatgaggagagtgatgaggacagaggaggaggaggaggaagaagaagaggaggaggccacagattctgaagaggaggaggatctggaaccagatgcaggagggtcacggaggatgatgaagaggaggacgaacgaggaagaagcagcgagcaggtaaagatggagacacagagccccatgtcctcacatacagatctccaatgaaaagaacctggaacctggcaaacagatcagcagatcttcaggggagcagcaaaacaaaggacgcatagtgtcaccatcgttactgtcagaagaacccctggccccctccagcatagatgctgaaagcaatggagaacagcctgaggagctgaccctggaggaagaaagccctgtgtctcagctctttgagctagagattgaagctttgcccctggataccccttcctctgtggagacggacatttcctcttccaggaagcaatcagaggagcccttcaccactgtcttagagaatggagcaggcatggtctcttctacttccttcaatggaggcgtctctcctcacaactggggagattctggtcccccctgcaaaaaatctcggaaggagaagaagcaaacaggatcagggccattaggaaacagctatgtggaaaggcaaaggtcagtgcatgagaagaatgggaaaaagatatgtaccctgcccagcccaccttcccccttggcttccttggccccagttgctgattcctccacgagggtggactctcccagccatggcctggtgacccctgcaaaaaatctcggaaggagaagaagcaaacaggatcagggccattaggaaacagctatgtggaaaggcaaaggtcagtgcatgagaagaatgggaaaaagatatgtaccctgcccagcccaccttcccccttggcttccttggccccagttgctgattcctccacgagggtggactctcccagccatggcctggtgaccagctccctctgcatcccttctccagcccggctgtcccaaaccccccattcacagcctcctcggcctggtacttgcaagacaagtgtggccacacaatgcgatccagaagagatcatcgtgctctcagactctgattagctgcctccccttctccctgcctccagaatgttctgggataacatttggaggaaggtgggaagcagatgactgaggaagggatggactaagctaatccccttttggtggtgtttcttta

SEQ ID NO: 498666 - DNA, 186 bp, Homo sapiens
agcggaacggtatccgggtcttagtcgagacagcctgactctatagtgtaaccccgtctcttactagacatacaacaagttagccaggcgtggtagcccacgcctatagtcccagcctcctgagtagctggaactacaggcatgagccactgctcccggctgggattttgggatcttggactcgtg

SEQ ID NO: 498667 - DNA, 1005 bp, Homo sapiens
ggccgacgatccggctcgttttctcgcgctaccctcccggctgctcgggtgcctccgtgggtatttctcgttggctccacggtctggtcttcagtcacccgctgttcgtctccgagttcgcgactcgggacctggtgtccccggtgctgaataggcatgggcatccggaattgccgtttgccatggacgcacggactgcccagtccggtataaaccggtgtgcggattgggaggtgattgaacatgcctgtcgtctcataggacctgtgtcttgcatcgggtagcttatccccgcccatgggaccagcttccctaaagggcttggtttgtgcccactgaacggagtcatgagaacactcatgttgccagactatgcagacgcgtgtgcttgtagaccgcacatacgaggctggggctctggtgcggtaccatgaggctgcggcgaggcaaggattcatgaagtgcgtgctgatgtcccgctcctctggaactcgaggattgcccgagtggtaactatcgggactgatgtttacactcattcgataggcactgtgcttgagtttcagatggaaacacttccgcagtagaaggtggggcccagaatagctaacgcactcccttgattccaagggtgcccattgccactcgtgccttggacgaggtcaagcaagggcttccctgggcaactgctggaggccccccgggccggcacgctagccaatgatcgacgcatgtccggcgggaaacccagagagcacgggacatcctctccacacgggaccgccgcttgcgaaactcgcagtgtgcacgctccgaccacggggcgcgcccaccggtccgaacggccccagaacgccggtccgacgcgagcacgtggcacgcaaccctggtgcctgcgtcggcccccctgcccacgcacccatgagcaagcgcagggcgcacacaaaggaggccaggccgctcaaaagcgcacagcacccgacgccatcaaacacagtagaggcc

SEQ ID NO: 498668 - DNA, 240 bp, Homo sapiens
ccagaacagcagggtagccagaagagtgacacagaagctgtcatccctccttcggtcgtgtcatcactgggcgtgaaaacctggttggcacaaaaagagtttcagatcgttcccaaaaaaattcaggcacagatattgaaccaagggactgttgagataaacgagggaggctcagtgatgccctttggaaatcagtattggctggaggtttgaggattctccggcacaagggggttaccg

SEQ ID NO: 498669 - DNA, 1164 bp, Homo sapiens
agagaaggcagctgccgacacagtcttggctcccccgaagaagctccagctcatggctcaggatgccttccgagatgtgggcatcaggtacaggagcgacgtcacctcgatctcatctacaactttggctgccacctcacagatgactataggccaggcgttgaccctgcactatcagatcctgtgttggcccggcgccttcgggaaaaccggagtttggccatgagtcggctggatgaggtcatctccaaatatgcaatgttgcaagacaaaagtgaggagggcgagagaaaaaagagaagagctcggctccaaggcacctcttcccactctgcagacacccccgaagcctccttggattctggtgagggccctagtggaatggcatcccaggggtgcccttctgcctccagagctgagacagatgacgaagacgatgaggagagtgatgaggacagaggaggaggaggaggaagaagaagaggaggaggccacagattctgaagaggaggaggatctggaaccagatgcaggagggtcacggaggatgatgaagaggaggacgaacgaggaagaagcagcgagcaggtaaagatggagacacagagccccatgtcctcacatacagatctccaatgaaaagaacctggaacctggcaaacagatcagcagatcttcaggggagcagcaaaacaaaggacgcatagtgtcaccatcgttactgtcagaagaacccctggccccctccagcatagatgctgaaagcaatggagaacagcctgaggagctgaccctggaggaagaaagccctgtgtctcagctctttgagctagagattgaagctttgcccctggataccccttcctctgtggagacggacatttcctcttccaggaagcaatcagaggagcccttcaccactgtcttagagaatggagcaggcatggtctcttctacttccttcaatggaggcgtctctcctcacaactggggagattctggtcccccctgcaaaaaatctcggaaggagaagaagcaaacaggatcagggccattaggaaacagctatgtggaaaggcaaaggtcagtgcatgagaagaatgggaagcagatgactgaggaagggatggactaagctaatccccttttggtggtgtttcttta

SEQ ID NO: 498670 - DNA, 231 bp, Homo sapiens
cgcgccgtttggccagagaacaagcccatcatggtgcgtatctcggcaacagactgggccgaaggcggcaatacggcggacgacggggtggaaattgcccgcctgttcaagcaagccggtgccgatctgatcgacgtgtcctcgggtgaagtggtgctggagcagcagccaatttacggccgcatgtaccagacgccattctccgaccgtatccgtaacgaaggtaaaccc

SEQ ID NO: 498671 - DNA, 286 bp, Homo sapiens
  misc_feature (15)..(15): n is a, c, g, or t
  misc_feature (55)..(55): n is a, c, g, or t
  misc_feature (67)..(67): n is a, c, g, or t
tgtaagaaaaacccnaggtgcctaaaatccaagggcctgacccatacaggtaccnagtcacaatagncccagaggtggaagcaatcccaaatgtcctatgaatggatgaatgaataaaatgtgatatacagatacaatggagtattattcagcctttaaaaataaagaaattctggcacctgctaagtatacctggaggacattatgctgagtgaaataagcctatcacaaaatgacaaatactgtatgatttcatttatatgacataatgtggcacaataaaaat

SEQ ID NO: 498672 - DNA, 318 bp, Homo sapiens
tgtgggtagcacaacctagtcagttttgcaggtggtaaacgccattaccaagatagttgtaggtaagaagggcagatttattagagaaattgtgaaaatatgttgcagtgggcagctcagcagagaaggggctacctgcaaagaggcaagggctggaggaaagttttatagggtcctgctgaagggtgctacgtgtggaatgaggtcattgtgcccgcaggttgtttgtgattagctgtctctaacaattgttcatacaataattgttcattattgttctcaacttggggctctccccaacctggggacccttcctta

SEQ ID NO: 498673 - DNA, 1249 bp, Homo sapiens
caatgagttctcacagactaggatcactatcagagtctggtacacgagcgtagcatgggactcctgtgaacaggcagacaatccctactatactcagctcctctcatcgagctctcgagggtcccgaagcagtggaataaaggtcgcatcccgtataagcaatcttcatatagctctgaggagtccattcattactgatgttgagttcattaatgaaaaatagtagtcgtgatgccaccgctcgataacgagtagagaacgactgaacatcttcgatgaaacgatattagtgctagcttcaaatagtttctctatactcgaactactatactagctaagggctaatgtctatacacatcctattactttcatactctacgtttctaataattgcgcactatattacataaatggcaccattcccagacaaaatgattatgataggtgtcaagcacatgaagagacctggtgagtacagtggtgagccatacgagcgcccgcttgtaaaaatgccacaaagcctagtttcttcgagttgctgggactcagtacggaacccgagaggctggtggaatatctctctggaggtgatcgcagcagagaccgactgaggacttcagtccaatatcccttcggagggctcaaagtcacagcacagttagaacaaacaacactatgctttgtaaccagactctcaacacaaacacagaagtgattcagacactatagaatctctcaatacccggggggcctggatagtggccggggtaagcgaggaaagtccccttaggatttaaggtccctccacgaaaggctcttggacgtgctgcgttgtaagctcgccatagcatcgcgacaagggtccacgaagggttagtcgcaccgttcggaaaaaccattcaacctgcagttgcaagacggtttgggcaccgtcgttttggccaaggaatagttaagcctggtaaaaggtaacatttcgcttcgccgtccagttctggtgttccacaagttaccacattgttaccctcctagaggtgtacgggcacgccaggaaaaggcccgaaacgaaagttggtgccccaattggaacccgacaaacgattgcatatacgtagagaccgtaactatagactctcggacatcgttgcagccggccccggcaaaatttcgcaacaaggggcaagactcttccgaaagtatcgtacgttccctcgtggcgaacacagttaccttgtcaggccccaagtga

SEQ ID NO: 498674 - DNA, 352 bp, Homo sapiens
tccccccacccaaccgcccgggcccaggggttctttgagggggaaaggggaagggcccccattccccaacccccttttcccgggggttgggccttttctttaatccagtgggcccgccggttttcccgtttgaaaaggggccggtgggcccaccccatttattttggtttggttccttctttgggccccccgggttttccctttttggtttcgggttggttttttgtggggatttgtggggggttccctttttcccccgggaaccggttttgccttgtttcggtttttattccgcccccttttggggttttggcccctggggcccaagttttgggccggggccttggtccca

SEQ ID NO: 498675 - DNA, 107 bp, Homo sapiens
cgaggaggagaacttctaccagcagcagcagcagagcgagctgcagcccggcgccagcgaggatatctcgaaaaattcagctgctggccaccccggccctgccccta

SEQ ID NO: 498676 - DNA, 111 bp, Homo sapiens
tcgtgttaattctattagggtattgtgtaactcaattcagtacaattaaatacatgcaggttacttgcgaatcatatggagataagcacgtcacttccttgatataaatct

SEQ ID NO: 498677 - DNA, 1380 bp, Homo sapiens
agcggtggggcggggatgtgatgggggcgtggtcagatcctggggcggagatgtgaggggcggggtcatctcgctggagcggggatgtgatggggcggtgaggtcagcgtcacaggaggacgaagcgggtgaggggcgattggagtgcatcggcgggaattgcggacagatggcgggccggaggccgtcgtttggaagaacctggacggagatagacgtgctagaggcgtcactccgcagagagggtagagacgctaggagttgaggtcactggaatggggaccatgggtcactgtaagtcgtgcgatgcgaggtgctccgacatacgtccgaagacttccctgtgtgtgctcgctgagattacagttgtgcgcgagacctacgtggcctccatagactacgaaggctggaatcccagagtgcagcaaaaagtgcgtgcgctgtgtacacatgttaggctagatctgtgtggtggcgtgcaccagtgtctctacagcgaaagtgcgcttggaccgtacagtattcattggatgacatccagactcttctcacactgcgagggacagatatcaatctgagagactgagtgtagaaacgccagcaaaacacaaatgccagtgacagtgaacacagtctgccagtgcgagggagaatcccacctgtcagttgacaatccctttcaccaaagaattcactctggggtaggtatcaccacaactttacttggagtggtggacagggccaatccataaacataccatgggtagattcacatgatagcgttagggaaaaggaatctctggggagctttaaacctgaagcgcaaagaggtcatcggggcgggactttgggcgattcgttaaaggcaatggtactccaaagcggggacaaatagccaaagaacgtggaggtcgcctccgtggtggtccgccagagaagaagctttttctccacgcccaagtaggggagtccgagcaccgcataccttaatccaaggaccctggataatcacctaagtgatctccacgctagagggtgactttgaaagcttattaaaacaaggagaaggaaataattttacttagacggggcccttgttcctggggcgaagagggcccactagtgggctcccttgccgagccatgtaaggggattaaccaggttttggttctttggcctttgttccccccaaacaacacgggagttaaattgtttgccgattggagcctcgcgaaaaaccaaattaggagggaactttttcccggcgaaggggggccttatgaaagaggcgttggggtgaattccccggggggccaagcgcgaatgggttgtaaggcgccccaacgggctgtcttggggaatgtgcttacggggcgtcgg

SEQ ID NO: 498678 - DNA, 526 bp, Homo sapiens
gaggatcccctcctacgagcgcaacccatttcccctaagattctccaaggattttattcctttaagatagaaggaaggtattattactttcagtttacatattggaggaaaacttgaaatacagcgaggatatgatttgtccaagattatataacaagccagcgataaaaatcagttattaaagcttcttacctcttagtcttatctttatttattaaatcactgattcttgttataaacttgactgatactcctatatccccagattgcaggatcagctttcttagggagtaaattaggatgaaggttttgtatttagtattctcaagctcgaaaggtgtaatatcccatattctcatctctgctatcagaatatccactgtctctgtactttgttcttaatattctgtgtttcaaataggaggattaaaaaaattttactgccatttttgaggttatttttctttcttcttccctacttatagttgaggtagtgatggattagtcctttgcttactctcttgcc

SEQ ID NO: 498679 - DNA, 176 bp, Homo sapiens
gtgtacaggcaggcatgcacgcagtggtgaatacacgtcgaccatggtccagctttgcgttatttggtggtcagcgcggtgctcacgtgatcgacggaacttgtataggaaggcatgcaccgccgtggtgaatacacgtcgagctggaggcatgcctgcatgcctcggctcctgcc

SEQ ID NO: 498680 - DNA, 482 bp, Homo sapiens
gctgcacaaacagccttggtgccatggacagtggcatgaggcagactggctcctgggcaaaaatggggtgggtcctcagtgaaaccctacctttaggcaactgagagtctgaagcctgggggctgggctgccaggtcctcagactggagtgagaacttatggcactttttctactgcccatggaccaatcagcatgcacttcctccctcttgagcccataaatatcctagctcagccagactcaagaaacatggggacaacctgcctgcgtgtaggagctacccactccagatctcctctctgctgagggctcagcagacatcctgacgacctgcctgcagaaaggagccacccactgtgggtctcctctcagctgagagctgggcagacaaccggacaacctgcctgcagaaaggagctacccacttagagtctcctgagagctatactgtcactcaataaagcacctcttcaccctaaaa

SEQ ID NO: 498681 - DNA, 290 bp, Homo sapiens
tgacgccatctacaaaaacaaaaaaaaaaaaaaggataaaaaaaaaagaaagaacgcaaagacaatggtccagggaaacggagacagcaccgggccttgaacattgatgaggctcagccggtgtactgtgcaacgcaggtgtgggtgatgggcgcgggaagagaaggacacacctgtaaaccctaggggcactgaccgatggtgtccctggcctcagtagcggaggtatgcatcaggcagatgagaccagacacattgccaaaaagggtcccaggatggtgcccaaaaca

SEQ ID NO: 498682 - DNA, 132 bp, Homo sapiens
gtttaccctatctgagagctgctgcatttctgctgctgcccagcattatcagacagtatcatactgcatattgctagcctgggacaagataacaattcaaaatttgaagatatggttatcatactgaaatgc

SEQ ID NO: 498683 - DNA, 172 bp, Homo sapiens
aggttgctttgtagtagcatgctgatgtagcggctgctctctgtctataatcttcttcttgtcgtcctgtcctgattgtcccacaaaccgcttcttcttacggtcccacttgagctgctgctggcccctcgtcaggttctgggcttcatcccccatccagtccaggatagcg

SEQ ID NO: 498684 - DNA, 389 bp, Homo sapiens
  misc_feature (17)..(17): n is a, c, g, or t
  misc_feature (157)..(157): n is a, c, g, or t
  misc_feature (188)..(188): n is a, c, g, or t
  misc_feature (246)..(246): n is a, c, g, or t
  misc_feature (288)..(288): n is a, c, g, or t
  misc_feature (290)..(290): n is a, c, g, or t
  misc_feature (301)..(301): n is a, c, g, or t
  misc_feature (306)..(306): n is a, c, g, or t
  misc_feature (366)..(366): n is a, c, g, or t
gggtgggtgggaggtgntcagacaaaggagtggtgccagggagatgagagaccaggggattggtgaggatgtgttggcgcggggccagcggagtgtgggtgggagtggtagagaggggcatggggtgggctggcgggaggaacatgaggtgagcgantgggattgggtgagagagaaagtgtgggggngggagggcgtgtctgcatagcagaagctgaaggtctggaaactctggcatagcttgtnggccacagcacctgaagccagttggctggacaggtgcacgcnancaccataagtncagtnatagtggccgaagaaggcattggccacttgcaaggccacaatgtccgggctggcccagcnaggaccctctcctgcaatagcca

SEQ ID NO: 498685 - DNA, 779 bp, Homo sapiens
ggatctggcactcccaggactcccggccggggtagctcttcactcctcagcgcgacgtcgtgtcgagttcccaaaaagtctccgtaggggctgtagggatggcatacaagaattaaattctgaataagtctgcaggtaggatggacagttattttaaagctgctgtcagtgactctggacaaactccttgagtgatttggaacagaacccagatgaacaagattatctccaagatgtacaatacatgcagtatgattctaaccactgctcagtttcttcagagttggcttcctcacagcgaacttcattgcgtcccaacaagaccaagagtgcgttcaagtagtatgtgcctcactcagaaacatagctatggaacaaatgagagttccctgaatgaaaaaacactcaagggagcttacttctatagcaactagtgagcaataacatgtaacaggacttgatcttcttctcttctgtggatggtggtacttcagatgaacagtccagccgttatatatgggacgatgtagtaaagcctatctgtgatctgataagtgacactgggtaacttagttcatgctagaccaactagtgagagaacgatattaccagcattgattggccagatgatctggaagtctaatgcgagattccttgattggattcgcatatatcttacagctgtcagatactccctgtgtaacttcaaacagaccatgatagtgatactcgtcagagaacaacagaatgataccagttctgaatcacaaaatagcgaa

SEQ ID NO: 498686 - DNA, 259 bp, Homo sapiens
  misc_feature (117)..(117): n is a, c, g, or t
caacgatggtcctcagctgatccaagtgacctttgttactatacttggatcagctgcaaagtagtggtgtggggtttttggttggttttttggtttggtttggtttttggctttttngttttgagacggggtctcgctctgtcgcctaggctggagtgcagtgttgtgatcttggctcactgcaacctccacctcccaggttcaagcaattcccatgcctcagccacccgagtagctgaggaccctcgttggggtaccg

SEQ ID NO: 498687 - DNA, 748 bp, Homo sapiens
  misc_feature (748)..(748): n is a, c, g, or t
ctttgactgattcagagcgactgggcgcaagccctcaggaaggatgaaggggaggcctggctgagactgtcatcccccagagaaagcatctttgtatggcagacctgacttgtcaaggtaattggcactaggatggcatcccaagtaggttacatgcttcagcaaggatttactgtgaactgaaataaacctagaagaagctattcatatttcatgtccaaaggaaaatgcatcttctaagtctttgtggcaccatatactacttttctccagaattcatacaaagagtataacatgcctggacatttccagtcagatggaggtctaggctgtgtcttcttagttactgtacgggaccatgaatagatctggcacgtggcttctcaactggacgaatactcaggagaagctaattggaacaggacattgctgtattgagtgtgaaaccttgtgtggcacgcggttatattccgcgatcaaggcccctttggtgggtgccctgaggttggggcggaaaatggggaattggccaccatggtccttgtaaaagtcaccttattgccgctgccagccttgaaaggattggcttatagtctgagccttgggctgagaaccttttacaaaaggggtcgcaccacagagggcgagggctaataccctggtgccaattaagccaaggagccccaaatttccggggttttgcaaatcccgcgcgggcgcaagcgcacattgtagcgcttggttcctn

SEQ ID NO: 498688 - DNA, 557 bp, Homo sapiens
  misc_feature (420)..(420): n is a, c, g, or t
tgtgttaaggaggaattacaacgtactttgatttgaatactagtagaaactggccaggaaaaaggtacatttttctaaaaattaatggatcacttgggaattactgacttgactagaagtatcaaaggatgtttgcatgtgaatgtgggttatgttctttcccaccttgtagcatattcgatgaaagttgagttaactgatagctaaaaatctgttttaacagcatgtaaaaagttattttatctgttaaaagtcattatacagttttgaatgttatgtagtttctttttacacagtttaagtgaataagcgtctgttttcattcctggtgcttttatttaattttagataagtatgatagttaccttactactgtaaaatgtaaagctagaagtgtacactaagaaatgtaaagctccnatgagaagcagggtacccttgtctggtctttctctgctgtgatactaattccccacaccgcttgtatagatggtggcctggcgaccaataagtagcgcacctcaataaaaatatttgtttgaatagaatagaaaaaa

SEQ ID NO: 498689 - DNA, 329 bp, Homo sapiens
  misc_feature (4)..(4): n is a, c, g, or t
  misc_feature (28)..(28): n is a, c, g, or t
  misc_feature (41)..(41): n is a, c, g, or t
gggnatgacttcccatttacaattttgnaacttaataagcnacacacgtacataaaaacccagagacggccgggcgcgggttgtcacgcctgtaatcccagcactttggaggccgaggtgggtgcatcacaaggtcaggagatcgagaccatcctggctaacatggtgaaaccctgtctctactaaaaatacaaaaaattagccaggcgtggtgcgggcgcctgtagtcccagctactggggaggctgaggcaggagaatggtgtgaacccaggaggcggaacttgtggtgagcagagatcgcgccactgcactccagcttggggactc

SEQ ID NO: 498690 - DNA, 118 bp, Homo sapiens
  misc_feature (63)..(63): n is a, c, g, or t
tgactagaggatcccggcacggctgcggcgtcgttgttctgtcgccgtctttcatcagagatncgatctcctcgtcagtcacgtgctccccctcctttcctctcccttgagcttggtt

SEQ ID NO: 498691 - DNA, 1399 bp, Homo sapiens
caccaccttccaccacctccacctgcccacatgcccacgtggcccccagtgatgcacagcagtgtgggctgcccagtagaaatgccatgtgcctgtgccatggagccgtgccagagatgagactggactgcctgctgggcgctgggctggagctgggtggcatgcccatgtggtatgtggtgtgacacacggatgggccaggtggagtggtgtggacgcctggtggagcggcaggggtgtttccccgaatggatcgcactggaacgacttttatacaaacggaatttccaatgtggaggtcgagggagggaccagtaaaccttccttggtgccacgttgcgtccttcagtgaagtttacctcacggcacacgtttttccttcttgtattttaagtattataactagtcactactactacttgacactacgactacaagtactacaactaattgttgcggtgagacatgggccttgggcacacccatggggggttgcatcggagggcgtaaggggccttgccattgcttgccaaggagcttgactggcccgttggcatgtatggtcagggcaccacacgggacacttcttggaccaagactttgctctaccctattaaagcacggcaccaattgccccttttctttgggaacttccttgggaacgacagcgatccaaccagctcccttggcaagtacaactttggtggactactgcaccaacaagtaggccaaggcctctggcatggttacccccagtggcaagcgcggccttgcagtgcgttcaacagcggcccttgtttggcggcaaagggagcccaccatttcgattatgagcatacttcaactacggtcttccttacttatcccgcccaaattaggaccctaaacattgtacacaccctcaagcaaatcgtttgaccttttgcctcgggtctcggtatggaggccccccaagataaagtccctccaagttacaagccccctttaccagtaccattggccgtgaacattggttgacacgggcgtcctttgacgttggtggagcacccgttggatggagcaagcattcggacccatgtctgagggctcccaagaacgagcccagagggagttacgtgcgcgccacgagggcacaggtgcgggaaccttttagaactttggccaccaatatgggtcactgcgaccgtttgagatgccacttttcaccactacggattggcgatacgtcacacgcgtgttccacaatacaggttggaaagaacaacccttatggccctttctatgggacgattctacagatgccgcaggaaacgatcaagacaatacccagatcttaagcccacaggagtcagaaacattatacaaagattatagagcacccgtttagagcacacgaaag

SEQ ID NO: 498692 - DNA, 187 bp, Homo sapiens
acacatggaaaagtagattatgatgatctcgtattgagtttgtccctccgctgggaaaaagaaacaaaagaagtttattgaatactagcttgtataaaccttcagatgcagtgtaatatgaaaatgaggagtgaaagcatcccacggcagtcttaataaggtcactataggatagcaagggggatct

SEQ ID NO: 498693 - DNA, 439 bp, Homo sapiens
gcattagagtctagagtatcccctgctcggagtgcttttgagtgactttgcccaaaatgctgatagtggtatgatcaataaggtccaggctgaggtggtctcagatggagatgagaaacttgttgggaactggagtaaaggtgactcttgttatgttttagcagagagactgatggcattttgcccctgccctagagatttgtggaactttgaacttgagaaagatgttttagggtatctagtggaagaaatttctaagtggcaaagcattcaagaggtgacttgggtactgttaaaggtattcagttttataggggaagcagagcagaaaagtttggaaaatttgtagcctgactatgtgatagaaaagaaaaacccattttctagggagaaattcaagccagatgcagaaatttgcataagtagcaaggaacctaat

SEQ ID NO: 498694 - DNA, 296 bp, Homo sapiens
  misc_feature (7)..(8): n is a, c, g, or t
ggggggnncccggggtcccccctttttttttccccccccccccccgggggggggggggcccctttcccccaaaaaacccttttttttccccccctcctgggggggggggccaaccccccggggggggttttttgccccttttttaccccggggttttttttttttttttttgggggggggggggcccccccccccccggggggttttgggggttttttttttttcccccccccccgggtttttttttttgggccccccggggggggggcccgggtttttgttttttttttttttta

SEQ ID NO: 498695 - DNA, 1437 bp, Homo sapiens
  misc_feature (862)..(862): n is a, c, g, or t
  misc_feature (981)..(981): n is a, c, g, or t
tggggggcccacccctgagaggacactgttagttgttgactcgcatgcgctgcggtggcgtgtctctcgctgtggacacacgactcaaaatatcgtttgggtataaaattggggggccccaaaaatataatcgccgacgtaataaaatatagggtcgttggtagaacctaaaaccaggctcttttccgttggttggaagtgtcttatagggaaatgatttttaggaaaaaaccaccatgggttcagattccaataagtgcgttaaaagagggtttccccggggttaaaatttgtggaatagccccctttctaaggggttttttggcgccgggttgtgttttttttctttgggaaggaagttgtaaatatgccgatgttgtgattcccttcgtttgctccgccattagtttatggcgtacaacccgaaaaaagggttggtcctcaaaatgttccgtcaacatgggttttcggactctaggagattttttttaaaaaaaaggggtttttctgggggtggaaaaatcgtgggaaacaaacctacataaacagtttttgggggttccacatggagagaagaaatgtgtaaaaggtgcctgttgtttgttctgtatcccctgtgtataaaagacactttatgaggtaataggggtgctgtcacactggagaggtatacactggtagagaaatgttcttatgggccccaaacccccggtggtgtgtgcacaaaatgttttttttctgtgagaagctcgtcacagagaatatattgttgaaaagttaaacatgggtcacatatacagttgagattcttgggagagccttttgggtataaagggggagaccacagagagagagaaaaggnagagttccacaccgctgcaacagtgtctgcttgttgtgcttgtgtcttgacagaatatactcttaaggaagactcttctataggcacacttttggtgtgtgtgatatgtgagatttatnagtttgagagggagagccccacgtgataagagaacacacttctcggggtgaattttttggggagaaaccacaaagtggggttccacattggtgtaacacatgcacttctggctcgagaacttgataccacaaactgcgtgtgcactcctctcgagaacacacgggcacacacaggtggagaggcactttctctcctcgctcgtgtgggctgttctctcacgtggctgtcttctttgtccacaaataagaagtgggtgaacagtttgaacttggacacgagatgttaatcactacacgagaaatccttgatggagattaataataatgtgtgttttaacttttgaaatgttgacacaaacggagaataaactttaaaactaatttctcacgagggaaatatattccaagcatgaaatatgttgctttttcccagaataccaaccagtatactcatga

SEQ ID NO: 498696 - DNA, 120 bp, Homo sapiens
aactgggctgtgctgctttagcctcagaccccaggtcagcatctcggtctgcgccacttccttgtgtttatatggcgtttgtctgtgttgctgtttagagtaaataaactgtttatatct

SEQ ID NO: 498697 - DNA, 226 bp, Homo sapiens
tggatgtcaggttctgcttcctgacaccaggtgaccctcctcgtgttcaagacataacctatctagctgactccattctcagccccaggtatactccagcccccagcttgtcatctcttcctctaaaaagcctccagctcagcccctagtttccaacaacagtcagtgggaaccaagtgggcaccctgggatgtacggtgctccttgctcccagtcctgagatctt

SEQ ID NO: 498698 - DNA, 776 bp, Homo sapiens
  misc_feature (611)..(611): n is a, c, g, or t
agcggagggaggtggccggtctccgtcgctgacctctgacggtttctgagcgttgcgcctttggcacgcgctacccccttttgctctctggttctgccatgccgatgtaccaggtaaagccctatacacggggcgctggcgcgcctctccagtgtggagacttcccacctgcatgtacctggctccccaacgtgcactggcagtgagctacggcccagcgccgggcgctggccacgtgcatggaacgagtctaacctgtctctgcgagctcttgagtcccgccaagatgatattttaaaacgtctgtatgagttgaaagctgcagttgatggcctctccaagcatgattcaatacgagccagatgcatgacttggcatgtaagccaactagtaatgccaatgcggatgaggcccacaaactttaaccaccgaatgctgctgggacttgacattcagtagctctgggaaggattacgggggcgctgcacaagacgatcgtgcatcaacgacaaaccggggcctcccactcccctcatccctggcttgtagctagcgcagtgctagcatctgtgacgcacttacagggtacctgtccatcaggtgcacacgcnactcctcgagtcaaggagcgtgccttgaaaaccttctcaagtgctttggagaacagaataaccaaacagccccggcaagactatcagctgggattcactttaatttggaacgaatgtgccgaagacgcagactgagcattcagcatccaggacgatgtgccccaa

SEQ ID NO: 498699 - DNA, 1222 bp, Homo sapiens
cacgcgtcggagtccgtctcaaaaaaaggaaaaaaaaagaaagaaattttctttactgaactaaagcatctcttacaaggtgtccattataaagggccacattacatgagttggtatttcttactggtgccattcatttgggattcatctggccttaggctactgggacatttaagactgggactggccttcatatttctggtaggtattagctgggaactataatatagggttaactccaagtaagtagggtaggtgacgacataggttgggatggatccagaaatgaaaccaggagcaagcaggtttagttctgggattatagggtaaagtataaaattaagtgaatcattcctaattcatttagattggaatgtgtaggtaatagtaatactcaggagatacaataccttgtgcatatataagtttacccatgggtaaaaatgagataataggctaggtgcatgatactctaaaacttccttccaaagtctgaaatattcatgctataccaagtaaaaaatgcacaagggatccacaatattcaggtgatagaaatagacatcgacgaagaacataagactagtaaacaatgtacaaggagtctcccaattttataacattcaccttcattcagaacgcacaaaaaaaccttatggcaatcgtgaaaacagttaatttacctatactggaataaccgtgaatatagaagcgtggagcatgatgcatacaccgtggtaccctaaactagcgaatgaaagtccagaaaacactacacatgcaagcaagatgtacaggaaggacgcgaaaagcaacatgacacatgaggaatggaaaaagacacaccggccacagggatgcacaaaagagcgcagagacactacaaacgggcacaagaaacacccataataccgaagagaaacaatacagaaaaaaggcacacacaaagacacaagaaatgagagacaaactaggaccacggggaaggacgctgaacaggaaagacgagggacagcaatgaaaaggacgcggccggcaacaaaacagtaggcgactaaagaaagagggagaaaagacagcaaaagcgaggcagaaagaaaactagagggcagaaaaagacacaaaaacacaaaccacagaattataaaagcaccaacaggaagtaacacataataaacaagagaaacagagccaacaacgacaggcatccataatagcagac

SEQ ID NO: 498700 - DNA, 328 bp, Homo sapiens
taatcaccaggcgcggtagagcgaagaaatgtaaagcgatactgagctccttctattcgtctcttcatactacccagtcgagtccttcaacactgcctctctctctctctctctctctctctctatatatatatatatagtttgacctacagagactgagtctccctctgtccccaacgctggagtgcagtgggccacaaactcggcgtgcgtgcaacactccatctcctggggagtgtcaagcgatccatctacctcagctttccaagtagatgggtccacgagtgtgatgcaacacacccaggtaccgctggtgattccggggtac

SEQ ID NO: 498701 - DNA, 161 bp, Homo sapiens
atccatctcaatttcaatccattagatttcgtacatccgcaagtcgaagctgaagtggcataccagctgcacctttccgtgctacctattaaagaacaatgagtgtgatgcaccaagtctgaatttcgtccagcctctctctgaactgtgatctttgtcct

SEQ ID NO: 498702 - DNA, 249 bp, Homo sapiens
ttatctgttgctgtatgctacaatgcaatatacaattataattaatatactactatcatttaagatttaagattcatgtagcttgttactatgtttgaatataatattgcaattaatatagtaatatcagttacgatatagaattaacatccattactatgtgttgtgatacatagaattaatatgttactgtgtgatactatgtaatatactatgacaattaatataattgtatcataatgtaaaaaa

SEQ ID NO: 498703 - DNA, 1508 bp, Homo sapiens
  misc_feature (304)..(304): n is a, c, g, or t
tctatcggggcatccgatatctacatttttatccctttttcattttccagtgtgtatattttctcatttattgtggccaaagaaaaactcaaagagtggttatatagccgaaattaacaaagtggtgccagtgttaaaagttaagtctcgtggactttaagaagtgttcacaaatttttaaagaacattacagtgttctcacaagtgtttattatctcatctatttaatataacatttcatacgaggtggatataatcttatatcttatacaaaacacaaaaaacaacatagctgcgccataanatatatctccccttataattgcggccgaatattctccgagatatatctacaaatatttaataagagagcccaatatgtgggagagacacacatacgcgcgagacacacatataatatatacaggcggtgtctatcaccattcttctctctcatttctcgcgtgggagagaacacagagcgcgacgctgtgctgcgcaagagaagggctctctgcgctagatcatctttctccgcgtgaagcgactttctcacactctacactctctctactgagttgtacacacacagagacacacacacacacccccacacacagagagactgtgtgagagagtgtgcgtgtatctcttctttatgtgtgtgtatattatagtggtgtgtgtagtgtgtgtgtgtcgtgtgtgttctgctgagagacgagtgcgaggagtctcactgcggcactctgtggtggttcacacccccagaagaggctgttgtgagagtcgtgcacaaaagtggcggcgtgtgacacactctcgagcagcctcccactggtggggcgacgacctctcacaaacactactcctgtgggggtatctccaagagccggaacaatcatcactactcgtcgtggcgcccctcaagcgccctctcctcctcgtgaagcgtaatagccgcccggagaggagaaccatcacacataagggcggcccacccgcgcgcagccacacaacaaaggaaaacaccccccaggggcgaataaaccacttctaagcgggggacagataatctatctcacgcagacaacaaacgagaccacggggggggtgatccaaccacccacaatggtgtgttgcagcggtcacccacgagcgcgagggaggcgcccctcacaagagcaccgccccctggtagaaaccccctgccggtgggaaacattccaccaagccccgggagatcactgcggggagcctctccacccaaaaaagcgtgcggcacgggagagagaaaataacagcacaagcggccctactatactgagccccacacaccaaaccaaaccccggtgaggagacaggtcagcaagaaacgacgggcaatcactcactctaacaacagcagattaaatccacacaccccacgtggatggcgcccgcccgggtattggctagcaccccccccaggtaatgtgtcttgtatgccccgcacgtagttgaatcaa

SEQ ID NO: 498704 - DNA, 204 bp, Homo sapiens
gaatgaagttaccatgttatgctgttatgtcctaaaattcaagtcgactatgtgagaaaccctcaaattgtgcgtttcattatataatgatacagttagacaaaaccgcagactgagccatttgaaacaagattctctccattggagtttgtagcgaggttattgctgggtatgtcatgagaaggctaaatatcggtgttaatt

SEQ ID NO: 498705 - DNA, 186 bp, Homo sapiens
ggtaccaatcccgtttccacgaaatcctcaaagctatgcaaatactctgcagattctacaaaaagagtgtttcaaaactgctctatgaaaagaaaggttcaactctgtcagtagagggcacacatcacaaacaagtttctgagaatgcttctgcatagttgttacgggaagatatttccctttcca

SEQ ID NO: 498706 - DNA, 405 bp, Homo sapiens
  misc_feature (72)..(72): n is a, c, g, or t
ggacgaggagaaagagactcgagagttttttttcttttaaaaacaaaaaaagtgaccaagggggggctcctncccccggaaccacgccgccgccaaaagaaacaatagggaagatgggaacgccacagcgacagcggccaacgggacgagaccaggaaaagggaacggaccagaggacgagccgacgcaaacagggcccccaggaggaaggggcgagacgcaacaaacgcggcagagccgggaaccaacacgcgcgcaagggagccaggggcgggacaaagggcagaaaacaaaggcggcgcgacgacaaaaccgcaaacaacgcgaccgccaggagcgggggcaggacgaacggggcgaaagaaagcggggaggaaggggggaggagagacgcaccagacggcc

SEQ ID NO: 498707 - DNA, 512 bp, Homo sapiens
  misc_feature (8)..(8): n is a, c, g, or t
gcaataanctcctactggactctatcagcacgatgagatgtctcgacatctacagatacggagatcgcggacgggttgtgctggagtgaggggaagatgtcagtagacagaatgtaacatgatgactcgctcattggtggaaatgctccgctgaaggccccgagggcgaaggtaccgaaagcacagtaatcactggtgtcgatattgtcatgaaccatcacctgcaggaaacaagttcacaaaagaaagctacaagaagtacatccaagattacatgaaatcactcaaagggcaacttgcagaacagagaccagaaagagtaaaaccttttatgacaggggctgcagaacaaatcaagcacatacttgctaatttcaaaaactaccagttctttattggtgaaaacatgaatcccgatggcatggatgccaataacctccctaggtttcagcaaaggttgcgtggcttgacctcatccttttctctactgtgtgttccgcacgcactttctt

SEQ ID NO: 498708 - DNA, 422 bp, Homo sapiens
cgcagtcttctcccatcagtcagacagcccctattcaagtccataagcatttactgaggtggcttggtgcagggaaatggcaggccttcatagccataagtatgggagttcacatcttgactgttccttactgcctgtgtgacctcaggcaagtgacttaacctctctgagtctcagctgcctggttgtagaatggcagtggtaagagctagtgggtcctcatgggaattaactgggatgttgtctataagatacttgacacatagtagggcagctcacttaccctcagggcactctggacatggttgcaggagagacgaggtagagtctgagtactcggagagggaaggcaggtgggcaggccatgggctgatgggagcaatgggctcacctgagcctgcttgttgcctgcagctcaacga

SEQ ID NO: 498709 - DNA, 771 bp, Homo sapiens
gggcaacagagtgagattccgtctcaaaaaaaaaaaagaaaaggaaaaaaaaatagcattatacctcttcctgtgtttcaaccgccatgaaaattctgaacactccaaattcagttgaataatccaaaacaaaatttataagtataaacataatttgacttcttatagtaatagtatacctttaaaaaagcctcaggggtatataatcttctaaacaggctacaattcagtggcagctacattaaccaactatgtcctctagtggagaacaactagggcctatttcactggctggtgtagcctcagttgcctaacagtgggtgccaaataaatattcgtagaattacactgggaatggtaaaaaccattcgtttggtttacaacttggccaaaaatctcaaaagggcccggtatttatggtaatccttggaacattataatctattgtaatttctcagttatggactggctggggtgtggacttagtacataagtactcaatattataaaaacctcaaataatggacttgattttacacaagatccttccctttttcctacaaggttaaatcttcttgacaacatccattgcgctcatctccctaaatgggtatatccaaagggtcctaaaaaaccccatggcttcacaactttatgttgccttatcgagacacaaatcgggtaaatttttccccaaacactttcccacatgttccaaggactacattcgacggagacattcggcgagcgaaaaaactctaacctgtgcac

SEQ ID NO: 498710 - DNA, 166 bp, Homo sapiens
gccggcgccacagtgggcagctggagcgatcgaggctgcacgcgcgccggggagcatgactgccgtcgggtgcaggccagagctttggcaaaggagccccgcggtcctctttgaaccttcatccgaccccatcatcacgtgtgtggccctgctgtggtcctgtcct

SEQ ID NO: 498711 - DNA, 1167 bp, Homo sapiens
ctgttcaggcggcctgggaacgggcggtggggagctgggcggatgctggccctgcctctgcctggcctggcgccgcagtctggcgctgggcctgcgccctgcctggccgccaactgccctgatgctgcttgctgagtgccgatgggagacgtcggggcctgcacctggaggtgagcctgcctgctgctggcccctgagtgatgtgggtgctgttgccatgtgcggacatgcctctccctgcgtgctgacgtggggtgctggtggtgctgtgccctgcggaaggagtggcttggtctcctggcccccctggaccctccccttactctcccctggacttgagatgggcccgaagttgggggcaacaccccgggcattgagggctttccatgctctcacagaaccttcagcatccccaagctgccggatcttgcggccattcattcgaaagtcaaggagaagtcattaccgctgcttctggatgttcacactgcttatgcacctttacagactggagcacgctcgatatctctcttcgtatctactttcatcgacgcaagaaaagtgcttgggactcccacgttactcttctcccatgtgggtgataccgcgacgtcactgcctccgatatcacacgctagtaaacgtctggcgtgacacaactgcggcattatgcgcgcattccaatgtgcagggcgaactgcgtagtaccgtttcccatcaccccagcagggtatcgacataccttcataacgtggctggcactttctgagcgtgccccatctgtatgtctgtacttcatggtcccagcctaggcactttccaactccgcgtacagggacataattcaattctgaaggtactcccgccagtccctacaacggctacccaatagggcccagacgaaacaccactcggcgcagcgcaactccgagcaagctactaaaagcaattttaacacaaccacatcggctagattgctatccccaaggcaccctggataaggaaccacaaatacacacacagagcctcttaacagcgcctaacattcgcttgctaaccaaggaagttcttccaacccgggggcgaattaaatatcgacaagcccacaattagatcgtcaatctgggcactccaacacaacaaaaccaactagcaaaggacctcacg

SEQ ID NO: 498712 - DNA, 778 bp, Homo sapiens
gacgaggcttcctcgacagagtaaaatttaaaatcactctttcgtctgggtgcggtggctcatgcctgtaatcccagcacttcgggaggccgaggttgggggatcatctgaggtcaggagtttgagaccagcctggccaacatggtgagaccccatctctactaaaaatacaaaaaaattagctgggcatggtggcgagtgcctgtagtcccagctactcaggaggctgaggcaagagaatcgcttgaacccaagaggcggagactgcagtgagccaagatcatgccattgcactccagcctgggcgacagagtgagaccctgtttcataaataaataaaatcactctttttactttatatattttttgagacaggatcttgtggtacgcaggctggagtgcagtggtgtgtgatcacagctcattgtagcctcgacctcccctgggctcaggcagtcttcctgcctcagcctcctgagtagctaggactacaggtgtaagccaccatgcctggcccttaatatattacaatgagcaatgtacatgttagtcccgcttgaatccatggtttcacttaccagcaagttgatcaaatctacctcgctagttcagactgcaagccaagttaacgtcggcttgcaagatatcacgaaggggaaccatcacgcgcctccacgtggcccctaagttcaacccacccaggccaaccacctccagcagacgggcccaaaggggacaacgccacgcatcccccttggacgccccaagggagtaccac

SEQ ID NO: 498713 - DNA, 138 bp, Homo sapiens
  misc_feature (65)..(65): n is a, c, g, or t
agggtcctggccagcagtgtgggagcaggaggggaaggatagctgtgtactccagggagtggggnactagaactgggatgtcttggcttgtatgttgaagcttcgattatgatttttaaacaataaaaagttctccat

SEQ ID NO: 498714 - DNA, 386 bp, Homo sapiens
ttttatttatctaaaatggggattgatttttagggcggtttttaaaaaaaaaagtgttgggaattaagccagtgatttattgggaaacctactgaatggaaaaaatatttagatttaaaattaggtaggttgaagtttttttttttaaatgataaataaatggtgaaaataaggcttattgttaggattccgttaggttaaatatgccaaggacctcccatgttttggcccatagtaattaattaaaaaaatcgagccccctttatttcctaaaaagcagggttgttagttttttggtttacttttgttttgctggggcctttttccctgttttagtgtccttttattaataatagttaccataaaggtttacctttttttagtta

SEQ ID NO: 498715 - DNA, 979 bp, Homo sapiens
ccaccgcgtcggtgccaagtagaggcccttggcagcctcccacccccacctgcagttccccgtgagccagtcatcccacacgtctgatggggcatgtgtggtgacgctgccaggtccccctggacacctatcaagcgtccatctccgggtcctgggtacatcatccccctgcagggccctggtctcactaccatagagtccctgcccagctagcccatggaccctgggtcgtgtggcccgtgaccaatggtgtggatgaggccctgatggggagctgttctgggacgatgtgacgatgatgcctgtgaattgctggcagcgaggggcctacacgcaggtcatcttcctggccaggaataagcgcgatcgtgaatgagctggtacgtgtgaccagtgagggagctggcctgcagctgctgacggtgatctgtcctgggtcgtggccacggtgccccgtgctggtcctctctccaacggtgtctcctgtctccaagcttcactctactgccccggaccatgcgaaggtcctgtgccatctgtggtctcgctgtcgttgggcgagcacgtgttctcgggcagctggtgttatgccggtgcggagtgtgtggtctctccagagggatggctggttccccagtgtatagcagagcctgtgttgcgggcatccgctgtgtgctgggtctgggggtttgcatgtgtcaccctggagctgggcacttcacattccaacgccgcgggcgtcgcttgtttccagctcctgggccggggctcttggtccccaatgtgtcttaggagagcttctcccgagatcgtctggggtccgtggcctgggagggtgcgctgtgttataacactcgggtttgcctctccctgtgtccgctgcgggggattagccccccgctcatttgttccgccggacacggggccgcggggtgggttaaccagctctgccggtttccaggggccggtccgtgtttcc

SEQ ID NO: 498716 - DNA, 266 bp, Homo sapiens
gaggatcctcccgtacgccaatgattatcagtgttaccattattccagagcacaagtaaaatcagaattgactacattgtcctcctatggataatgccaatgcagatggagtagctgtctggtggcatgtgagctcctaaaggcaggttcagttaaaagaagcaaagaaaagtaacctcggttagggcattctcctcaaagcaaccaaagttagcagaaacactaccaaattgatgggccaggtaagggctagcagggtgcccagg

SEQ ID NO: 498717 - DNA, 163 bp, Homo sapiens
tctccgtcacatggctgtatccgtctttatatgtttaaaatgctggcagccgtgatagaatctttgccctgtaacctccttgcatcgattgaatatgtagggtgacttctgtagttgagtttgcatttatatgtaatctacctctgaaaatttgaaatgtgga

SEQ ID NO: 498718 - DNA, 307 bp, Homo sapiens
  misc_feature (78)..(78): n is a, c, g, or t
taaaaaaccccccccccttttttattggggagggtggggccccccccccgtggtttttttttctgggggaaattttcnccccccccccccccggttggggcccgcgggggagggtttttttttttttttttttgccccgccccgaggggcgcttttttgggggggggggttttttttttttttttgggccccccccccccctttttttgggggggggttttttttttaaaaagggggttttttttcctcttcccgggggtttttttttcccccccccttggtgatacccccccctggggggggggta

SEQ ID NO: 498719 - DNA, 356 bp, Homo sapiens
gacccaaagacaagcagcccggggccgggcccaaaaccaggcttgggcctgcttggcctaaacccagtggttaaaaatcaactcataacttagaaactgatgttttttatagattccagccattgtatagaagaacattgtgaaactcccggccctgttttgtttttttttgaccccggggggatgcggcccctgttaaaaaccgccgggtgggtcaaatcaattatgccccttttttgggaattttttagttttgtgggcccttaaaagggggggaaattgggcatttgggggggtgggtttttaaggcgggggcctggtgaggttcccaggtgaataaagcccttctttttcca

SEQ ID NO: 498720 - DNA, 386 bp, Homo sapiens
atgttcagtgtcagtatacaacatggtcaattcttgtgatgtcacagctcacgttaatacagaaggtggtgtgcacttgatgaaccttgagctaagcttgggaatcagagtgaactattgtccgcatccactttaggtgtagctagctcgcgtaatggtagaaaatcccgtgaggttgtgtatcagcccggttaaagccataagctgttgttagcagcgctttgtattgagtatcgtgagttacatagaactagaatagttgaacatcctatatgtatgctcacttccctggactgcagtataatttgagatacgttgcccagtacacccacgactcgtagttccgatcttatattcctacatcaacgtcaataacagcggtgttg

SEQ ID NO: 498721 - DNA, 132 bp, Homo sapiens
tagcagcctttcaggccagctcctgaatcttgcgtggccctccaggcccagactctgcctcccgtcggcctctgcagtcccaacgtctgcctcacagcagattcttcacgcccagcatctacctcactgtgg

SEQ ID NO: 498722 - DNA, 553 bp, Homo sapiens
atgaaacgttatagattttcttatctattttggtgcacaggctactccattctcggatcagtttacgagctctcggtgactcggttctgggtttcaagtgagaaaggagattcacacggaaaaagtgaacacacaccactcggtagaccaggcagcccctttaaggcatagatatcctcctaaacacaaaagcataaagacccggagcccagctgagaaacgggctggcctaaatacggatctttagaaaggacatgtacggccatccagacggttttacataagccaaatctccaaaatactcaagcctacccggttcagcatggacacctaaaaagaatttggactattctttaatttattaaataaaaaaacctaaaatatgataacttcctggccttattaaacggagtgcaccaaacaccatttagagcgtgatgacggcggtccattggagtgaagggccgtgctcacatggttctatggccccacagtgtcctctgggacttctaaagagtaccaggttgtttactacaccactcagggctgcagg

SEQ ID NO: 498723 - DNA, 304 bp, Homo sapiens
  misc_feature (14)..(14): n is a, c, g, or t
  misc_feature (18)..(18): n is a, c, g, or t
  misc_feature (20)..(20): n is a, c, g, or t
  misc_feature (23)..(23): n is a, c, g, or t
  misc_feature (29)..(30): n is a, c, g, or t
  misc_feature (95)..(95): n is a, c, g, or t
  misc_feature (111)..(111): n is a, c, g, or t
  misc_feature (127)..(127): n is a, c, g, or t
  misc_feature (164)..(164): n is a, c, g, or t
tgtaccatctatgngcantnagngccctnntctgcacaaacaagcagttgctgggaacttgtcgaagtttactttttcagaaagttgaagtatanaaaaaaagtacaagtngtgacattcgttcaangttgctgctacatgggtattcgtgagctggctaccanggaaggactccgtgcgtttccgagaagccaaggtcagctgtctcataggagcctgtggtgcatggtgcatgtgtgcccatgcacggcacttgtcgtacctgctcctgcacctttcacggcacttggatatgctctgacca

SEQ ID NO: 498724 - DNA, 208 bp, Homo sapiens
  misc_feature (200)..(200): n is a, c, g, or t
acctttctggtctctttccttctctccttaatgacattaacatctattctcaccatacctcctaggcgaccctatgctcatcccaattataccctagccaaccccttagaacacccctccccacatcaagcccgtaatgaacttatttcctattcgcctacacaagttccgtttcgcgatccgtccctaacaaacttagnggaaggcg

SEQ ID NO: 498725 - DNA, 553 bp, Homo sapiens
  misc_feature (1)..(1): n is a, c, g, or t
  misc_feature (102)..(102): n is a, c, g, or t
ntatatacctcccttttaaccgccacttggtcacactgtcaggtagcacattcactttctccttacaagaaagctcagcgagatctgggctatgagccactngttcagctgggaggaaagccaagcagaaaacctcagagtggatcgggacactagtggagcagcacagggagacactggacacaaagtctcagtgatggaagagggtgagacatggccctgggtgtaaatcaagtccttcagcaagtagagaccacacaaagacaggtgctgctgccttcttttgacacagaggccaatttagtgccttaatcaagtcaccaaagccttgccagtcactgacccagccacaagccttttttctgaaattcctctccaaagacacacgggcatctgtgccccagcttctgggtccaagcccctcagcacctctcatacctcagagctctttccattaatttctctccgcattcaaaacatgtatagccttcagaaaattctgcttgctttatgaagcccaatggaagaaacaattatttgtcaatacctcatc

SEQ ID NO: 498726 - DNA, 420 bp, Homo sapiens
cgactctagagtatccgcgacagcacgcgctaacaatctggataagtcggctgaggacgccgaatagccagtgtttgctgtagaccgtgctccctatgcagttctccaccggcccacctcctcctcctcctccttgtcgcgactcggcggcggcgaggggttgcgacaaagaggaaactaccaggactgattttacccaagatgatttccacttgaataatcttaaaggatattttatgtgaactttctttctaatatttttcaggcattaacaaaggagacggtggctcagggagtacaggaaggccagtagagcaaacagaagtgttcctctgcatttcaaaactttcttcctttctatagccctgtggtgcaagattttattagaatcctacgtgaagttgttagcgcgtgctgtcc

SEQ ID NO: 498727 - DNA, 959 bp, Homo sapiens
actactatcagaccgaacctcaagaccatcttcttcgaacccgccggagtggggagaccccatactataccaaaacacttcattctgataagttcgggtcacccgtgaacaggtgtctatatgcattcatcacttagctaaggcattcgagaagtaatctcccaatactgctaacttgacagtactccgggaacatatgaagagggcaaccctaggatgccaatgaggctatgggtctgcagctatgatatcgaatgggctatccgtagggattcagcggtgtgagactacagaagatatagtaacagtaggagataaacgttgaagagcacgagcctatattcacactcccgctactcataattatgcgctatacccaccggggtcaaggtacttagaagccttgagttcgccaaaactccacaggtcagcaatgatgaagatgatctgctgtaagggctctggggacctgaggacttcatctttcgttgtcaccgtaagtgagtgtgaactggtcttagtattagcaaaggtcaggtcactagactatcgtatgtactacgaaacgtactacgtagtggggcgtcactttccagatatgtccctaatcgataggagtctggtagttttgggcacatgaggaggggtggtaagattgagtgatttccacttatatcttcagggtaacctctagagcgaatctatgtcagaattccattaggtatcatattcgtcgggtaaatctaactgagttccatgcacttgctcggctattcgaatgccgagtattcggtaccgatgatacaaatgaaaatctatacttgaggcctaactggctagagagaataaaagcagggatggaaccgtaaagaagatagaaaacgccaagggtttggtccccacaaaggcggtaaacaagggcccgtgccggtttaaaaaaaaaaaagccgcgcgggggg

SEQ ID NO: 498728 - DNA, 219 bp, Homo sapiens
agcagtacgtctgagaatcggggggggggggttggggggaaatttttggccatgatgtctgtgtggaaagcggctgtgcaaacttccaatggttataactatgtcctacaagcattaattaattaacacactttagtaagtatgtccgcctgtaattatggaacgtaggtgccaatcctccagacgggtgcgctggggtcaccgagctccgaatccgta

SEQ ID NO: 498729 - DNA, 176 bp, Homo sapiens
ggacagcagccacactctgcagagagattggccaagcaggaaggcgggaacccgggcaaaggtggcagccaccagcaaggcccaacgtggttcttccaccgctttttccatgtttgaccagccaagatacaggagttcatagagcttcagctgtatcgccagatcgtatgcatcaa

SEQ ID NO: 498730 - DNA, 430 bp, Homo sapiens
gacgcagacgcgcggctgccccctggcggctggccgcggagctccggccgcgccatgccccgccttcctccgccatttcattccctgcctgcagcacgtccgcgttccgccaccagccttggcgcacaagcgtgctccgagggcggggccgctccgggcaccacgcatagtgcgggagcgttttttagtctggttcaccgagggctagaaggtcacctacatgtttacacacatttaatttaattattaattttttattttgttttatatttttgagacaggggctcactctgtcccccaggcctgagtgcagtggcgcgaccacagccttctgcagcctcagcttccgtgctcaagggacgcgcccgcctcagcctcccaacatgctgggattacgggcgtgagccaccgcccgggaacaacttaatta

SEQ ID NO: 498731 - DNA, 411 bp, Homo sapiens
  misc_feature (253)..(253): n is a, c, g, or t
  misc_feature (358)..(358): n is a, c, g, or t
  misc_feature (395)..(395): n is a, c, g, or t
  misc_feature (400)..(400): n is a, c, g, or t
acagttgtctacagtattcagtacagtaacatgctgtacagatttgtagctgaggagaaataggctatagcatagagcctagatgtgtagtaggctctgtcatctagatatttgtaagtatgctctattatgttcacacagtgaagaaattgcctaacaatgcaattttcagaatgtacccccatcgttaagtgatgcatgactgtattgaatattacccgggcaaacaaatactcttctactttgctggttngggatataaattgggtacaaccctttttaggaacagtttgggtgggttatgtatcttaagggcccttattaaacctacagggctctttcagctcccttttacccnaattatggtatttggaaccccttattctggtggcccncatanggggggacccc

SEQ ID NO: 498732 - DNA, 305 bp, Homo sapiens
tattcgccatgtttccctaatactcctgtcccaaactgtcctcccaccttagccttccaaagtgctggaattacaggtgtgagccaccgcgcccaacctccaatttatgagtctttaagatattttaaaataagcatttttttggccgctcccaggggctcacacctttaatcccagctctttggtaggccaagaggtaggacactagtccaagaccagactgcccaacatgatgaaaccctgtctctactaacaatacaagaaaaaaattagttcagccattgggccattatgtgtgatgattc

SEQ ID NO: 498733 - DNA, 134 bp, Homo sapiens
atagtatagcaggggacaggaattactaggtctcttcctagacttctctctcagtgtagtggaacaggctttgagaatgtggagagcaatgtgcacgagtttgatttcctccagtaacttcccacattctgtgt

SEQ ID NO: 498734 - DNA, 988 bp, Homo sapiens
ctaggtccacaacgagaaaggtcgcccgttatgccatgcgacttttcacggtgaccctaggcgttcccacgctttgcgacgatgcgcttcaatcttacgtggagtccctttctttgctcgtgcgcctaccagcgttataacgttctccaggaatgtgttgtcccagtcatgctttgggaaaacgtgtgttcctcgatctggagggccctccgacgtcacggaaacgtatttggtgtcccatagcctgaagggcctatcgtcgataaagttcccactgtggtatttgcgcggaagaggtcatggtgtaggcttatcgcgtgtcacgcggaccccatatacttggaaaccatgaaaaaggttcctcctagtccccgatgtgaacttggggggtcttctcctttccaaacacggggtctaccccatcgccctctcctcctgagaagcccttcgagtacctttcaccatttgccagtctgtccagtttctgctgtgccagtgaaaggcgcacgtgccccaagagtcgcacacatgtgcagcacccgatagatggtccatagctcataggtttaaaggttccctcaggtagcactcctttgtggcattagacacttctttactcccacccacccttctgcgccatgggtaccccggccataccaggcggggctgaccagagaacgcccagaccatgacctcttacagtatgtgtagcgacaccccgtctcctctcttcaggctggctgtagaatagccagtagtgttagtgacggtgtgctttgacgtgatggcgggtgggcagcgggtcggcgggctacgcgccaggcacgtcttgtccttgatctgcccgtcggcggctccgtgttgtgttttgtgctgtgtcacgcgctaaggcgacaccctctcaccccgtacatgaccttctcgctataagcgcttctcttcgcatagtcagcgtagctcccagccccaccctcttccctgggtctaa

SEQ ID NO: 498735 - DNA, 442 bp, Homo sapiens
gtcacaccgggatatctgctggtgtggccaattgatgaagagctgaatcagctgctacaggagttcaccatagcagtggggtgtgttaccaagatacactccgagttggtagcgaaaagcggggatccaaaggtaagtttggaagcgatcatcacaccacccccaggcaaaaagggcaagtctccatcccagaagaagcctgtatctaaaaaagcaggaggcaagaaaggggcccggaaatccaagaagaagcagggtgaagtcagtaaggcagccagcgccggacagcacaaccgagggcacaccttgccgacggcttcacagtcctctccaacaagagcctcttccttggccagaagctgaaccttattcacagtgaaatcagtaatttagccggcttagaggtggaaggccataatcaatccttatcaaaagacgaggg

SEQ ID NO: 498736 - DNA, 406 bp, Homo sapiens
cggccgcacagcttctcgagtagctgggattacagatgtgcacctaccatgcccagctaattttgtatttttggtagagatgggttttcgccgtgttggacaggtctggttttgaactcctgacctcgagtgatctgcccgcctcggcctcccaaaatgctgggattacaggcatgagccaccatgcccgtcctcatgcttgagtttagatttcatcctgagtctacgcttgaatgaccggtttccagtactgggaatgagatgcggagaccccgtgggtgtggcgagctggccccggagggcagggtcggcactcttcatgctggaggcttggaacagtgtggcttggtctgtgacatttgtcgtggttccggagcttgccttgggtggcggagtgggctcccgc

SEQ ID NO: 498737 - DNA, 416 bp, Homo sapiens
  misc_feature (26)..(26): n is a, c, g, or t
  misc_feature (53)..(53): n is a, c, g, or t
  misc_feature (98)..(98): n is a, c, g, or t
  misc_feature (139)..(139): n is a, c, g, or t
  misc_feature (170)..(170): n is a, c, g, or t
  misc_feature (261)..(261): n is a, c, g, or t
  misc_feature (312)..(312): n is a, c, g, or t
  misc_feature (342)..(342): n is a, c, g, or t
  misc_feature (372)..(372): n is a, c, g, or t
actgcagctgctgcccgtccacaggngccttagcctctcttcctgtgtggaancggggcaagcagggctgtggcagacaggcctggcatagcccaagnttcaggtgtcctgggcagcctgaccggttctgagtagcctnaatgaaaacacctgagaaaaagttaactaangagggtttcccttaatcaaccaattctattaacttaaggttaattggatttgtagaaatatagcctggtactggtgatgattggcataacngtgcttccagaagactacgaagagatccgaacgtgccatgctggctgttgnactggctacggtctcgtagcccgcctgagnagaccttaatgtagctggcacgtgagtagngctcctgctggacctttcacagtgtctagccggctgttgccctt

SEQ ID NO: 498738 - DNA, 1508 bp, Homo sapiens
ggacgccttcaggaggagtctcaagaaaggacagcggtatggacttgcgtatgtgttgcgtcagtctgccagaagctcgtgccagtggcgtcgatccgtctagcaagactgccgccgtgacgtcgagggctgctggctcgtccatcgggaactgctaggccgccatcagaatgctgctcgatcgtatcctgtctaacgtggaccctaggacaaatactgagtgtgaatattctcctgaattttcgttgcattattactcgttaatgccctcaaatagatgacatgacgcttccttgagacaatacattttcgagcaaaatatcggctcattatatcgtgaccagtgggttagctctagaatatggatgtggatgtacgtggtaagtggtacgaaagtattcgggagggacagtatagtgaattaacaaggatggtgttgcaatatttatgggaatggtatttggagtaaatatgtggtttgtcatgccacttctggcacaggcctgtggagagaggtatcaaaggtacgaatcaggtgcgcatggcagtgctccaaggatggtgagctagacgtggaatagtgggtacacataggaagacccagatggttccccgttcaatgtttaccgagaacacttgctggggggcacttcgtccaacctggggaaatagaaaaccaacatgcacggatacgcgtgtagacaatttcaccgtaataagtttcatggggtatatcatcccaggtggtggatccggccacgatactctaattggacacaataggatcgcgtccacgtagaacactggaaaacggtgagggattccttcatttggcacactctttgtttcgcaagcatatagatacacaaagcacattggaatcggatccggtggggcttagagggacaccaattgggcgttcgtagggttcgttgtgtggctcgtactagcccatttctctttacaacaagaggggccgacagtggggtctccggcgtaggcattctccaaattgctctcacaaagttctcgctaaatggggcctttacgagactattaagagttgctaaatgcttgggggcaactgcttgggtgtcgcaaagctatgtcacggcaatgtataacggcggaggggccatacctcccaacatcgaggggaatgtgtgacagagtgtgttgtcccatcacacgtgcaggtcggggcacacattgggcctagcccagggtggtgacagtacacgtttaggcagctccgcgttgtcaacgcgcctagtggggggacatggccaccaccggttacagtggtgtcgccccaaagtgttaaggatatattctcacccagagaagatgtgggtatgggagccaggcttggtgagtacaggcggcgaacaacaaaggcatgtgattaagagcagcgacaagaccatcatgttaatgttcgtcacaagtagagcaaagatgttagtggacactgttatgaggagtgtgccgcgaaccatatgtcagat

SEQ ID NO: 498739 - DNA, 299 bp, Homo sapiens
  misc_feature (1)..(1): n is a, c, g, or t
ncttgagtaacaccgatgtccctgttagtcgtgtggtagacgacaatataacaatctgtgagactgctgaagctggtggcatgcctctagactctagcatcgacatttagctagtactgcatgaattgaatacgtctcgtactgtagcataacacgactacgtagtagtagaattagtagtacatactcgcactcgactagctcgactagactaactagattaattgtgaattacttgactagactagataaactagtactagtcgctagactagtcgatacgtactagtagtactggg

SEQ ID NO: 498740 - DNA, 167 bp, Homo sapiens
ctgttctcgaggatccctgagtgcggctgtatacgggggagcttgatggcaggagaatcgcttgtagcccggagaggcggaaggtatcagtgagctgcatagccactgaattctagcccgggcaacagaacaagactctgtctacacaaaagtaaaaaaagaaaaga

SEQ ID NO: 498741 - DNA, 110 bp, Homo sapiens
tgagcagtgaggcggagaagcggagagctacctggagggcgagtgcgtggagtggctccgcagatacctggagaacgggaaggacaagctggagcgcgctgaccccccga

SEQ ID NO: 498742 - DNA, 691 bp, Homo sapiens
actagttctagatcgcgagcggcctccctttttttttttgtttcaagggtaactaactccaaaattctttatttagtaaaatggtccctttggatgtcaagggaatacacaaactcaagtgtgctacaaacatagatgttacagagcatcacagctcgtgggcaggtgcagctgagtgtgcacctgtgcctctcatctccccgctgaaggtggcaagttcaagctttggttatagcccagggctgccgtggaacactagttgcccagcaccattccgtgccaccttctgtgcccccaagaagcccgtcacgagggccgtgggtgaaaggcgtggggtgggttgacaccgtggggaagaagcgcgtggcaagcttcttacaaaattctttccttccgtgcccgttagctctcccttcccttctcacccaattccgagaagtctgtgcgagggtctcccttaaagagagtttctctatagaaaaaagcggggcgtgggcgccgtgaactgtggggcgtgggtatacccagggggctgtgccccgtgcagagccattccattcagagaggacacgggagggaaagacaccgtgggaagaactttccggggggccccataaccgcaaccacaattcttgaaacccgcgtggtgaaggaagggagggagaaatcccaggggaaggggccgggcccc

SEQ ID NO: 498743 - DNA, 543 bp, Homo sapiens
tgtattacacacctgtattgcctaaagtttctataacaaacatcttacattggaacgatattcttgtttttattttctacaaaaaaaaaagcggggggacgttaaaattaagcatagaaatggtggaactttgggatttcctgtccagccacctgcgagccagggtttattccaattgattcaacgtggcagattaaatgggaaaagtaaaagggtgggctcctttaggcagcaaggcttgcttctctcctgggtacctctgcctacatagatatttggttaagcaagatgtttatacccccacacatattctagaaagtcctggtcatgaagcaagtcacaattttccatatctgcccaatttttaaaaaatgggactaccccatttggacaaaaaatctttgggaaggtaaggttaggccaagccatgggaggaaaaattggaaccaacttcccttggaactttcaaaggaagaaaggctccctttttccttactcaaactcccggtggtatgctggaaaatgccagcaggggaggggcac

SEQ ID NO: 498744 - DNA, 506 bp, Homo sapiens
  misc_feature (78)..(78): n is a, c, g, or t
  misc_feature (81)..(81): n is a, c, g, or t
  misc_feature (89)..(89): n is a, c, g, or t
agagagagagagagagagagagagagagagagagagagagagagagagagagagagagagagagagagatctggtttnatntaggcctntttggtatcctttgatgtgcaactggattattttaaagcaaattctggatgacattctgctgagcatttctgccagaattacacctctctttgctaatgtgaaaaaatgcccatgataactgtaaaatacgtgtgtcctattgaggtgtctaaacactttaatgtcacagtatggaggccttaaaatatcgctgagatatgtttttctaaataaaaagactgcattttttagatatacagaaaattgagcagagaacagtgagttcccatatacctttttgatcccaacagtttcccccttattaacatattgtgttagggggggcccatttatcacaagggaggggatattggatatttttttgattgaactaagatttttatagctctcacttttgggggggatagttattttgt

SEQ ID NO: 498745 - DNA, 230 bp, Homo sapiens
cctgttaggtctgactctagagttatccccggcgcttcggggggtaaggcgaggttagcgaggcttgctaccaagtcatcaaaaagctattagtgggagtagagtttgaagtccttcagagaggattatcatgcgactgttagtgcgttcgtactttgagtttgctaggcagaactagtaatgaggatgtaagtccgtgggcgattatcagaatgactgccccgatcacg

SEQ ID NO: 498746 - DNA, 109 bp, Homo sapiens
  misc_feature (71)..(71): n is a, c, g, or t
tagaggatttcccgtgagacgacttgagtgagcactacgccgacctgcgcatgtacgttgcgcccgagccncatcagcaggccaatcaatactggctggcgcgcaaggt

SEQ ID NO: 498747 - DNA, 169 bp, Homo sapiens
cttctctacagcgaagacaccctcaggtgggctgtctgcccccggccccgtgatgctgtagaaaatcgttggtgtctctatctttattagactagagctgattcagtctctgggggaagggacccttgccatttgcagggacagatattggagcaaccacccaatctct

SEQ ID NO: 498748 - DNA, 105 bp, Homo sapiens
acacaacgctgactcttccctggacatggcaataaaacaccactgcggcactggatcccactagactacaaggcataaattgtggcccagacttcactccatcct

SEQ ID NO: 498749 - DNA, 384 bp, Homo sapiens
actggcgtctggacagaggagctctcaggcagcccgacctatgcttctgggagcaggtttctcacagccagattctcggaaattctgactttctacgtctatgatggggcccaggaccttgcactggggaggagtccctgggaattctgattccagtggcttagagaactctttttttggaaatcgtgaattcactcatctctactcaattcttctcaatatcatccaagactcaacttgagcatgacttaattcttggaacaactttacacagaactcacaagtaaaacattgtacaatgcttatctgaactgtgctggttacatagaagatttctcaccttccagaaacgcccatcaaggtaccctactttagacagggagg

SEQ ID NO: 498750 - DNA, 1940 bp, Homo sapiens
cggcggcggctcccgggcgtccgggcccggtggcggcgcgtgctgtggttggctgagcgccgcggtgccgcccggttccttctcgtgccgaatcgcgcacccaggttctcgcacaccgttaggaccgcttactagcttactaggaccggcgctacacagcactcgcactcctatatcactacactcacccccaggcacctgcacacacagcattcctgctgaccaacctcgctccaacttgcttgacaatagacccaccctgcgcgcatgatcagacgcacactaatccatcacaccgcaactacctgcgaaccacctaccgtgcccgcagaccatgagaacctaagccctgccccgaccacatgcgcagcgccaccatcacaacctcgccctgcgtacccctctacctaaactctcacactgacacaacccccgtactcgaccactaaaactaccagcaactcccaacccagctcaggccacacctcacacgccgcaagcccccacacccgtccattaacacacggcccggcgcacatacaccagccaccaccccacaacacggaacagctgcaaccgccacccccacgcccacacatcacctacaaccacgacgacgcaggacacactaccatcaacacatggcatacgaccaaactccttcaacacccgttaacgcgcagtacaagacagaaacgtccatactcctacaaaaccccacctacggcacacatttacgatcccgcatacaatgcagacacactccaaactcagactcgacagcaaaccaactatctcgcacaccaactccccccacacagacctggctccgaaactccaacaccgcacacaaacggacaactgacataccaacacccgtccaccacgagctttgcggcgaccataataacaggaaaataagagtagcacagacatcgcaggaactacaagcacatagtagcaaattcagtactggaaacagcacacaataacagataggccaggacagcacattaggcgacaatagacagacaaacagcacaaactaaataccaccagggtagaaagaagaagcgcacaaacaaagacgcgaaaggcgagatccaaattagaacacaaaagaacgcacacacggacacagccacactaccgaaaccactccgccaccagcacacacagaacagacacaaacaaatcaccgaccaaccacccacgccaccacccacaaccgcacgcgccacccacactcatagaccccgagcacgaacacccggccacgacggcaaagccccaaccacttcaacgccaacccatacatcccacaagcggaccgccacacactccgacacccagccacacaccacgaacgaacacccaacacacacaccccacaacacacggcaaacaccaccacacacaacgaaaggaacacagacagtcaccaaacacatgacacccacccaccacgacgacccaccgcacccacacacaaccaccacccccatccacacccaatacactaccaactaccataaacaacaccatccatcaaactaccttcaccatcctaccacaccacaaacacctccacaacacaacaacaacaatacgctatacaccaaaccacacactcaacaagaacacgaagaaaaagataagcaaccacacgcgcacgacaaacaatattacaccaccacactgacacatatgcatccacaacgaaaccaccctaccacacgaacgcaagacacgagacaacgaaagagacacagaaccaagacagagaccatcacaagccgcacatctctcctcgctctatcaaccacgacgaacgcaagacacccccacgacaaacctggaccaaccacactcgaaggccacgacacgcgacactgaccagctgagcgaccaccctctcccgcacaaacaccacaacacat

SEQ ID NO: 498751 - DNA, 120 bp, Homo sapiens
ccagtgcatgcaggtcactgatttcatcctctagtttccgcacagtgcctaccataagtatgtccgacaagcctagtagaagggagacatcaatactcattgtaccgacaggtattacca

SEQ ID NO: 498752 - DNA, 308 bp, Homo sapiens
cctccttatttgcacagggaaccttcaaacaattgggagcagaagcagaatgatgcctgtgaagcctttgccccttatcctcagctcgctgcctcccctcaactccctccccatatactgcggtagctgcatgactccagcaggattccaccatgaaggtcaggaagccttcagcagggggcaagcattgcctggcgaggatgtgggtgctccagacagcctggatcagagttgactccagtcttgggtgagaatgagattaagggctccaagaatgttttccttacaggattgacagaataaaggca

SEQ ID NO: 498753 - DNA, 140 bp, Homo sapiens
tgtagaataagcatagagcatgaaacccaagaatgaaagagaaaaaacacaaagagaaagagagagacaaggagaagaagaaagaggaggtcccgaattcttgtaaaaactgctgaacaaactcttcagtttctcttaag

SEQ ID NO: 498754 - DNA, 979 bp, Homo sapiens
cacccctctacacgctgggcgtcacctacccggatgagaacgtcaagtccagctgctcgcccgtctacattgccatcttctacacagcggccatcctgggtccagctgccggctacctgattggaggtgccctgctgaatatctacacggaaatgtggcctgacgtgacggacgtctgaccaccgagatgcccactgtgggtcggcgcctggtggtgtcgtgcttcctgggctctggggccgctgctttcttcaccgtcgtttcccatccttggttaccctcggcagctgccaggttcccagcgctacgcggctcatgaaaggcggcggacaaatgcaccagattgaaaggacagcagccgctggggaggcgtcgcaacccggacttctaggaaaaccattcagagtactctgcctctctcctatctggctcctgctggaagaacccccaacagtacattccgtgcttctgctcgtggcctggggccgcctgaggccactcgtcatctaccggcatgtccagcgttcaggcgcgcaatgttcttggcagttgccaggttcagcctgagtgcctcagaagctgccaccttgctttgggtacctggtgctgcctacgcggagtggcggcggcaccttcctggcgcggcttctctatgtgaacctagctcaggctccgcgggctccgcgtgtcatccaagtactgccctgttctgcaccgttgtacatcctgctggcgcatccgtcgacctactcactgcactgccccagtggtgcccatggcggggccgtcaccgccagctacggcgcgagcctcctgcccgaagggcacctgaacctcagcggcttccatgaaaccgctgtctgcagctggcacccgagaacctacagccctgcgacggctccgaaggacccatgaagactcaattgcccacagggtaccagcacacacggaaaagaatgtggaacggcagaaggcaccg

SEQ ID NO: 498755 - DNA, 955 bp, Homo sapiens
tgtgctactagacaactggtaaaccgggaatgatcgttcaaaagcagagacctgctttaggccagggaaacaggaaaagaattgagggaacaatctgtcccaccacatgcatctacgtgcaggtctgtgctactgagcacaactggtaaaccgggaagatcgttcaaaagcagagaaagctgatatggaagaaaatgaggcagcatttcaacgtgattagactgaggagacccacatgtaaactgctctagagctaatgcagtctacaatagatggcagagagggtgcaagatgaggaggccggaagatgatgactgggatgaacaagtattgcaagaaagccgcgctatgagtgggttcagatagcttccacgttgaccttgtaacaatagtgtggatgaatatcagttttttacaacgaagctctgataactgtgcagagtcgagatgcagcctggtaccagctgctgatggcaccactcagcgaggatcagaggacagcactgcccggaggtgtacacactgtcagagcaccgacggacggtggcagaggcaaagaagaagattgaacaacagggaggcttcacctttgaaaacaaaggagtcctctccgcatttaatttgggactgtgcccagcaacaactgaaggaaagaacatcagctgaccaaatgtcatcgctgcgttttatttcccaagaggagtgtgagggtccggggatgaacatgaggggctgctttagggcctctgctgtgcagttaccatctgccttttgggcacgcctttatctactcttccccttgaccttggccccggcatatttttttaaccgctctggtttgactggagacaccactggcgggaaggcaccctattccaggggagccagtggtaggtgggtactcggcgcccgttgggccgaactgggttgggacaaggcctgtggtctataccac

SEQ ID NO: 498756 - DNA, 288 bp, Homo sapiens
gtgcatatggctcacgtctgtaatcccagtcacttgtgagtaaggctgaggcaagcggatccctggaggtcaggaatttgagaccagcctggccaacatggcgagaaccccgtctctactaaaaatacaaagaagttagccatgcacggtgacaggcacctgtaactcccaactactcaggaggctgaggcacaagaagttgtttgaacccgggagaaggaggttgcagtgagtcgtgattgtgacatccctgtccgaggcctgggcaatagagtgagtctctgtttc

SEQ ID NO: 498757 - DNA, 460 bp, Homo sapiens
  misc_feature (65)..(65): n is a, c, g, or t
cagctgtgttgggccattccaaaaaatgtcagagaaatctgtctcggggtaaaatctcagactcnttcaggacctgctttcaggtgatgctatacagagcgcatttgaagttgggtatcttattgctacaaggcgtttcttccgtcagtcttaggatctctattttcatgtcactgctgctcagttgggtctgaaccacaaagggtggagggaatactgaggcgtgcccgacccctcttctccctcatggcctgaatgaagttttcaggtttatttgggtccccttggctgagaggaggatccgttcagttcattgaggggcttagaaatttaattttaatttacattgtaaagtgtaaacatatacaatgttgatcagttatacctgaatagagctgagggaaaagagaataaaaggaaccatgactaacaacaatgaaaagaaatggaaaaaaaaaaa

SEQ ID NO: 498758 - DNA, 374 bp, Homo sapiens
catagttgagcgctccggatactcagacgtcatgagtgaggccttgccgccgagcagtttaccaatataattgtatgctctataatgtgaccattcaagatgtgtaacatatgtcgctaccaaagacaactgctacatcttacatgaaagattctctaagaatggaccaactacctctgccattgtatatgtgcaggatactaagcagatccaagtcgacaaggatctacagtacattggacgacatgttacatcagagatggcagctcagttagatgtcgagcagctggtacactcagtccacttaactcataattcagatgaatcatcaatcatcacttatgatgcatccattttcacacatgactcacgtt

SEQ ID NO: 498759 - DNA, 411 bp, Homo sapiens
ccctacagagatcttgtggaatagttttctaaactggaacgtttcaattaagtcctcaacagatagaaattatacatgcctcattctcagaccactttacagtaaaatgagatattaaatataaaggctgggtgcggtgcctcacgcctgtgatcccagcactatgaaaggccgaggcaggtggggatcaccgaaggtcaggagttctagaccaaccgggccagcgtggcaaaaccccgtctctaccgaaatatacaataattagcaaggcgtggtggcatggctcaagtggtcccggctgctcaggaggctgaggcatgagagtcgctcgaacctgggatgtggaggtttcagtgagccaagattgcgccactgcactccagcctgggcatacagagtacgactcttatc

SEQ ID NO: 498760 - DNA, 127 bp, Homo sapiens
gttccagggtgacagccacctggagcagccgggctgtaccatcattgtgtggatgagaacatcgagaggagaaaccactacttagacctggcggggatagagaactacacgtctcagtttggacccg

SEQ ID NO: 498761 - DNA, 173 bp, Homo sapiens
cagaatacagactttatttttatttaacaaatggataccatattaccttcatgggtgggaacagcttctgcaagcataaaggggaagagaaaaagttagaatggccgcctcagtttctgggcaatattgaggtccagattttcatccaaaaagctgtttgcaatccccagggc

SEQ ID NO: 498762 - DNA, 310 bp, Homo sapiens
caacatcctctctaccatccccaccacagcatacagcctccagacacctgcttctactcagaggactcaggtctcatatcacgtctccatgacgcttcaaataaccattcccgcctgtgcagtccacacatcactctgagctgtccaactcctctgtactccatcatgatgctgtccatactcctcatgatgctgtacaccatcctctgatgcatgtccaccatcctctgatgcatttacagcatgtccaccatcctctgagctgtccagcagtacacctcctcagtgctgtacaaatcctctgtgctgt

SEQ ID NO: 498763 - DNA, 214 bp, Homo sapiens
tatgcaggtaagtgatgtaactcctctaagttagaggcagaaatagtgagaacaagatgttattacttttttaaagtatccacggtatgctgtctaccagagactcacggtagattaaaagacccaaatagtactttaaaaattagtccggcatgagggtgctctccggtagtcctagctatttgggggactgagtggggaggatcccatcagc

SEQ ID NO: 498764 - DNA, 377 bp, Homo sapiens
cttcgagtctcggtacccgtcagacgctgaactatgtgtatgtttttatgactgtaccatgctgttttggttactatagctttgtagtatattttgaactcaggtagtatgatgcctccagctttgttatttttgcttaggattgctttggctatttggggtctttagtggttccagataaaatttttggaatttttttttttttttttttgaaacaagatcttgctctgttgccctggagaacaggggcatgatctgggttcactgcaggctccacctcccaggttcaagggattctaatgcctaaccctcccaagtactggaattacgggcgtgagccaccatacccagccgggtttttttcaataaatatatgg

SEQ ID NO: 498765 - DNA, 383 bp, Homo sapiens
tccaagtatcttttctttggactccgagaatctcagaggttcttttatctctcgaatatgctttgccagctagtcggataccagcatctcttcgtcttcactctcagatacactgtcatactctccagcagctagttctcagctcttctatactttttctaattcttccaatttcttcatgataggctggatcaatatgatcagctatatatataggccttcccagatttctggtatcttatcatgtttttcagacaaattcattaaatcccagtacttctgaagatccaaaatataatcatctcccatttccagctcaagatctcgttccctcttcttcctggactcctcagtttccatcctcttcctgcgagccaccactc

SEQ ID NO: 498766 - DNA, 1008 bp, Homo sapiens
ggagcgggggccgcactggggagtgtgggctgggccgcgagatgtcatgtggcctgtgtttgggaccgtggttctgtacctatggctccttatgtcacattccctgttgccttcgtgagtcggggctgtgggttaccacctggaatggttcatcaggggaaatggacccccaacccgtggaggaggaaaagagctatctcagagcgccggtgaggatcgctatctggattgagcttctaggcaaggaccaaatcgcaggtggtgagccttaacggtactcagtctagcaattgggccccgaatatgctgtgtctgaagcagaacagccgcccagagatagaattaatgtgaggacacagggtccctatggtcctactgtgggtggtgacttgtcctgctaccatgttgacagagccccagtaagccacatctaattggctttgttgcttattctggcccttcccacagcacagaggcacacaaatactggctgctccttgatggccatggcagacccagcagcagccgaggggccagtgaagaggaaggccgcatctgtcgtgtggtggccacaagcactcaggcatctgagtttactggtgcactgctgggaggagagtcatgagatgaacattgagtgtcaatctctgtgggcaggcgggtttgggctctagtgggaatggctagggatttgggccgttgcctttagaaggggatacctgcactgtctacgttccagtactgcaactggaaaagaagttcacaatatgcacctgggctcccttcaagtatcacggccctatcctttgtgctcactttttactgagagtccggtcttgtcaagctcaggaaattggaattccgccaggaaggaaagaacttgtctgatctgggaagccaaaatggtcactttggggcaggacaaacattgttcctctgtattggttggaaacggaccattttctaccccataagtattaggaaaagtgtaaaaggtattgaaccata

SEQ ID NO: 498767 - DNA, 148 bp, Homo sapiens
cgcattgagattgctcggggcgaataggtatgtgattaggatagggcttaggatgagtgggaccgaagaaagagaggaagtaaagtttaatatattgtcctcttttggcgtcgagagtaatcccgtgagagggggtaccagagctcga

SEQ ID NO: 498768 - DNA, 788 bp, Homo sapiens
tttttttttaagaaggaaaacccggtaatgatgtcggggttagagggataggatggaaaagggggagataggtgtatagaccatgagggtgtttcctcgtgtgaatgagggtttaatgtggtcaatgtgtgggtggggtgagtgtgaagccccatgtgtggtgttgtggtggataaaaatatgtgtataaagggagataatagggcgtggtgacttagttagtgtgtgagctccgtgtataagtctaggacgagtgtgaatattgtgactcagagaaaagtggtggtatactcagcaacagagaagatttcctccccaggatagcgctataaatagcgtggggggtataagggccggaggttatagccgaaggtccttgtgctagaaaagtctcattcaaaaacgcttatttagcgtgggaagttagaagtattgtgaagtctccctctggagaaagaagtgactataatacactgcgcaaacttgggggagactgtcgcgcgtctcgcgcaaaccttacgagagtgttatgcgctatccgcgcacacacattatctgctaacactgcagagagtatgtagtaaaatgtccacgagcggcgcgccacgaatccttatgcgaaacactattgcgcatctgggcgcgccgcgtgtcagaaaactctctccaagggcggcgagtctacgggagtcttcagcacaccatgggcggctctgtcgcacctaccaccaaacgggcggctccatctaggcgcgctgcgctttcgccacacccaactttattgagcg

SEQ ID NO: 498769 - DNA, 297 bp, Homo sapiens
tagtaagtctaacctactttttcttcatatgcattgcctattctctagatactttattataagtggaatcaagtaatatttgtcccttttgtctggcttctttcacttagtatgttttcaaggtttattcatgttgtagcacgtatcaacttcattcctttttatacgtgaataatattccattgtatgtagatatcacagtttgtttatccatttgtctgtggatggacgcttggattgcttctaccttttggatactgtgaaaatgctgctatgaacattggtgtacacgtctct

SEQ ID NO: 498770 - DNA, 150 bp, Homo sapiens
agctagatgctctacatttagtatatgtatattagtaatacctgatttcattatagtatagtactagtgtgtagtgtgtgtaatatagctcattgggcatatattatgaatggttactcattaattcttattccaggtaaattccatcaa

SEQ ID NO: 498771 - DNA, 439 bp, Homo sapiens
tggagaatcccaaaggggccagttttggccccttcaggtcctgtttcaggatttgttctggttcctgaggtttagggtggtaaggtgagccacacacccctccgtttgcaccagttgcctgcaggttggatggaacccagtgccccacttttttgcaagtaggtgggttgtaaagggtgaacaaagccatgggaggaaggtttggcattgggaagccgccctggggacaaacgaaccgcctccttccccccttgtgccctatgggaggccggtggtgggtggagcccttaaagtccagcctccagggccggaagcccctcctgtttcccgctcccattgggcccttaaaagccaaatttggtggagggaaaaaaaaaaagggaggaaaaaaggtgaataaaacttctggtcattccttgaaaaaacttgattttattta

SEQ ID NO: 498772 - DNA, 496 bp, Homo sapiens
  misc_feature (7)..(7): n is a, c, g, or t
  misc_feature (68)..(68): n is a, c, g, or t
  misc_feature (192)..(192): n is a, c, g, or t
ggaccantcgaacgtgtctatctctagttcctgctgggaaagatggagcccccgaatgtgtctatccntagttcctgccggaaaatggaaccgccatcttgaacgtgtctagtccctagttcctgccgggaaaatggagccgccatcttgaaacgtgtctagtccctagttcctgcccggaagatggagccnccatcttgaacgtgtctagtcgttagttcctcccgggaagatggagccgccatcttgaacgtgtctagtccctaggtcctcccgacatcacccgtacaagctcccagctggcttgtgtatgtctgcagctcgacttgacaggctgttcattgttagaaaatgacttggggctgctcgttaaggagaaaagctgccgggcgcagtggctcacacctgtcatcccagcacttttggaggctgaggcgggtggatcattaggtcaggggttcgagacgagcctgaccagtgaaaccgcgtctctact

SEQ ID NO: 498773 - DNA, 773 bp, Homo sapiens
acccgggggcgtaaccagagacgagtgcacgccccccgggtgtcccatgaactagacgttcaaagactccgagaaattgagagcgcatgaaagaggaattctgttccctgttaagatgagcatgctgcctgaccatgggaggagtaaggttgcgcagttcctgggcggaccagactcgttgctacagagaacaactgccgactcgacagaccgatgtccagattaccagttgtagatcctcctatatcatgaagaaatcgaaatattaagcttgatgtactgataccacacagggagtgaataaccgactaagatacttctacatagcacatcacaacaatacgagaggatagggcgcatatgagcaggtggcatcaatggcctataacataaggcacaccaagaagcacccgagggcatgaccacctatgacttcgacgaccttcgtgagactcgaaaggatcgtgggcagcaaggagactccctgttaatgttgcaatggatcaccgtcgaaggaccgtctggtgaacaatgtaagacagatcgccttaaataataggacctgcaatgaaaggttccatacggcaccagcggtcatgcaccatattggctcaagtgccataggtcggccaggcaagcttttcgaagcagtgatctcgagaccctgcaattgcgacctatcgttacttcgtaggagtcgaatggtcgactctgcgttctgaagctccacgtagcatgggacagagacgtaggcgttttacaagtactccctg

SEQ ID NO: 498774 - DNA, 119 bp, Homo sapiens
actggcctgtgggtctatgccagcagccaggcacaggcagcccgtcggggcccacgggacacggctggtccaggcctggtggtcccggctcgcccttctggcccttcactcctttccgg

SEQ ID NO: 498775 - DNA, 1025 bp, Homo sapiens
  misc_feature (238)..(238): n is a, c, g, or t
  misc_feature (1025)..(1025): n is a, c, g, or t
atggcacatgcagcgcaagtaggtctacaagacgctacttcccactatcatagaatgagcgtatcacctttcaatgatcacgcgcctcataatcatttggccttatctgctgtcctagtcctgtatgcccttttcctagacactcacaacaaaactaactaatactaacatctcagacgctcaggacgagtagaagagcgtctgaacctatcgcatgcctcgttgcatcagtccgtantgcctcatcgtcacgcatctcctatacctctacgctattcctattacgatcaacagacgaggttctaaaggtatcccttgctcattatccatcatagattcagattctggcacgacgcgaaagtggtacctggatgccatacggagttgacaccgactttggggcaggacgtaagattcttccaatttcactacatactttcccgcgcatttatatccttaggaacccagggcagaaccttgggggacatcccatgtgaccagatttgaccaaactcaggaagtataagtacttcgccgaaatgggaaagtacccctcgaatttcggctatctaaatcacagttaaactatgtcgacccaaggaaacggattctttgcaactatctagttggaagccatggttcccccgaacaagttataatggggcggtttaaaaatagcaagaatttgactaagtttaccctcggggaacgggtttctttaaaatcggaagatatgacaagtttttaaaaacaggtttaagaagggaaccggaggtgaggataattgacttaagcggtgttcaaatggcatttcctggaacacatttccctggtgtggaagggcaaaataacccaccatggatttcggatgagcccccatatcgtttaccgtaagagaatggtcaacatttcccggcgataaagggaatactcttgagaaacgctaaagggggccccggtacttggtaccccacttattaggcacccgacctctgtttaaccccacagtcttacaaaggccaaan

SEQ ID NO: 498776 - DNA, 1116 bp, Homo sapiens
ggctgacttctgcatctggaacactgccttcatcttgaaagaaaagctccaggtcccttctccagccacccagccccaagatggtgatgctgctgactgctgctttccgcactggctggcctcttcggctgcggccaccagggacaagcatttcatcttgggaagctgccccaatcctccggtgcaggacaacttttgacgtgaataagtatctcggacagatgcgtacgaacacttgagaacgcatcccaacaacctcttgacgactggaccgctgcatccaggccaactactcactacctgcgcacaacacggaaagatcacaagctgttcaaaccacggagtagacgacgctgaattggccctggtgaatcacatctctgaacgggctgaacgccacccccaagttcaagctcacaggagcctgccacacctggacagtgcacacgtcatccccatggctaacagcgcagtacgggcaccggacctaggagatcccctgaacacaccgactacgagacaacgcactgaccacccgcaagaacaccacagcaccctgcacacataacacaacaccgacaacggtgcaccacagcccggacccagacacaacgcaaccccactaccactaccctcacacaaaaccgagagacactcgactaacaacaccagccactagacacccccagcacacactccgacccacaaccaacacagaacgacgaacaagacccaaggatcagcacgagccaacagacaccccgcaccgccacgcacacacaggggcgacgcacacgcaacacaccctcactgggaacagcaccattgaaaccggagtccacacctagacaacgaccggtccccgcggcgtagaccaagaatcacgactacgcggagacctggcccagaagcgaagagagaccaagcgggtatagtagagcgagagagcacgagccggcagcggaagacgctcagagagaggcaactaggagggggcagggagcgtcgcaagaacgaaagcagagagtgcggacgacacagagggaccgcagcacgaggtaaatcagtaggccggagggacgtagaggagacctagaaaacagccaccccgccggc

SEQ ID NO: 498777 - DNA, 294 bp, Homo sapiens
  misc_feature (13)..(13): n is a, c, g, or t
  misc_feature (15)..(15): n is a, c, g, or t
  misc_feature (18)..(18): n is a, c, g, or t
  misc_feature (21)..(23): n is a, c, g, or t
  misc_feature (25)..(25): n is a, c, g, or t
  misc_feature (27)..(27): n is a, c, g, or t
  misc_feature (30)..(30): n is a, c, g, or t
tcggcccttactncngcnccnnncncnacncatccggttaccaccgcgcagttacaacagctccagttacaacagctccagttacaacagctccagttacaacagctccagttacaacagctccagttacaacagctccagttacaacagctccagttacaacagctccagttacaacagctccagttacaacagctccagttacaacagctccagttacaacagctccagttacaacagctcgcagttacaacagctgtagataacaggagctgtagtgacaagaagcggaaa

SEQ ID NO: 498778 - DNA, 237 bp, Homo sapiens
gtcgctctagcggatcccagtccgggtcccccaactcttcgttgtctgcagctcatctggtccctcaagtaagtgtcttccggctcctttggtatcttcctttctggtcttgcctcctacctttggtctcttggtgtgtggggactgtttgtttttttttgtttttttttgttttttttgtttttttttgttcttttgttcttgattgagattaggttgttcattttagcttttttg

SEQ ID NO: 498779 - DNA, 298 bp, Homo sapiens
  misc_feature (13)..(13): n is a, c, g, or t
  misc_feature (15)..(15): n is a, c, g, or t
  misc_feature (18)..(18): n is a, c, g, or t
  misc_feature (21)..(23): n is a, c, g, or t
  misc_feature (25)..(25): n is a, c, g, or t
  misc_feature (27)..(27): n is a, c, g, or t
  misc_feature (30)..(30): n is a, c, g, or t
tcggcccttactncngcnccnnncncnacncatccggttaccaccgcgcagttacaacagctccagttacaacagctccagttacaacagctccagttacaacagctccagttacaacagctccagttacaacagctccagttacaacagctccagttacaacagctccagttacaacagctccagttacaacagctgccagttacaacagctattagctctagcggtccatgcatacttaatattatacttgaattcaatacgagctgttgtagctggagctgttgtaactagagct

SEQ ID NO: 498780 - DNA, 256 bp, Homo sapiens
  misc_feature (134)..(134): n is a, c, g, or t
aggaatgagctgctgtgaggaccgtcatcactgtctctctgttgtcttcctacttcctgaaccttgactcaggtggttggtgtcctcatccacagttctcactgacctctaagctccaggaatggcagatctcnacccctaagccttcacatccgtttgctgtcatgcttgtgcccacaggtttctcatttggcttttggtcatgcccatgtgcccatgtgtagacatgaaatgccttgtgtcagatggactctgg

SEQ ID NO: 498781 - DNA, 359 bp, Homo sapiens
  misc_feature (13)..(13): n is a, c, g, or t
  misc_feature (15)..(15): n is a, c, g, or t
  misc_feature (18)..(18): n is a, c, g, or t
  misc_feature (21)..(23): n is a, c, g, or t
  misc_feature (25)..(25): n is a, c, g, or t
  misc_feature (27)..(27): n is a, c, g, or t
  misc_feature (30)..(30): n is a, c, g, or t
tcggcccttactncngcnccnnncncnacncatccggttaccaccgcgcagttacaacagctccagttacaacagctccagttacaacagctccagttacaacagctccagttacaacagctccagttacaacagctccagttacaacagctccagttacaacagctccagttacaacagctccagttacaacagctcccataagataaaggggggtggggaggtaacagtcgaggcaagaaaaagatctatttaggattcagcttgtccacgtctcccacagcgcttaagcttcatacttgttccgtcacttcatccatcagcgcttgtatctgctgtggcttgactgttgtaactgg

SEQ ID NO: 498782 - DNA, 279 bp, Homo sapiens
  misc_feature (13)..(13): n is a, c, g, or t
  misc_feature (15)..(15): n is a, c, g, or t
  misc_feature (18)..(18): n is a, c, g, or t
  misc_feature (21)..(23): n is a, c, g, or t
  misc_feature (25)..(25): n is a, c, g, or t
  misc_feature (27)..(27): n is a, c, g, or t
  misc_feature (30)..(30): n is a, c, g, or t
tcggcccttactncngcnccnnncncnacncatccggttaccaccgcgcagttacaacagctccagttacaacagctccagttacaacagctccagttacaacagctccagttacaacagctccagttacaacagctccagttacaacagctccagttacaacagctccagttacaacagctccagttacaacagctcggccattatgcattacaaccagacagttgatatttggtcagtgggatgcataatggccgagctgttgtaactggagctgtt

SEQ ID NO: 498783 - DNA, 347 bp, Homo sapiens
ccgcgcgcgtatcggggtccgggattttggcccagcccccgggggctttactccagttcccaacaagttcctcatcttcatctgaggccacctcagcctggactttgttgtccatattgctatcagcatttgggggggacgggtcaacagtctgtagcactgcccccttttttcccccgggagccccctgagccctccaaactgttccagcctctgcctgttacccagttccaaagtcacttccacattttgggtatttcttcagcaggtcccaatctactggtaccaatttactgtattagtccgttttcacgctgctgataaagacatacccgagactgggaaga

SEQ ID NO: 498784 - DNA, 290 bp, Homo sapiens
  misc_feature (13)..(13): n is a, c, g, or t
  misc_feature (15)..(15): n is a, c, g, or t
  misc_feature (18)..(18): n is a, c, g, or t
  misc_feature (21)..(23): n is a, c, g, or t
  misc_feature (25)..(25): n is a, c, g, or t
  misc_feature (27)..(27): n is a, c, g, or t
  misc_feature (30)..(30): n is a, c, g, or t
tcggcccttactncngcnccnnncncnacncatccggttaccaccgcgcagttacaacagctccagttacaacagctccagttacaacagctccagttacaacagctccagttacaacagctccagttacaacagctccagttacaacagctccagttacaacagctccagttacaacagctccagttacaacagctttggcttctgcttcttttatctcagatgctttccgcttcatttccttgcacgaatgtctcacagtctattgaagcggatagcatctgagactc

SEQ ID NO: 498785 - DNA, 159 bp, Homo sapiens
tctttccaagcggagatgctgaccaggtggcgctgaacccgcagaacaccgtgtttgatgcgaagcggctgagtcggccgcaagttcggcgagcccggtggtgcagtcgcgacatgtaagcactggcctttccaggctgatcaactgacgtgagacaat

SEQ ID NO: 498786 - DNA, 1052 bp, Homo sapiens
gacccacgcgtccgggatttgtatatgcaacacagtaaggagatcttccattttactacctttcaagtgaaaaatagcctatcatacaatatgcttgatttcagattttcatactaaaacttaactacatacttaaaagtaggttcttatcaagggtctctaacattgctttttaaaacaagatgtgaactaacttttcttaaacatttttttaaatgcttcatcttttagttttatataaagaatcccacatgtacattcttgttttagaatggggtgactaccttattataaaattccaagtttccaagagacttcttttcattgaggcttcgtaaagttttccattttgattctgactacacataaaaataagataaccctgtagttatcaagggtctctaacattgctttttaaaacaagatgtgaactaacttttcttaaacatttttttaaatgcttcatcttttagttttatataaagaatcccacatgtacattcttgttttcagaatggggtgactaccttattataaaattccaagtttccaagagacttcttttcattgaggcttcgtaaagttttccattttgattctgactacacataaaaataagataaccctgtagttattaagtgtggttctgtacaagaaacaggtaagtaacttattgtaccagttaatgccaaaaatattgttcacgttaaatattcttcaggaaacaagggtaaaggtatgcttagaatttatgtaattctgtaactaattcagtatattacgttatacaatctttatatacaatgacttttccatggggtactggtttggggaaaactaggtcacgttttctcacgcctatgtaatattatgactgccagctaacacctataattcggctatggaaagaaatggtcctttaagcgtacggggttccacggttacagtcacggtgtcaactgtcaagtcagaactatataactcggcacgtcacactgtatattacacacagactaacacagtagtacgacaatcctcacactagaactaac

SEQ ID NO: 498787 - DNA, 442 bp, Homo sapiens
  misc_feature (278)..(278): n is a, c, g, or t
agcaggatctagggagccttaaccgtacggaggggatagaggtaccagatccatggtggaggaacacttatgctggatatgcagcaaaagaagcagctagtattcccagatcgtgtccctcaaaggcagttttcttccttctcatttatcactcccaactattctcccacgggaaggggatgggccatctggtctcccgggttcaatttcattcccacaggacttataccttctaaaaaacctcaggatttacttcaacattcaggttatgggtgggntacccccaataaaatggaaggtccgtgacagaaggaaatccggtcgggcctgtacatattgtctccagggcctaacggaagggtaggccatattccaccaccctcctatcaaccctaaggtaaggcgacgacggccaagagaactgggccccttgccaaggcta

SEQ ID NO: 498788 - DNA, 781 bp, Homo sapiens
ggcaggcgcattgggcagagggatggcaagcttgcgtgccccagcgacacaggcctcgaggctgtctctgacaggtgttcacaggcaggtggggacgcctctgcgcgaggaacgaggcagctacgggccttgggccggggttattgccatgggcaagcggttgccggcatcgaatgcataattcttcagcgagttccacctcaaggctgggaccccaaggatcacctaatcaggtcccgtgaagactttcatctccccgaagagcttgtttgggacgacaccacacagggggtcccacggttgtcaccatttttcccaaatttttttcccaagaacgccccccacacacaaacaacacatgtggggtggggcccccccaccagagcgcagcaacagagccagggggggcgcaacaccaatcaacaagagggcgcggtcccgtcaccacacatccatcattctcgttttgtcggggtggggggcgctccccccacctccataacacaaccacatcactcgcgagcctgcccatcaccaccaacacaacaccacaccatcatcaacaaacaccccacctgctcaacccaccacacaaacataacacaaacaacacctctctcacactcaacactagggtgatggcgtgccgcatcgaccaaccctccaccacccactcttctcttctatcttcttcttctttctcatctccacacctcctcacaccacaaaacaacaactcaccccactcctctcttcttctccccttctcctccacacccca

SEQ ID NO: 498789 - DNA, 220 bp, Homo sapiens
gctgggaaagagtatgcacagggaatgcctcatcttgggatgtatctttcaatccgatattcaggtcatagtggaaagacagcagagcacgtggctctctctctgtctctccctgcatctcgcagtctctgtctctctcctcggtctctgtctctggctctctcatgtctgtctctgtctctctctctctctgtccttcctttctctggcgctttatcct

SEQ ID NO: 498790 - DNA, 1214 bp, Homo sapiens
cagaaggcgcagctggacgctgtccactaacttgctggccagcaagttatttcaatggagactcaagagacccacctctggcctgccacagcaacatcctgaattcactgttttcagtgttgattgtagtaaggacaatcacatttacattttgcttgtaatggatgattaaataataagagtatataaattcgattgtatttgtttcttacaacacttctgtaaagaagagagggcagctatttctaatgcattttataattgaggaaattgtacctcattggccaaaatctcacagtgacatagtcgcgactggaaccaaggtctccatatgcaattatcctattcatggtctacctgctttattagatctgtaattgaatattcaatgatttggatttggcatgcccaaattccagtgttttaatcccttttcaaccattacctcacgtttagtttaaaagtatcacttgatatctgatttcaatagagtaatagaattttagctttatccaattacagcatttatgctttccagatattttttggactaaataattctcattctgtataaatgtgcatagccctcatcattagtcatgtattgtgttagcacctttgtgtactgcatgtgtattcattactaagcactattgtagatgttgaaaatagagcagtgaataagagagatagatgacaaataaatatacaaacaaataagataatctaagtcagtttcccattactggattggatttctattttaacacttatttctgagtacttgtggggtgatgccaacattaaatgttttgaggaagctcctttgagatggctttgaaaagtcctaaagtgagaaaatttaaaattttcccaaacttatttatgtggggtgtgcatgtgtgtgcctgtgcctgtgtgcgtgtgtgtgtgtgtgtttttaagtaaccgcatcatggctgtaatcagttaagtctcctgttctaattactacggaggaatcaaatgaaccccattgtcgaatgtagccaattatgtatgtgtgtacacaaatacaaatttttatgatagcctatattgtatattagcattatatttgtatatcttttttattctgagcaatatttgttctagctaagcacatttacattcataatttacagccttactaatgtaaataaaagtaaatatgtaattgaatgttaaaaaaaaaa

SEQ ID NO: 498791 - DNA, 284 bp, Homo sapiens
accgagttctctctgtggggactgtaatctgaccatataccggagttgaatattgttttcatactgctgtggtttgaatgttccctccaacactcatgttgagacttaatccctaatgtggcaatactgaaaggtggggcctttgagatgtgattgggtcgtaaggctgtgccttcattcatgggttaatggattaatgggttatcacaggaatgggactggtggctttataagaagaggaaaagagaactgagctagcatgcccaacagagagagcgtccgtc

SEQ ID NO: 498792 - DNA, 199 bp, Homo sapiens
tctctaaaaaaggccttatgttgactaaagaaaacataggctttagtttcagcttctgtcagaattagtaccaattctgaatctggtggagtgataagacatggtttcatgctgggaagacactgctgaaatcctccttgtgggagaacatggaaattttatactgaattaaattaacgcatgtgacttttcccattca

SEQ ID NO: 498793 - DNA, 898 bp, Homo sapiens
accacggtgtgctggcggcctgcgggcggcgctgtggcccgtcgggcggtccacagagccgccctagccttccgccttccccaagccaacgtctccgccgtcggctcctggggccgccatggccgacgttggaagacggagaggaaaaccttgctgccctggccctctcacctccgggagtctcaggctccagttcggggagggcggaccgaggatgttctccctcgaggaagtggaccgcggtgggccagttgttgtcagtctgggaccggtgtaggtgccggatacgttgcgcccatctgccagggtccagggttgatggagttgcccgtgatcttaaggattgttccaatgcgtgacagagcataacagcggagggcctgtggtggctggaccgggggggcaaggaatgtacctccatttccctttccagcaaacttgcttgcaatgttcccctgtgggtgacaccagtagacaattcggcttgcccctctcttgaccgagacaggagaactggggtggtgtcccaaaaagaacagtcgggcacaattagagacagttggtacagacacgggcttctatacgacagcaggtatgttcaagaaggcaccatgggtggactcctggatagactcccgaggttgacccctatcaaagagagcgtctacgaaaacccaccttacagggggcgatttgagactttcctttccagagattaggggacggcccgacttgcacttcttgttggctcctgttggggactccgttcgagaggcccttgggttttacgcagtttttgggcacgctataagccttccgagaatttctcctgggcagctagagggagagctatctttattaaacggggggccttctctaccctcttgtgggggtgggc

SEQ ID NO: 498794 - DNA, 958 bp, Homo sapiens
ggataggggacagctggaggtcaaacaagttaactcaaatatctgggaacgatttcgcgctgaggaagaccctttgggacttgtagctccactccggggaacggactcgccgggactgacagttgccggaagtgaggctgcggggaatggccgccgctgcgaccatggcggctgcggcccgggaactggtgttgcgggctgggacctcagatatggagggaggagaagggccgcgtgtggcggtgtgtgcttggtgggctcggagagaactgctgctaggttgagggaggttggatatcacttctgattgatttcatcctggattgaaggtggatgttcaagatttcaggcaaaatctggaggatgagttagtaaagggaagctcttaaacagggtgtagatctccggtcatattcaaagcaagttgagctggagcatagggacagatggaacagaaatccattcgggattatattcaagagagtgagaatatagcatctcatacaaaacagatcacagcctgtgatgctgtccctggagcgaatggagcagatgtgggagcttttcagagtgacactcagcttccatcagtctgagatcggaacactgcaggaaacagtcaggagccatgaacattcgacttcgaaatcgccagggcagtcggggacacttggggagctcgtgatgggccctggggggagccctatcgtccgggtgcggggcatacgcggaggctcagcggacgcgcccaggaccaggagcagctcccggggcggacgccccgccggcgcagcgagcagcggagctgaggcccgcactcggacaaggaaagggggcccaacggtcggacggagcgaagcacagagtagccacgcagatcgggaaacggacataggaccaaagggggacagcactacggggcaagcagagggggcagtcggcaaccgagagtggagaa

SEQ ID NO: 498795 - DNA, 300 bp, Homo sapiens
attttgggggggggttgggggtttttttttttgggtttttagggggaaaaaaaacccccttggggttttttaaaaaaaaatttaatttgcccccttaccccggggaaaaggggcccccaggtttttttaaaaaacccccccccccctttttccaaaaaagggggggggtttttttttccccctttttttcccggggttgccttttgccccaaattttttttttaaaaaaaaacccgggggccccccccccttttttttcaggggcccccgcccccaaaaggttgggggcctttttcccca

SEQ ID NO: 498796 - DNA, 424 bp, Homo sapiens
gatatgtctccatcatcggtaccctctggggctcgctctgtgaggatcctgcttaggcgtaactctgcagtaataggctgtcaactcggacctgatatatgattatggctacaatacactgtagccaacaatgaggactggtacgctagattggcacgtgaagcaaaggacagaacctcaacattatgatctagtctaggaacacagtatcaatcgccaactggcaatggcaatgaactgaattaggcaacactgatacccatcagattaaagacctacactgggctaatttgttcacatattaggagtccataagatgcaccattctttatcaagtgcttagaaaggtcctaagaccctacagtgcatgtcaggtcagcccctataagcaaactgttaatatttagttcaacttgtcaactgc

SEQ ID NO: 498797 - DNA, 180 bp, Homo sapiens
agaggatcccgtatagcctcgccagtgcagtggcatgctgttccatcttcctgctccccgaacaccacgccgctggtattgttcttggtgtggctctggccctctcctgtacacctgccttccggggagctgggattgcaggcgtgagccactgcgcctggccccacacccaacccaccc

SEQ ID NO: 498798 - DNA, 136 bp, Homo sapiens
taccggtgttatcgatgcacctagcagccaaccgtggacagtagaaaaaataactgactaggcctgtttactcactagaaaatatatccccacatgatgagccttaacagaggtcatcatgtggcatcgataaaca

SEQ ID NO: 498799 - DNA, 832 bp, Homo sapiens
ctgttgtcttcccctcggccgctcacatgtgtattcagcagccctatggccttggtctgggcctgatgggacaggggtagagggaaggtgagcatacgcacattttcctagagcgagaattggcggggcaagctgttatcttctactattaacaactacacttcagatgtaaaaaaaaaaaaaaaaacagacccggacggcctctcctttctgccgcgggcgcgcgggagacacacagagcgtaccgagaacaggggccccggcgccctctccccggttcccggccccacccttcctggtacaacagggcgacaactcccgcgcgcgggctcccccacatcacaacagcggaccgacccgaccctcacaatccccagatacaacccaccggcgtaaccaccacgcgaccagtaatcaaacagaaccccgcgcacaccaccccacacaccacaccacccacacccccccaaccgaacgaccatcacccaccaccacccacccaacatgacgcaggaacacaccggcgacccgcaacaacgggactacgccccgacagacagaacgccacgcgccgcccacgcccccagcgagcgcatgagatgaccatcaccataagcgacttcgccaccacagcaggaggcaccacacaccaccacagcgcacaagacccgcctctgccgccgagctcgagcatgtcagcacagaccaccagcgcgacatcagcgcacacgagcacacgcggcagccgccctcgccgcgcagcgccacacgccactcgcacccccgcagcgagcgtgaccgcatcacagcacaaccgccgcccgcgacacaa

SEQ ID NO: 498800 - DNA, 983 bp, Homo sapiens
  misc_feature (20)..(20): n is a, c, g, or t
  misc_feature (756)..(756): n is a, c, g, or t
  misc_feature (800)..(800): n is a, c, g, or t
  misc_feature (807)..(807): n is a, c, g, or t
  misc_feature (852)..(852): n is a, c, g, or t
  misc_feature (854)..(854): n is a, c, g, or t
  misc_feature (900)..(900): n is a, c, g, or t
  misc_feature (965)..(965): n is a, c, g, or t
agcgggggataaaataagcntggcccggcacgctggctcacacctgtaatccccactttgtgaggctaaggcagggggatcaccagaggtcaggagtccaaaaccagcctggccaacatggtgaaaccccatctctactaaaaacacaaaaaattagttgggcgcgctggcaggcacctgtaatcccagctactcaggaggctgaggcaggagaatctcttgaacccgggaggcggaggttgcagttagccaagattgcaccattgcactccacactgggcaacaagagttaaacatctcaaaaaaagagaaaaacaaaatgagagtttgccctccatgtgacaaatccatgggggctctcattgagggatctgcccttcccaaggctcagaaactacaaacatggagaagacccagggaatgcccaggagttcctaccattttcccagggggacagtttcccagaggagcagcggacaagctggaacctatcccagcccagccttgtccctgcccagacctgccaggctgttcacccactcgctgggtgctcagtccatccatcctcctcaaagagtgcccgcagagcgtgcggcccccacgggtggtgcccacggccctcgctcacacggccctactcaccatattgccctgttcgccacccccatcatcgtagctctttctctcagttatctcttcaaccatccaaccttctgccattagatgtgggcattcacaggccctgaggtgggcctnaccctcactctctcccataggctgtgtccggcgctgtccctgcngtgcggnggacacacaaaggccccagggaaggtctggtggcggttgcgcaananctgctaaccacatcgtggagcacagctggttcgagacaattatcancttcatgatcctactcagcagttgagcgctggtaccctcctggggatgcagggttgttgcagganggctggaggaggagggga

SEQ ID NO: 498801 - DNA, 923 bp, Homo sapiens
gatattatactagcattcaccatctcattgctaggaatactagatatatcgggcacatctcatatcctccctagtatgcctagaaggaataatactatcgctgatgcatgatagctactctcataaccctgcgaaaaccaactccctcttagcgcaaatatggtgccgtactcagtgcatactgaatgtctaatgctctgctctgctgaaatgcatacggagggctcatatggcgcgcatagctatggcgtcaactcgtcccaagcctatcactactgagctcatatgacgtagcgctacagtaactcgtgaagatccctacctcgcaatttgcataaacacttaagtcctgtctcggcaatcatatatactacttcatccttaccacttagatcacttgacttctgtcctcatagaaactaccataggtggtggcagtcgaacgagaaccaggccagcagacctaaattcattagcattcatccaccgccatacttacttttcattaaactcgagaaagtcatacagatcaagaacccctattttcagtccctgtctcccctctaacaccttaatgccatgcgctgaatccttcccttaaaactaaattcacgcgcgcgtcccatacaatatcttaaacctcaccatagaaattctcatacacatcattcaacaaaatccactcgtggcacagtcacaagccgaccattaatctaataccgagtcggatactcaccgttactgactgcacagatacacatacttcctacacgtcatgctacttaactaaacttctctcaattatcatacactcatgccctctaagtttagtaagcgtttcaccagtatactagattactcagtacccgttaacctactaattctacgtaattaggactctcagccggagctaggagaactcc

SEQ ID NO: 498802 - DNA, 307 bp, Homo sapiens
caggatcacttgagcccaggagtctgataccagcctgggcaacatagtgagaccacatctctacaaaagatcaggtcaggcatcgtggctcaaccctgtaatcccagcactttgggaggctgagactggaggatcgcttgagctgaggagttcaaagctagcctgtacaacatagaccctatctctaccaaaaacagtttttaaaaattagcccgacatgcctgtgatcccagcactatgggaggccgaggtgggcagattacctgaggtcaggagttcgagaccagtctggccgacatggtgaaac

SEQ ID NO: 498803 - DNA, 236 bp, Homo sapiens
  misc_feature (45)..(45): n is a, c, g, or t
actctacaggatccttatccccggttctgggtacgtacacatcantacccagggaggaaaggttccattggcacagcaggcgagaaatattcatttgtccattagccctgtggggtcatggctaccactgcggctttctcctggtctcccatccctccatggctgctgggctcagcctttgtctgctgtgggcatgcccaggcacacgagctgggaggggaaaggataaggagagg

SEQ ID NO: 498804 - DNA, 656 bp, Homo sapiens
  misc_feature (40)..(40): n is a, c, g, or t
gagaaagcaccttgcagctccgtgagccttgttacagcantgggccagggggcaaggaaagctggcaaacacatccaaggccaccgccactgctgtgccaccactacagcccctcctagcgtcctcctgctgcctcatctcatggggactacctatagcagcacaggcaaggagagaggaccaccacgcgagacgccgcagcgcgagacctactcagcgcaacacaccagacaagcacggagcgcatgcgtgaacgcaaggagacaatcacatcggataggggcacgaatggtggagattaaagacggacagcaatgcctagacatgaactcgtactcacagcacgtgtactcaatgccacaccgaggggtagatacctataaattgtaaacattcaagaaccacattcaagtccgacacgcatcaaacgagatgtataaccacaatggaaaacacagcgaaagccacaggggagtcagagttgaagagtgacagaaatattacgtgtggacacgagaacaagtaacagggagagaaggcaccagaaatgagaacatacttggatggattaattaaagctagaacgtaaatcaattagaagtaattgcgaagaagaaggaaaggtatgcggcggggatttgcaggatgaagaaaaa

SEQ ID NO: 498805 - DNA, 351 bp, Homo sapiens
ctaaattcgcggccgcgtcgaccccaaaaccgtaaaaatcctggaagacaacctaaccagtaccattcaggacataggtacaggcaaagatttcatgatgaagatgccaaaagcaattgcaacaaagcgaaagttgacaaatgagatctgattaaactaaagcgcttctgcacagcaaaagaaactattaacagggtaaacagacatcctacagaatgggagaaaatttttgcaaactatgcatctgacaaaggtctaatatccagcatctaaaggaattaaacaaatttacaagtagaaaacaaccccatttaaaaagtgggcaaaggatgctgaacagtgccgtcgacg

SEQ ID NO: 498806 - DNA, 1013 bp, Homo sapiens
cgcagcgttaggcatgctgttgttgttgtactttactgccgcggagtttcccggtattccagcaagtcgagatattgacagtaggcgctcccatgacactctgttgattacggaaggagagaccaaggtcacaggaaggcgagacgcaggagcgtgtacctgagtgcacagagggtcttacaagtgaatgtggcacccgagtaccacccagtgatgacatgatcactaggtcctctggtattatccagctccaacgattatagcttagacacgttcgtggcgctggattggtgtaacacatgtaggcaggcatgaagtggtgcctgcaatggagtgcacgaattcagattttcctggccacactaaattgaaccgaccgaaagtacaaagatggcgggagatactaccggaaagagcaaagcccacaagaggcatgaacaccaacgaagaggctccaaagccgacgccagaagaatgtgggaaatcgggacagcacggtagtcgggggcgcgcgacccaaagtaggactcgtgacaatctcacgcgaaaacgaacaagcacgggcgcgtgcacgcgagggaatagcacacaaaacccacaaaagcaagaagtgggccggacaaaatccgcatgcaaagaacgcaaacaaaaaaaaaaacgacaaaagacaaaacgcggcagaaacaaccataagctactagagattggacatatacacagtagggcgttccccgggaataccgcagaaagacagaaaaagagaaaaaccaggacaccaggccggacaacgcaaggagagcggaaaaatcacaaacgcgtatcttgttgactgtggggagcacacacgaggcatggtgcatgttgcacgacgtcagtgagaacgaggaaacgacaacaggaacacggagcggaggaagcaatatgaggagacaccaacaccgaacaccaaagagacgagagaaaacaaaatcactaggggaacactagaactacacaagacaatgttggacaaa

SEQ ID NO: 498807 - DNA, 120 bp, Homo sapiens
cccgctcatgccagagtcacggcttgcaccacggggattgtcttgaatagtccatgacaattcccccagactggtctgccgtgcacaatctcatcatttggggccatgccgtatagttgt

SEQ ID NO: 498808 - DNA, 93 bp, Homo sapiens
gcaagaggtatattgtggacacttactttgctgaagtagctgaaacataaattaatgagctggaatcattttccagagcagaacaaagagaag

SEQ ID NO: 498809 - DNA, 164 bp, Homo sapiens
  misc_feature (22)..(22): n is a, c, g, or t
  misc_feature (39)..(39): n is a, c, g, or t
  misc_feature (144)..(145): n is a, c, g, or t
cagtgggttccctccttacctnggagtgcagttgtctanaggccttacctgagctgccctctcggcctttctgaccttttcccctaccgtttccttgctcatctgttatgatgttcttactgccttctgttgctgtaatctgcnngatatgtttccacgccgag

SEQ ID NO: 498810 - DNA, 425 bp, Homo sapiens
gagtcgactctcgtaggatcccctcgcgaacgtgttatccctgtacgggtatggggatgggagaacggagtttgtgttatatcaaaatctcgcacctcagagtacctgactatcttggacttcacgacacttcagcttctaacgccaactctgactctctccttctaacaacatcctatcactatagacccatatggcatcaaccacaaacgcttctactacctacttaccctcactcaactcccacttctggctccagacaactacaaactgtactcctgcggacatctccatgctgcatccactagcaaccttccacattttccatgtcctcacttcaggcatctaggagtccactgaggtcacttaaccatctctactcagagtcctcacagaggatcaggctgtctgaaacctgcagggac

SEQ ID NO: 498811 - DNA, 373 bp, Homo sapiens
catatatatattctatactttatagtcctataagtactctaagtccttgtgtaattattgaggacaaaacgtcacttaaaggtaaaaggaatactaagttgcagactagcaactgtatagcatctcacaagaacaaaagccttaacaaaccgtatactttatgcaaacacagtgatgcctcactgccttagagagacaagtcacatgccatcagtgtgtcagaaaatatctttcttcagtgatagttaaggtcacctcgccagctactttccagagacagctccaggacaatactggggacaaaacaaaatcagagccataggaccacaatagagccctgtgcaacaaaaagatgctaaataacagaattcaa

SEQ ID NO: 498812 - DNA, 245 bp, Homo sapiens
  misc_feature (1)..(1): n is a, c, g, or t
nccggacatgctgctcacgtgcttgatacatatttatttcagaatcacaattgtaaagattaggccgggtgcgggctcacgcctgtaatcctaacactttgggaagacaaggtgagtggatcacctgaggtcaggagtgcaagatcagcctggccaacatggtgaaatcctatctctacaaaaaatacaaaaatcagccaggtgtggtggcacccgcccgtaatcccagtcactcaagcacgtga

SEQ ID NO: 498813 - DNA, 500 bp, Homo sapiens
  misc_feature (357)..(357): n is a, c, g, or t
ccacaaccatatgatgagagatacagggtttaaacatggacaactcctgttaaaacctttatcaatgtgttcatcaactcagtaaccacagagttctgtcaacagctaaaaagagtttagaaaaagaggaagagctttgtttgtttactcctttgctgtgtacatccaaaatacaatggtgggagaagatttgttctagtttttcccaaagatactccttagggaatgcactcaaaagaacaaaataggttttctatgactccacagaaatagaatctgtagtattatttttgcttaaatgtgattaggtgtgaacattgctttgttatttgtttcctgattccagatttggaatanatagcccttgatacaggatttggagaagattttggtattaatcaatcatagacttcaggagatgatttcaataggtccttttctggaatttcatttcagtatagaaactgtatgggcagaatttttattattattattattat

SEQ ID NO: 498814 - DNA, 368 bp, Homo sapiens
atgccgtgtcgcaatctcagctcactagcaactaccacctcccatgttataacaattctcctgcctcagacctacctgcatttgctaggatttcaggcatgcatcaacatacccagctaatttttatatattttttggtatatacagggttacatcatgttggtctggctggtctcgaactcctgatctcacgtgatgcacccctcctttgcttcgctcattagctgagattataggcataaaccattgtatccggcctgagaagcatagttccttgtgtttaatttaaccattttaaagtgctcaagggtatttgaaaacagttctctcaaatattataaatagtcttgtttccttttttttttgaa

SEQ ID NO: 498815 - DNA, 423 bp, Homo sapiens
gcggcattcttgcgggatatcttctgtaacgacatcccgctgatcttccgccgcgagctgtatgccagcgtgtcgttcctggctgcctggttctacttgctgtgccttgtacctgaagctgcccagcgagcaagcaattctgctgacgctgttcagtggttatccatgttacgcctgctggcaatccggtttcactgggaaatgcccaagttcgtctacaacgacgatgtgcactagcgcgcagtgtgttgctccagagcccattccacgtgttcgcgtaccaactccgacgggtagtcccgccgcgccttcaatgacttccagcactggaatgctggagggagcattacccaggcccaccgaaaagttgcgtaacccgcgctcgtaaccggcgcgacgaaatggaacgcgattaaacttcgg

SEQ ID NO: 498816 - DNA, 284 bp, Homo sapiens
cttgatttcagagtcctcttcagtcattgattgattggctcctactgggatggggcctctgcccagctggacctcttcatccatcctggctgcacagcctgtctcttcacatgagtcagacgtgcagggtaggatcagaaggagatactctggggtttgtgtgctgccagcccggctcagactccgcccttgggaaagataaccaccatctgctctaatcatgtagacgtactgccgcctggtttctctgttacaataaaattactatagacccaaaaaaaaaa

SEQ ID NO: 498817 - DNA, 733 bp, Homo sapiens
ggtgggaccacattgaggtgtctgatgatagaacgacgagacgcaccccaagcatcgacacggccagtctcgttccgctggctggaatcagagcccgaggatggaacgcatgtgagcagttccagaaggagaatggaggaatctggacaggggctgccgcggaagtgctaatcagaccagaggttgcgcctgtaggttgtccaacgagggatatactgcagatgtggacgcttgcgagtgttgcgcccggacgtggccggacaagtggctaggaagcttgtggaaggcggcccatttgccataggggccccgaaggggccacctaagccaaaagggacttgacagaacaaaaagggggaaggggcaagccggagaagccctagggggaaccggcacacggcacaaattgccttcgcggcactcgggggcatgaaatttgccagagccacaaaggaaaaccgggggaaaggcaaggaccgaaagtgcaaattgcccccgcagtttgtagacagcatcccacggtttggagagaaccgaaacgggggccaatttccaaacggcgcgaacaacatgggacatcccggcgcggtcgatttcgatccaaagcggcctaacagacgggcaaaacggcccacaaatttgcggcgctcacaagcgacatttttaaacccgccacaaaatggccccccgccgtggacgcgcgaaccaagtgcaaccacgcggaaacagcgca

SEQ ID NO: 498818 - DNA, 1651 bp, Homo sapiens
  misc_feature (1601)..(1602): n is a, c, g, or t
  misc_feature (1616)..(1616): n is a, c, g, or t
  misc_feature (1618)..(1618): n is a, c, g, or t
  misc_feature (1622)..(1622): n is a, c, g, or t
  misc_feature (1625)..(1625): n is a, c, g, or t
  misc_feature (1634)..(1634): n is a, c, g, or t
  misc_feature (1641)..(1641): n is a, c, g, or t
  misc_feature (1647)..(1647): n is a, c, g, or t
gcgcgtccgactcaaactaggttggaaggtcagggaagggttcctggcaaatatgaccaaagctgagatctggttagccatgctaaggagaaagcaagaagcttctcaagcataggggacagtagcagatgtccagaaatgagactgagcacagatatttgggaacccattttggagcagaatctggtagcccagagaccaagaaacctacatttatggatgaggaagttcaaagcatactcacgaaaatgacaggcttgaacttgcagaagacttttaagccagctatacaagaactgaagccaccaacctataagctaatgactcaggcacagttggaagaggctacaagacaggcagttgaggcagctaaagtacgattaaaaatgccaccagttctggaagagcgagtaccaataaatgatgtgttagctgaagataagattttggaaggaacagaaacaaccaaatatgtgtttactgatatatcatatagcataccacaccgggagcgttttattgtcgtcagagaaccaagtggcacactacgcaaagcctcttgggaagaacgggaccgaatgatacaagtttatttcccaaaagaaggtcgtaaaattttgacaccaataattttcaaggaagaaaatcttaggactatgtatagccaggacaggcatgttgatgtcctcaatctctgctttgcccagtttgagccagattccacagagtatatcaaggttcatcacaagacctatgaagatatagataaacgtggaaaatatgaccttttacgttcaacaagatactttggtggaatggtgtggtattttgtaaataataaaaagattgatggtttgctgattgaccagattcagagagatttaatcgatgatgcaaccaacttggtccagctgtatcacgtgctccatccagatggccagtcggctcaaggggccaaggatcaggctgctgagggaataaatttaatcaaggtctttgcaaaaacagaagcacagaagggagcctatatagaactaacactgcagacttatcaagaagcactcagtcgccattctgcagcttcctaaaaatattttaaaaatacatttattttactaaatactgactacatttctctgttaatattgagctaaatgttaaaaaatggctagattaaaagatatcaatttgtagttctccctacaaagcaaaaattattaccctactcacttttcgtaggctacaaggatatttgagtgcctggttatgaatttctcaaatcatgttagatgagcgtacggttaaaaagtctggtgtgtttttgtgttaccaaatagggcaaacgttaacttagacagacccccagcttaatgaggtcagaggaacagaggtttcacatcctgactccagaaatgggtagctgctagacaaaatcggggcaagacctgtggaatgatgcaatgaggtcaagaaaaagggtttagagaattacagcctggatattcagctctaagaaaaatgtgattgacaacattgaaaatgcagactgtagttatacacaacgaaaagacagtggggctgatccctaggcaggtgtagtnncggctcagcttctnanactngangcctatttncatattnagaaanggaa

SEQ ID NO: 498819 - DNA, 243 bp, Homo sapiens
gcggccgcctactactactactgctcgaattcaagcttctaacgatgtacggggacatggcgtcctgcccttgctccagcctgacaacagcctgagaaatccccccgtaacttattatcactttggggttcggcctgtgtcccccgaacgctctgcaccttctgacgcagcctgagaatgacctgccctggccccagccctactctgtgtaatagaataaaggcctgcgtgtgtctgtgttga

SEQ ID NO: 498820 - DNA, 201 bp, Homo sapiens
ctattgtgacagatatatacagatattatgtgagatataagagcagagtatatctgacttgaaaataaaatattatagtgtattaactgagatacagtaataagatatgtcaattattgggcagatagataatagtttatagggcatcaacatttaattctataaaaatgtatgctttctgttactcttacaaactactta

SEQ ID NO: 498821 - DNA, 1628 bp, Homo sapiens
  misc_feature (11)..(11): n is a, c, g, or t
  misc_feature (14)..(14): n is a, c, g, or t
  misc_feature (1578)..(1579): n is a, c, g, or t
  misc_feature (1593)..(1593): n is a, c, g, or t
  misc_feature (1595)..(1595): n is a, c, g, or t
  misc_feature (1599)..(1599): n is a, c, g, or t
  misc_feature (1602)..(1602): n is a, c, g, or t
  misc_feature (1611)..(1611): n is a, c, g, or t
  misc_feature (1618)..(1618): n is a, c, g, or t
  misc_feature (1624)..(1624): n is a, c, g, or t
ccgtaggctangtncgaggcctggcttctgataatcatggcgcccctcggaacaactgtattgctgtggagcctcttgaggagttctccgggcgtggaacgggtctgtttccgggctcgaatccagccctggcacggtggcctgctccaaccgctaccttgctctttcgagatggggctgccacgccgccggttcagctccgaggccgcagaatctggtagcccagagaccaagaaacctacatttatggatgaggaagttcaaagcatactcacgaaaatgacaggcttgaacttgcagaagacttttaagccagctatacaagaactgaagccaccaacctataagctaatgactcaggcacagttggaagaggctacaagacaggcagttgaggcagctaaagtacgattagataagattttggaaggaacagaaacaaccaaatatgtgtttactgatatatcatatagcataccacaccgggagcgttttattgtcgtcagagaaccaagtggcacactacgcaaagcctcttgggaagaacgggaccgaatgatacaagtttatttcccaaaagaaggtcgtaaaattttgacaccaataattttcaaggaagaaaatcttaggactatgtatagccaggacaggcatgttgatgtcctcaatctctgctttgcccagtttgagccagattccacagagtatatcaaggttcatcacaagacctatgaagatatagataaacgtggaaaatatgaccttttacgttcaacaagatactttggtggaatggtgtggtattttgtaaataataaaaagattgatggtttgctgattgaccagattcagagagatttaatcgatgatgcaaccaacttggtccagctgtatcacgtgctccatccagatggccagtcggctcaaggggccaaggatcaggctgctgagggaataaatttaatcaaggtctttgcaaaaacagaagcacagaagggagcctatatagaactaacactgcagacttatcaagaagcactcagtcgccattctgcagcttcctaaaaatattttaaaaatacatttattttactaaatactgactacatttctctgttaatattgagctaaatgttaaaaaatggctagattaaaagatatcaatttgtagttctccctacaaagcaaaaattattaccctactcacttttcgtaggctacaaggatatttgagtgcctggttatgaatttctcaaatcatgttagatgagcgtacggttaaaaagtctggtgtgtttttgtgttaccaaatagggcaaacgttaacttagacagacccccagcttaatgaggtcagaggaacagaggtttcacatcctgactccagaaatgggtagctgctagacaaaatcggggcaagacctgtggaatgatgcaatgaggtcaagaaaaagggtttagagaattacagcctggatattcagctctaagaaaaatgtgattgacaacattgaaaatgcagactgtagttatacacaacgaaaagacagtggggctgatccctaggcaggtgtagtnncggctcagcttctnanactngangcctatttncatattnagaaanggaa

SEQ ID NO: 498822 - DNA, 874 bp, Homo sapiens
  misc_feature (5)..(5): n is a, c, g, or t
gtctngcttgggcctagtgtgtcatgtcccctccacacacgccaccaaactcccactgctccgagccgcactacatccctgctccccagcctaggggctgtgctggggcctgaccctttgtgagctctcctcagtcccagtcaagtggacctcctccctccctctccacagcccttgcccttgtccaggccaccatcaccatcaccaacaccatccttgccagcctggagtcccctctcttcattctgtggggctaatgggggtggctgtgtgggaagcctctggggtctaccgttggggagctctgcatggctgaggttgggggttctctgggaacctgtggccaagggtctctggtcacagtgccgaggtgggcctggcttttccacagtggagtccattgatgattacgtgaacgttccggagagcggggagagcgcagaagcgtctctggatggcagccgggagtatgtgaatgtgtcccaggaactgcatcctggagcggctaagactgagcctgccgccctgagttcccaggaggcagaggaagtggaggaagagggggctccagattacgagaatctgcaggagctgaactgagggcctgtggaggccgagtctgtcctggaaccaggcttgcctgggacggctgagctgggcagctggaagtggctctggggtcctcacatggcgtcctgcccttgctccagcctgacaacagcctgagaaatccccccgtaacttattatcactttggggttcggcctgtgtcccccgaacgctctgcaccttctgacgcagcctgagaatgacctgccctggccccagccctactctgtgtaatagaataaaggcctgcgtgtgtctgtgttga

SEQ ID NO: 498823 - DNA, 376 bp, Homo sapiens
  misc_feature (101)..(101): n is a, c, g, or t
agaatcacgatttggtgccattgtttcatcttccgcattgatgagcagtgaatctggactgctctgttgtgtgctgctgaataattctatccagagaggcnaagtacagtggcaggtggatacgccctccaatcgggtaactcgcaggagagtgtcctgagcaggacagcaagccagcacctacaggctcagcagcaccctgacgctgagcaaagcagactacgagatattacaaagtctacgcctgcgaagtcacccatcaggggctgagctcgcccgtcacaaagagcttcaacaggggagagtgttagagggagaagtgcccccacctgctcttcagttccagcctgaccccctccctccttgttgcctctgg

SEQ ID NO: 498824 - DNA, 909 bp, Homo sapiens
  misc_feature (11)..(11): n is a, c, g, or t
  misc_feature (14)..(14): n is a, c, g, or t
  misc_feature (761)..(761): n is a, c, g, or t
  misc_feature (765)..(765): n is a, c, g, or t
  misc_feature (776)..(776): n is a, c, g, or t
  misc_feature (788)..(789): n is a, c, g, or t
  misc_feature (799)..(800): n is a, c, g, or t
  misc_feature (803)..(803): n is a, c, g, or t
  misc_feature (806)..(806): n is a, c, g, or t
ccgtaggctangtncgaggcctggcttctgataatcatggcgcccctcggaacaactgtattgctgtggagcctcttgaggagttctccgggcgtggaacgggtctgtttccgggctcgaatccagccctggcacggtggcctgctccaaccgctaccttgctctttcgagatggggctgccacgccgccggttcagctccgaggccgcagaatctggtagcccagagaccaagaaacctacatttatggatgaggaagttcaaagcatactcacgaaaatgacaggcttgaacttgcagaagacttttaagccagctatacaagaactgaagccaccaacctataagctaatgactcaggcacagttggaagaggctacaagacaggcagttgaggcagctaaagtacgattaaaaatgccaccagttctggaagagcgagtaccaataaatgatgtgttagctgaagataagattttggaaggaacagaaacaaccaaatatgtgtttactgatatatcatatagcataccacaccgggagcgttttattgtcgtcagagaaccaagtggcacactacgcaaagcctcttgggaagaacgggaccgaatgatacaagtttatttcccaaaagaaggtcgtaaaattttgacaccaataattttcaaggaagaaaatcttaggactatgtatagccaggacaggcatgttgatgtcctcaatctctgctttgcccagtttgagccagattccacagagtnttcncggtcctcccngacttgagattnntaacgggganntgnccnttcgtccccgtcttggggccggggggtttgccctcccccagtggtggcgtgcccccgagttctgtgccctggcgggttgccccggggtcgggcgcggggggta

SEQ ID NO: 498825 - DNA, 1670 bp, Homo sapiens
cgcaggcgggcgggagggcgggcacggagaggcgggcgccgaggaggggcaggtagggctgggacgcaggggtaactggatcccccgacttcagcccaggccctggtctgaccaccctgggagcagggactttccacagtcagctggacgcacactcagcccagtaaaagaggggacccatcccgggagccccggggagggcacagctgcctcctcccgggctcccctgccacctggtgcctacctgccccctgctccctgccgggtccggtcctcaccccatcttcatctggccttgactctgcccttgaggggcctaggggtgcagccagcctgctccgagctcccctgcagatggaggaggccatcctggtcccctgcgtgctggggctcctgctgctgcccatcctggccatgttgatggcactgtgtgtgcactgccacagactgccaggctcctacgacagcacatcctcagatagtttgtatccaaggggcatccagttcaaacggcctcacacggttgccccctggccacctgcctacccacctgtcacctcctacccacccctgagccagccagacctgctccccatcccaagatccccgcagccccttgggggctcccaccggacgccatcttcccggcgggattctgatggtgccaacagtgtggcgagctacgagaacgaggaaccagcctgtgaggatgcggatgaggatgaggacgactatcacaacccaggctacctggtggtgcttcctgacagcaccccggccactagcactgctgccccatcagctcctgcactcagcacccctggcatccgagacagtgccttctccatggagtccattgatgattacgtgaacgttccggagagcggggagagcgcagaagcgtctctggatggcagccgggagtatgtgaatgtgtcccaggaactgcatcctggagcggctaagactgagcctgccgccctgagttcccaggaggcagaggaagtggaggaagagggggctccagattacgagaatctgcaggagctgaactgagggcctgtggaggccgagtctgtcctggaaccaggcttgcctgggacggctgagctgggcagctggaagtggctctggggtcctcacatggcgtcctgcccttgctccagcctgacaacagcctgagaaatccccccgtaacttattatcactttggggttcggcctgtgtcccccgaacgctctgcaccttctgacgcagcctgagaatgacctgccctggccccagccctactctgtgtaatagaataaaggcctgcgtgtgtctgtgttgagcgtgcgtctgtgtgtgcctgtgtgcgagtctgagtcagagatttggagatgtctctgtgtgtttgtgtgtatctgtgggtctccatcctccatgggggctcagccaggtgctgtgacaccccccttctgaatgaagccttctgacctgggctggcactgctgggggtgaggacacattgccccatgagacagtcccagaacacggcagctgctggctgtgacaatggtttcaccatccttagaccaagggatgggacctgatgacctgggaggactctcttagttcttaccttttgtggttctcaataaaacagaacttaaaaaattgtctaagaaaaa

SEQ ID NO: 498826 - DNA, 1461 bp, Homo sapiens
ggggcctccctgctcgctgcctccccgggtcctggatatggaggccacggctgccagctggcaggtggctgtccccgtcttggggggggccagcagacccttggggcctaggggtgcagccagcctgctccgagctcccctgcagatggaggaggccatcctggtcccctgcgtgctggggctcctgctgctgcccatcctggccatgttgatggcactgtgtgtgcactgccacagactgccaggctcctacgacagcacatcctcagatagtttgtatccaaggggcatccagttcaaacggcctcacacggttgccccctggccacctgcctacccacctgtcacctcctacccacccctgagccagccagacctgctccccatcccaagatccccgcagccccttgggggctcccaccggacgccatcttcccggcgggattctgatggtgccaacagtgtggcgagctacgagaacgaggaaccagcctgtgaggatgcggatgaggatgaggacgactatcacaacccaggctacctggtggtgcttcctgacagcaccccggccactagcactgctgccccatcagctcctgcactcagcacccctggcatccgagacagtgccttctccatggagtccattgatgattacgtgaacgttccggagagcggggagagcgcagaagcgtctctggatggcagccgggagtatgtgaatgtgtcccaggaactgcatcctggagcggctaagactgagcctgccgccctgagttcccaggaggcagaggaagtggaggaagagggggctccagattacgagaatctgcaggagctgaactgagggcctgtggaggccgagtctgtcctggaaccaggcttgcctgggacggctgagctgggcagctggaagtggctctggggtcctcacatggcgtcctgcccttgctccagcctgacaacagcctgagaaatccccccgtaacttattatcactttggggttcggcctgtgtcccccgaacgctctgcaccttctgacgcagcctgagaatgacctgccctggccccagccctactctgtgtaatagaataaaggcctgcgtgtgtctgtgttgagcgtgcgtctgtgtgtgcctgtgtgcgagtctgagtcagagatttggagatgtctctgtgtgtttgtgtgtatctgtgggtctccatcctccatgggggctcagccaggtgctgtgacaccccccttctgaatgaagccttctgacctgggctggcactgctgggggtgaggacacattgccccatgagacagtcccagaacacggcagctgctggctgtgacaatggtttcaccatccttagaccaagggatgggacctgatgacctgggaggactctcttagttcttaccttttgtggttctcaataaaacagaacttaaaaaattgtctaagaaaaa

SEQ ID NO: 498827 - DNA, 1078 bp, Homo sapiens
gctcgacactctgtacttccgccgcctccgacgtacgcgtagctctgccggtcgcaatggaagacgagatcgccgtgctggatcattgacatatgagctccgggatgtgcaaagcatggctatatagcatgagggacgacatctcaccgatcgcgtgttatgcatatccatcgataatggcgccgacagaaaatctagagggattatggatgagtgcatgtgaccagaagagcatcctacagtgcggcaaaccgagggtcccagaatcaaaaggcggtggggcattccatggaggccttgaagatgtaaccccgcgatatcgaggacacttggccatactgtccacacgaagactggcggacgaaccattggtacgaaagggattctagggcatcgcatgaggcgcttcctaacaacaacgggacggaccatggccagcccgataggaagaccaccccggcgaaacggcaataacaaacactcaaacgggatgcacattggccatagaatctccccgacagatgacacccaacaacccatgagaaaagcaccacccccaaagaagagacagcaaacaacgaaagcacggtagagaaacagcaattgtggaccacctaccaaaggaaactccacaactaggctataaagacagaatgcagttcgtcaaaaagacaaagcacccaggagaccccaaactaggacaacgagagcatggaggaccccaaagtacccaaacggggaccacaggaacacacactgatagcaccacatataccattaacatgaacacgcactcaattagtagagcgaccgactcaacacgcagaacagatttgtagagcccacaaatgaagcattcacacatatgagggcaaaacgatttccactgggggaaagtgacaacaacggtagccgagaattgcaacaaccggctagagcaaccaggggtaaatgggcagccaccaaatacagttacaccagacagacgggcgacgataacacagacacatcagcaatacgcagcacgaagcaagcatagaacgcaatcatcggccaaatgacaagaaattaccatagg

SEQ ID NO: 498828 - DNA, 353 bp, Homo sapiens
cgcgtagggccatactcagccaagtacctgaatccttctaaaaatttttttattgaggtgaaatcacataacataaacagccattttaaagtgaacaattcagtgacataatattcacaatgttgcacaaccaccacctctatctcgttccaaaacattcccatcaccccaaaggaaaaccccaaactcgttaaggagtcactctctaatccctccttccccaggccctggcaaccaccatctcccttctgtctctatggatttatatattctgaatatttcatctaaatggaatcatgcaataataagactttggtgtctagcttctttcgtttgggcactcggcgtgtgca

SEQ ID NO: 498829 - DNA, 278 bp, Homo sapiens
ttggttcctctgttgccgttctcttcctgccggagcctcagtttcttctccaactcttcgtcgtctacaagaagactaaccacctctttgggttcaaggtatctggtttgaagtacccacctgaaatcaccatccgctgaatctcactcttctccttggctctttgcagaatgcgtactccaatgctgcctttacagatgagccggtacacagtaacctgctttgtctggcctaagcggtgtgcatagtatcacccttcccccactgtggcgcaaggg

SEQ ID NO: 498830 - DNA, 602 bp, Homo sapiens
ctttttttttaagaaagctttgaattttgttcagagaagatttgtgttaatccatctaagtggaattcaggggtattagaagtttgttttgtcagtgcccaagaatatcatatttgtattttgttcatagcattttgaggtcaccaagagttttaagatgatgtcttttgttgtagacaagtttcggaatcagaccagtatggaggatgcaatcttattgtgtctttgaataagtacccaggctagtatggggacttgtgtaacacagaaagaacatctgcaaccttccccttgttgccacactttaatttgcagttaggctttgcaggatgtgttgctgtattctcttttcccagccatcattctgtctacctgcaagggtcttttgtgtaatattagtgtcatttaaatctgtttcagaatagatttgattctgaatcacttacttctataatattttaacctttagttgggaaatgaactttcatcagaaagataaaaatggattgattaaggaaatttgaaaaacaatatgtttttgagagtgtcatggtgtataggatatagttcatagacttggctttgagtttttaggagttaat

SEQ ID NO: 498831 - DNA, 475 bp, Homo sapiens
  misc_feature (5)..(5): n is a, c, g, or t
gtctngcttgggcctagtgtgtcatgtcccctccacacacgccaccaaactcccactgctccgagccgcactacatccctgctccccagccctactctgtgtaatagaataaaggcctgcgtgtgtctgtgttgagcgtgcgtctgtgtgtgcctgtgtgcgagtctgagtcagagatttggagatgtctctgtgtgtttgtgtgtatctgtgggtctccatcctccatgggggctcagccaggtgctgtgacaccccccttctgaatgaagccttctgacctgggctggcactgctgggggtgaggacacattgccccatgagacagtcccagaacacggcagctgctggctgtgacaatggtttcaccatccttagaccaagggatgggacctgatgacctgggaggactctcttagttcttaccttttgtggttctcaataaaacagaacttaaaaaattgtctaagaaaaa

SEQ ID NO: 498832 - DNA, 792 bp, Homo sapiens
  misc_feature (171)..(171): n is a, c, g, or t
tggggtccccaggagctgagggccccaggatcgacatgattctgaaggtgattgtcatgggtgcagggagcaggagctgatggggcagaagtgctagtggccggggtgctgtcaggaagcaccaccaggtagcctgggttgtgatagtcgtcctcatcctcatccgcatcntcacaggctggttcctcgttctcgtagctcgccacactgttggcaccatcagaatcccgccgggaagatggcgtccggtgggagcccccaaggggctgcggggatgagtccgtttgaactggatgccccttggatacaaactatctgaggatgtgctgtcgtaggagcctggcagtctgtggcagtgcacacacagtgccatcaacatggccaggatgggcagcagcaggagccccagcacgcaggggaccaggatggcctcctccatctgcaggggagctcggagcaggctggctgcacccctaggcccctcaagggcagagtcaaggccagatgaagatggggtgaggaccggacccggcagggagcagggggcaggtaggcaccaggtggcaggggagcccgggaggaggcagctgtgccctccccggggctcccgggatgggtcccctcttttactgggctgagtgtgcgtccagctgactgtggaaagttcctgctcccagggtggtcagaccagggcctgggctgaagtcgggggataccagttacacctgcgtcccagccctacctgcccctcctcggcgcccgcctctccgtgcccgccctcccgcccgcctg

SEQ ID NO: 498833 - DNA, 120 bp, Homo sapiens
  misc_feature (73)..(73): n is a, c, g, or t
cagccaaatgctacgacccccgacaccagacagctacctagaacagctaaagagcacacccgtctattcgcanatatagtgggaacgatttattggtggaggcgacacacctaccgagcc

SEQ ID NO: 498834 - DNA, 1330 bp, Homo sapiens
cgcaggcgggcgggagggcgggcacggagaggcgggcgccgaggaggggcaggtagggctgggacgcaggggtaactggatcccccgacttcagcccaggccctggtctgaccaccctgggagcagggactttccacagtcagctggacgcacactcagcccagtaaaagaggggacccatcccgggagccccggggagggcacagctgcctcctcccgggctcccctgccacctggtgcctacctgccccctgctccctgccgggtccggtcctcaccccatcttcatctggccttgactctgcccttgaggggcctaggggtgcagccagcctgctccgagctcccctgcagatggaggaggccatcctggtcccctgcgtgctggggctcctgctgctgcccatcctggccatgttgatggcactgtgtgtgcactgccacagactgccaggctcctacgacagcacatcctcagatagtttgtatccaaggggcatccagttcaaacggcctcacacggttgccccctggccacctgcctacccacctgtcacctcctacccacccctgagccagccagacctgctccccatcccaagatccccgcagccccttgggggctcccaccggacgccatcttcccggcgggattctgatggtgccaacagtgtggcgagctacgagaacgaggaaccagcctgtgaggatgcggatgaggatgaggacgactatcacaacccaggctacctggtggtgcttcctgacagcaccccggccactagcactgctgccccatcagctcctgcactcagcacccctggcatccgagacagtgccttctccatggagtccattgatgattacgtgaacgttccggagagcggggagagcgcagaagcgtctctggatggcagccgggagtatgtgaatgtgtcccaggaactgcatcctggagcggctaagactgagcctgccgccctgagttcccaggaggcagaggaagtggaggaagagggggctccagattacgagaatctgcaggagctgaactgagggcctgtggaggccgagtctgtcctggaaccaggcttgcctgggacggctgagctgggcagctggaagtggctctggggtcctcacatggcgtcctgcccttgctccagcctgacaacagcctgagaaatccccccgtaacttattatcactttggggttcggcctgtgtcccccgaacgctctgcaccttctgacgcagcctgagaatgacctgccctggccccagccctactctgtgtaatagaataaaggcctgcgtgtgtctgtgttga

SEQ ID NO: 498835 - DNA, 241 bp, Homo sapiens
  misc_feature (38)..(38): n is a, c, g, or t
aggtgatctagaggatcctgcaggtctctatgcttatnttttcctccctaggatgtaccacttctggattcctatattttaaatttatgtatctggtgagttttgggactcttcacaaccaccacggccccacccccctacccagtagacttcaagctccaggagggcggggggttagccttttaagtccaaggctctattcccagagccctaggtagagagccgggcaggggtaccgagc

SEQ ID NO: 498836 - DNA, 176 bp, Homo sapiens
aacctaacataccatcttaatttaactatttatattatcctaactactaccgcatccctacaaatctccttaatcatcagatccacagccctagaactaattccgatcctatagtcttcatcaaccgcagaggtatccccacatagagcgtatgatcatccgctgaagtcgcccgg

SEQ ID NO: 498837 - DNA, 103 bp, Homo sapiens
ctcagccgggtcggcattgccctgtcccatgcgttgttctggtcgattaccgcctccctcgtggtgcgcctggcgccggaaggcaagcaggtgcaggccctcg

SEQ ID NO: 498838 - DNA, 1300 bp, Homo sapiens
  misc_feature (13)..(13): n is a, c, g, or t
  misc_feature (18)..(18): n is a, c, g, or t
gccatttggtacnggtcnaagtcctatgatgggacgcaggggtaactggatcccccgacttcagcccaggccctggtctgaccaccctgggagcagggactttccacagtcagctggacgcacactcagcccagtaaaagaggggacccatcccgggagccccggggagggcacagctgcctcctcccgggctcccctgccacctggtgcctacctgccccctgctccctgccgggtccggtcctcaccccatcttcatctggccttgactctgcccttgaggggcctaggggtgcagccagcctgctccgagctcccctgcagatggaggaggccatcctggtcccctgcgtgctggggctcctgctgctgcccatcctggccatgttgatggcactgtgtgtgcactgccacagactgccaggctcctacgacagcacatcctcagatagtttgtatccaaggggcatccagttcaaacggcctcacacggttgccccctggccacctgcctacccacctgtcacctcctacccacccctgagccagccagacctgctccccatcccaagatccccgcagccccttgggggctcccaccggacgccatcttcccggcgggattctgatggtgccaacagtgtggcgagctacgagaacgaggaaccagcctgtgaggatgcggatgaggatgaggacgactatcacaacccaggctacctggtggtgcttcctgacagcaccccggccactagcactgctgccccatcagctcctgcactcagcacccctggcatccgagacagtgccttctccatggagtccattgatgattacgtgaacgttccggagagcggggagagcgcagaagcgtctctggatggcagccgggagtatgtgaatgtgtcccaggaactgcatcctggagcggctaagactgagcctgccgccctgagttcccaggaggcagaggaagtggaggaagagggggctccagattacgagaatctgcaggagctgaactgagggcctgtggaggccgagtctgtcctggaaccaggcttgcctgggacggctgagctgggcagctggaagtggctctggggtcctcacatggcgtcctgcccttgctccagcctgacaacagcctgagaaatccccccgtaacttattatcactttggggttcggcctgtgtcccccgaacgctctgcaccttctgacgcagcctgagaatgacctgccctggccccagccctactctgtgtaatagaataaaggcctgcgtgtgtctgtgttga

SEQ ID NO: 498839 - DNA, 582 bp, Homo sapiens
aggatccccagcttctcatcaggtacgcgatgcacgggtcggagttgatcacgatctcagtagccaggcccatctggcggggtgtgtaggacttctcggtactgaggaagtgtttcccgtaggaccaatggtgatagcccaagggcatgcccaccgaggcataggcatccatcatttgttcagcggtgatgacttccatctggttgggataagtgtccagggcataaggcgccgcgatacggctgatttcccggtcataggcctggatcagttcgaaggtccactcggagccagtggaaatgggttggcgcttgttctcttttttggcggtcatgttactaacctgcgctggaagagttcacggaagaccgggtagatatcgccggccgagaccagttgctgctgggcgaacgtgtcggcaaatgcttcgccgatgcgctcgtattcgaaccacagggcctggtgctcacggggggtgatttcgacgtaagtgtagtactgcacgaacggcatgatctggttgatcaaaatgtcccggcagattggggagtcgtcgttccagttattcgcgtcggaagcttt

SEQ ID NO: 498840 - DNA, 1757 bp, Homo sapiens
cgcaggcgggcgggagggcgggcacggagaggcgggcgccgaggaggggcaggtagggctgggacgcaggggtaactggatcccccgacttcagcccaggccctggtctgaccaccctgggagcagggactttccacagtcagctggacgcacactcagcccagtaaaagaggggacccatcccgggagccccggggagggcacagctgcctcctcccgggctcccctgccacctggtgcctacctgccccctgctccctgccgggtccggtcctcaccccatcttcatctggccttgactctgcccttgaggggcctaggggtgcagccagcctgctccgagctcccctgcagatggaggaggccatcctggtcccctgcgtgctggggctcctgctgctgcccatcctggccatgttgatggcactgtgtgtgcactgccacagactgccaggctcctacgacagcacatcctcagatagtttgtatccaaggggcatccagttcaaacggcctcacacggttgccccctggccacctgcctacccacctgtcacctcctacccacccctgagccagccagacctgctccccatcccaagatccccgcagccccttgggggctcccaccggacgccatcttcccggcgggattctgatggtgccaacagtgtggcgagctacgagaacgagggtgcgtctgggatccgaggtgcccaggctgggtggggagtctggggtccgtcctggactaggctgacccctgtgtcgttacccccagaaccagcctgtgaggatgcggatgaggatgaggacgactatcacaacccaggctacctggtggtgcttcctgacagcaccccggccactagcactgctgccccatcagctcctgcactcagcacccctggcatccgagacagtgccttctccatggagtccattgatgattacgtgaacgttccggagagcggggagagcgcagaagcgtctctggatggcagccgggagtatgtgaatgtgtcccaggaactgcatcctggagcggctaagactgagcctgccgccctgagttcccaggaggcagaggaagtggaggaagagggggctccagattacgagaatctgcaggagctgaactgagggcctgtggaggccgagtctgtcctggaaccaggcttgcctgggacggctgagctgggcagctggaagtggctctggggtcctcacatggcgtcctgcccttgctccagcctgacaacagcctgagaaatccccccgtaacttattatcactttggggttcggcctgtgtcccccgaacgctctgcaccttctgacgcagcctgagaatgacctgccctggccccagccctactctgtgtaatagaataaaggcctgcgtgtgtctgtgttgagcgtgcgtctgtgtgtgcctgtgtgcgagtctgagtcagagatttggagatgtctctgtgtgtttgtgtgtatctgtgggtctccatcctccatgggggctcagccaggtgctgtgacaccccccttctgaatgaagccttctgacctgggctggcactgctgggggtgaggacacattgccccatgagacagtcccagaacacggcagctgctggctgtgacaatggtttcaccatccttagaccaagggatgggacctgatgacctgggaggactctcttagttcttaccttttgtggttctcaataaaacagaacttaaaaaattgtctaagaaaaa

SEQ ID NO: 498841 - DNA, 1514 bp, Homo sapiens
  misc_feature (945)..(945): n is a, c, g, or t
  misc_feature (1000)..(1000): n is a, c, g, or t
  misc_feature (1017)..(1017): n is a, c, g, or t
  misc_feature (1048)..(1048): n is a, c, g, or t
cgcaggcgggcgggagggcgggcacggagaggcgggcgccgaggaggggcaggtagggctgggacgcaggggtaactggatcccccgacttcagcccaggccctggtctgaccaccctgggagcagggactttccacagtcagctggacgcacactcagcccagtaaaagaggggacccatcccgggagccccggggagggcacagctgcctcctcccgggctcccctgccacctggtgcctacctgccccctgctccctgccgggtccggtcctcaccccatcttcatctggccttgactctgcccttgaggggcctaggggtgcagccagcctgctccgagctcccctgcagatggaggaggccatcctggtcccctgcgtgctggggctcctgctgctgcccatcctggccatgttgatggcactgtgtgtgcactgccacagactgccaggctcctacgacagcacatcctcagatagtttgtatccaaggggcatccagttcaaacggcctcacacggttgccccctggccacctgcctacccacctgtcacctcctacccacccctgagccagccagacctgctccccatcccaagatccccgcagccccttgggggctcccaccggacgccatcttcccggcgggattctgatggtgccaacagtgtggcgagctacgagaacgaggaaccagcctgtgaggatgcggatgaggatgaggacgactatcacaacccaggctacctggtggtgcttcctgacagcaccccggccactagcactgctgccccatcagctcctgcactcagcacccctggcatccgagacagtgccttctccatggagtccattgatgattacgtgaacgttccggagagcggggagagcgcagaagcgtctctgggtgagtaaccggtgcttgtcggtgcctgcccctgnaccccgctgccccaccatgctctcagtgtgaccagatcccaccctggggctaccnacaccctctgccccctntgtctgggcgtccccttgctctctcgccctnctgacccctttgcgtggctgcccctccttctgatctgtccccacagatggcagccgggagtatgtgaatgtgtcccaggaactgcatcctggagcggctaagactgagcctgccgccctgagttcccaggaggcagaggaagtggaggaagagggggctccagattacgagaatctgcaggagctgaactgagggcctgtggaggccgagtctgtcctggaaccaggcttgcctgggacggctgagctgggcagctggaagtggctctggggtcctcacatggcgtcctgcccttgctccagcctgacaacagcctgagaaatccccccgtaacttattatcactttggggttcggcctgtgtcccccgaacgctctgcaccttctgacgcagcctgagaatgacctgccctggccccagccctactctgtgtaatagaataaaggcctgcgtgtgtctgtgttga

SEQ ID NO: 498842 - DNA, 870 bp, Homo sapiens
  misc_feature (165)..(165): n is a, c, g, or t
caccgctgcgtcgccgcagcatttggctggcaggaagagtccggttctgggacagctggggacagtggtggtgactgaaataactttaccaaaggaaagctatttggcgaactatcttctccagcgcgagagtggccaatgtgctgtgtaacagcagccagactngttgcctatctcccaggattatggctcttgagtttaacaagggttgtcaatcccaaagccttttcgacctgctggatcatcaggttcggatgagtctcatgtggctgctgcaacctccaagatatatgctctcagaacagtgtggccggatgaaatctatgggacccttggacctcaagatcagaggttccagctttcctgggaacataggttggtgtgtcacctcaagtgggactgcttcacagaacgaaaagcctggtgcataaaacctttgcctgatgttctagcagaacctttatcaagtgaagcacatgtgttctgtgatggcccactattgtgaactgccttccgggtaatgatgcgccagttggaatggggacctttacccagtgcggagaaccttactttggaaggtgccagagtacgaggtgtgcatggccgggctgttcaggaatcgctgcgacacgatttggatccctggttccagaagtagctcatgtgcacctatggtctggcggttcccaacctacaatggttgttgctgtggtgccacattcacttgcgaatgctctttacattccagcgggcgaggactcgttggcctccaccgggggagggggggctgacaccccttcgggggggcgcgaacaccctttggggggcgcggtggtgcggggcgggtcggcctgtgttgtcgccgcatct

SEQ ID NO: 498843 - DNA, 277 bp, Homo sapiens
  misc_feature (93)..(93): n is a, c, g, or t
gcaaatttcagagagtctcaggtgtcaggctgaagtctggactcaattatcaacaaggagcctagtaagttcttcattatggtaaaaacacgnataaaagtgatattttagaaaaaccggccaggtgtggtggctcacgactgtaatcccagctttttgggaggctgagacaggagaatcacttgaacctgggaggcagaagttgcagtgagcggagaccatgccattgcactccggcttgggcaacaagaatgaaactctctctctcaaaaaaaaa

SEQ ID NO: 498844 - DNA, 875 bp, Homo sapiens
  misc_feature (419)..(421): n is a, c, g, or t
gcacattaaccggcaggatgtcggaggtgcggctgccaccgtacgcgcccctggacgactttggtctggggtcggcgcgtctggcggtccggatccatgcgacccgcagcgatggtgccaccgggtcatcaacaactccttctattaccaaaccaataccttctctgcttcggcatcggactcgctctcgccggtgatcctggtgcacgccttcgtttgcgcctgcgacaactttaaagaaccaagattgagcacccaagatcgaagagcatttggtctcaaagcgggacgcccaatttgtgcccttgcctacattaagacgcgctcctctgggcacaaagcgagccatgggaagtgccttggtattccctaagagcccccttgggaattcttgtaccccagggacctcttgcgttgcnnntatatatctccagccccataaccccaagcacataatttggtgacccaagagccctttttcccaaggcactttaaaaacagggagcattaaggaagcctcacttttggcccaaaaaaaaggcgtacaagaagacaccccacgagagggggggcaacaccccaccccaagatctttttcccgcgcaggtgggggggagagatgagtacacaacaaaacacacaccacacgcgagaggggggggggggccaacacccacccaaacagcacataaaggaattaagagaagaaccacagcgcacacagcagcaagccacagagcaggcagctccaccagagagagccacctgctaccccgccggggagaggcagcacacaacaacaacacaagaaggagagcaggagaggcgacacaacaaacaacgcgaaagcagcgcagcaagcggacacaggaaga

SEQ ID NO: 498845 - DNA, 82 bp, Homo sapiens
ccgccccccgctcccatccttcctctcgtactcttccccccctccctcctccctgccatgctactccccctcttctctgcct

SEQ ID NO: 498846 - DNA, 82 bp, Homo sapiens
tttttggtttttttttcccccccagttttaatgttagggggaagggatttaaccccttatttaaaaaaaacttgttttcaga

SEQ ID NO: 498847 - DNA, 105 bp, Homo sapiens
  misc_feature (16)..(16): n is a, c, g, or t
  misc_feature (54)..(54): n is a, c, g, or t
  misc_feature (82)..(82): n is a, c, g, or t
gatcttcctggaaatnagcagtgactaacgctcacataactggttttttttttnaactgggctgatgaatacatttacctangaaactcatttcgttttacttaa

SEQ ID NO: 498848 - DNA, 113 bp, Homo sapiens
tcatcaaaccctagtacatgctaagaatttaccagttaaagcgaactacttttctcaattgatccaataacttgaccaacggaacaaggtaccctagggtaggttttcgatgg

SEQ ID NO: 498849 - DNA, 579 bp, Homo sapiens
tgtatctcccagctgctaaccctagcatccagaagtggcacaatataccccgtctgactgtctcgatgtgtgcaactgagatctgtcagagcagtggctatctcaggggtccagctctgcagcggtgggggctagagaggaagcgagggagtatatggacagaggatgcccacgctcaggtggttgcagaagtcagtgcccaggccccacacagtctccaaaggtccggcctcccaagcgcggggctcctcgtttgaggggaggtgacttccctcccagcaggctcttggacacagtaagcttccccagccctgcctgagcagcctttcctccttgccctgttccccacctcccggctccagtccagggagctcccagggaagtggtcgacccctccggtggctgggccactctgctagagtccatccgccaagctgggggcatcggcaaggccaagctgcgcagcatgaaggagcgaaagctggagaagaagaagcagaaggagcaggagcaagtgagagccacgagccaaggtgggcacttgatgtcggatctcttcaacaagctggtccgagcgga

SEQ ID NO: 498850 - DNA, 156 bp, Homo sapiens
aactgtgtaaaagtagacaacggtagaggggatacaggttgagggctcaacatgagcaaagacaggagatagcagataggctaggggtaatattgtcacaagtagacaacaggaaatacagtaacaagccctaggacctaggcccatatctatcat

SEQ ID NO: 498851 - DNA, 182 bp, Homo sapiens
ccccgggtttttaaaaaaggagggccgaaagggcccccccccctccagggtggcctttgatccaaaattagggaaaaggctgtccctggggggccccccctgttcccgtttgggggtttgaaaagtttgaaaagctgggcctttttttgggggaaaaaaaatatgaaacttttggattccca

SEQ ID NO: 498852 - DNA, 384 bp, Homo sapiens
  misc_feature (12)..(12): n is a, c, g, or t
  misc_feature (358)..(358): n is a, c, g, or t
accactcttagnagttgtgtgcccattcccttaacacaggtagatctgtcttacccgtttcctgggtgggaccttaggaatccagtgccctgagactatgtctttattatttatgcctagtatctcagtcttcccacactggcaaagagtatagcaactggtggttagtgataattgacaaggttctgtccaggctgcttttttgaggtctttgttttagtaagctatgaaatggagctgtctcttgcatgatgaataaacactctaccattgtctccactggccctagctgtagtacctggctgataggattatggtggaaattgtgttattgggaaacctttgagccttgagagangtagaaattggttcagaaactgtgtc

SEQ ID NO: 498853 - DNA, 991 bp, Homo sapiens
tgacacgtgctgacactacaaggctcggtagctccgggcactcagacatcatgagttggtccttgtcaaccgcccgagaactttaatttctcttacttactatgctctttatatgatcttcatcattcaacgatgtgtagcatatgttgcttaccaataagactacatgcatgccatctctagatgaaacgattcgggagtcattggtccaatctacctgctgggcacttgccatgactttcctgtgctagcttatccagaaccataagttagtaccaaggtacttctaacagatccttatggcacacgtagcattcttgacatcatagtttgtaaaaaactaagatccctcatggacatgtcaacatcaagtcttgactccaaaaggcatattcctcatacatcctaactctacttagaatccccttgaacttgaactccaattcaaaaagacccaataaaattattggatatgcaacgcttggctcacctctctcgcacagttccccatgggacaaatcatagctcctatgccaatgcacaccattcttattcgtaactattactttgaaagccaattacagaactatgtactaaacacacaatttgaatccttccaggaggttattttccggcactaatttccttggccacagggcacaacattgattactcacactcttcaacagaattgacacttcccacaccatcacggacgttgcgcattcttaataagcccgttagcacacagtggaagcagaacagggtataagcgccccctacaggccttttggcacacaggtccagacaaggtttgcgccaagcagaaaaaccccctttttgccatacacaagggagcgaagcgcggtattggccaaaaataatcccccaatatgcaatctagcttgcaaccttgtgcgggcaaacacgagacctttttggtccaaaagggacccacactctgtgcgcccaaaaataatacgcgggcgag

SEQ ID NO: 498854 - DNA, 885 bp, Homo sapiens
tggactggtcttcccagccctaaaccctgccccaggaagcccacagcctcacctgctgctgcccctctaggtctgggcagccatgacctgcagggcccagagacactgtccttcccctcatccacccaaaggccccagccagcgctcataccctgtcctttctcccttgaccccaaggtgcacagagtgcaaggcctcctgtctacagcagcttcctcagtttcctacttgctttaggaggccccttgtttgttgttcagggaaaggcctcttcatgggcatgttccttgctggggcgcgagtgggggtttggtcccacactcttgctaagtttcctgaggatgagggtctaagccccctgtgtggggacagacacagtgtgtacgacctttcttcctgctagggcctgacactgccctgggtgtcgggcccttctggtgggccacaggcttgtggccaaccccgtgtaacagaaattcgagtgctgtatgcttggccagaccccagagcgccttgtgccatcttacatttcccttggccaaggagtagattgggggttcccagccatgggtcgaaggaaacacaaaatccctacgtgattatcctatgttcccacgttgtgcaggccgaaagacgccagggaccacaggcgtactgggccagggggtgctggaaattgtccagggggtcacgcaggttccaccaagcgttggacctgtcccaagcctgtggatagcttctgccatgcaattgagcctcctggcatgcttggtctggaggtgggattgtgaccgggccatgggctgaccttttggtgcaacaagacttaatggcctcagacagacacaccacacaaaacatcttggagccgccgtcactaaccat

SEQ ID NO: 498855 - DNA, 685 bp, Homo sapiens
  misc_feature (539)..(539): n is a, c, g, or t
taaaatcaagggccttgtttttttttttcacaaggaataaaccaaaagcgcgccaattgggttaaaaaatagtttttttaaccacagttaccacggttttgttaaaaaaggcaacgcgccggcatttgacagcccctcaattaagaaagggcaagtgtgaagaatgaaaaccggtacggccagagggatattaggcgagcgggcaaatgttggatatacgaattgtccattccgcttgggtacagccaggatttacagagtcgaaagggtatcaacagcaggccagtgacgtgtgatatgactctttttggcgtgatttcggtaccggggagttcaaaagagcaccccgagcaacaaaggtggctcagacactggcgctataagattgagccgtgcgagttccactgtagagctcgccttggaggactagggagtgacccctgttaggccggccaccgtggtatctcgttccgcgcagtacccaacagagttgtcatggcatgtgcaaccgtcgtgtcatcgttcgatggtgcatatgngcctctgccgtcagggtgaagtcggcccgcaggtgattcacttagagtttcaccatctgcctcatgaccatagtcgtacacgttataaaaatctcgagctttcagactctcatatgtgggtccaggggtgttctcgctcggccgaa

SEQ ID NO: 498856 - DNA, 785 bp, Homo sapiens
agcggagcgcgggccgggccgggacggggactgtcggctgcaggcggcatgcccaccaacttcaccgtggtgcccgtggaggctcacgccgacggcggcggggacgagactgccgagcggacggaggctccgggcacccccgagggccccgagcccgagcgccccagcccgggagatggaaatccaagagaaaacagccattcctcaacaatgtcgaggtggaacaagagagcttctttgaagggaagaacatggcacttttcgaggaggagatggacagtaaccccatggtgtcctcgctgctcaacaagcttggccaactacaccaacctgagccagggcgtggtggagcacgaggaggacgaggagagccggcggcgggaggccaaggctccgcgcatgggcaccttcatcggcgtctacctgccgtgcctgcagaacatcctgggcgtcatcctcttcctgcgcctgacgtggatcgtgggggtggctggtgtcctggagtccttcctcatcgtggccatgtgctgcacatgtacaatgctgaccgccatttccatgagtgcgatcgctaccaacggtgtggtcccagctggcgggtcctactacatgatatcgcgctcgctgggacccgagtttggaggcgctgtcggcctctgcttctacctgggcacgacgtttgcaggggccatgtatattttggggaccatcgagatttttctgacgtacatctccccgggtgcggccatcttccaggcggaggctgcaggtggcgaggcggccgc

SEQ ID NO: 498857 - DNA, 161 bp, Homo sapiens
cctcaaattcctgggctagggcgggcccggtggctcacacctataatccaagcactttgggaggccgaggagggcagatcacttgaggtcaggggttcaataccagcctgaccaacatggtgaagtctctactaaagagacttctctactacatttagtct

SEQ ID NO: 498858 - DNA, 409 bp, Homo sapiens
cctccaggtcctgtttcctagccactccattgagatggagagccctggagttgggggctggcattcggcgggagccgggtcatagaccctgacttgggagtgttgcgatgccggcaggctgttggaaaactctcctcagatggctgcctgtctttttgcagacaatgctgaccgccatttccatgagtgcgatcgctaccaacggtgtggtcccagctggcgggtcctactacatgatatcgcgctcgctgggacccgagtttggaggcgctgtcggcctctgcttctacctgggcacgacgtttgcaggggccatgtatattttggggaccatcgagatttttctgacgtacatctccccgggtgcggccatcttccaggcggaggctgcaggtggcgaggcggccgc

SEQ ID NO: 498859 - DNA, 336 bp, Homo sapiens
  misc_feature (290)..(290): n is a, c, g, or t
  misc_feature (293)..(293): n is a, c, g, or t
  misc_feature (326)..(326): n is a, c, g, or t
gaagaacaagaatcttgcctctgtcacctcaggcctagaaggcagtggcacccatcagagcctcactgcagtctcaaacctccctggacctcaggtaatcctccccaccctcaacctccctgagtagcctgggacctacaggtgtgcatgacccatgcccagcctaattttcttttttttcttttttttgtagatatgggatctatgttgcccaggctggtcttgaattcttgggctcaagcaattgtcccacctcggcctcccaaagtgctggggttacaggcgtgagnctntgcgcccagctgagactggaatctttatagaanccatatctac

SEQ ID NO: 498860 - DNA, 146 bp, Homo sapiens
catcagcagcctgagcacagcctggtcacacaccaactttctttccttctgttttttgtgtgtatcgttgtttgtatgtatgtatttgagacagagtctcactctgtcgcccaggctggagtgcagtgacgcgattctcagacggg

SEQ ID NO: 498861 - DNA, 205 bp, Homo sapiens
ttcgattggcgggcacttagcgagacaccatctctacaaaaagtaaaaaattagccatgtgtggtggtgtgcaattgtgatcccagctacttgggaggctgaggtgagaggatcacttcagcccaggaaattgtggctgcaactagctatgagtgcaccactgcattccagcccaggtgagagattaagttgcccgccaatcgaa

SEQ ID NO: 498862 - DNA, 140 bp, Homo sapiens
  misc_feature (11)..(11): n is a, c, g, or t
gtcacactgancatcgccagctgctccacagacgcgtctcttgtctcctcggcctgccccacttcagggctgctgtgagatggaattccaggaaagaacttcaggtgttctggacccttttctatctagcataatatttt

SEQ ID NO: 498863 - DNA, 117 bp, Homo sapiens
aatcagctcggtacccttattgttgatctgagcagttgccagtccattgctattgaatcattaattgttatttgaatctgtcctcggttactcatttcaataactgcttctgcatag

SEQ ID NO: 498864 - DNA, 791 bp, Homo sapiens
  misc_feature (491)..(491): n is a, c, g, or t
  misc_feature (589)..(589): n is a, c, g, or t
ggaggtgagctcgggtcagatcgctctggatgcgcgctagctgcaccggaccgacgggatgagcaccgcgaagacccggcggagctggaagtccagatagagcggtttatgcctccgaactagttggatcgtgtaatgccgaagtgtatcgtgaagaggagctaaaattctgtggcgattgcagcagcgccatcgtcggagcatccgccatagtggcgctgccagcatgtgcgtatatcgtgttacggccgatagatcgaggagaagcatatgagcgcactcgtagtggacaccgtggggattccgcccggaagcaacgtgagtggaagcaagacacttatcacctgcgaccactggtgctggtgggacgcatgtgattcgagggagaatcgcttgacgagtgtaggcgctgcagtcatctggtggagacgcgtaaggatgaccgagtgcaccgggagcactagtgtggcgtaagggacacgaataattgnggtaggcccatgccattgcgtagcacgcgttgtcctcgccatgccacaattttgcaactccaaatgcatgatagggttccaacctcgtgtcgcacgcncccacacagagagaagcgtcgagatctctcgtggacggcgcgcatcgaaaagaacgcggtgcgcttatgttgcctaggaaatctcaagggtaggtaagcgcaagcgtagagacagtgctgccagggcgggggctagcgcaagttgaggaacttcccatgacgatggactaggttgcagggtttgcatcacaggagctgtgac

SEQ ID NO: 498865 - DNA, 111 bp, Homo sapiens
tggaaggccgggaccgcggatgggtgtcggcgtgaccaggccttagctccctgtctttcctcagtgaaataggtctttaaaccctgcgtggcattcctgaaggaaccgccg

SEQ ID NO: 498866 - DNA, 84 bp, Homo sapiens
ctagaagattcagcaaagtacttttgtgctcttggggaaccccttcctaaggtactgggggatccctggagtgcacaactcttc

SEQ ID NO: 498867 - DNA, 107 bp, Homo sapiens
atcagaaatatcagaagaatgagtgatgattcttctgtatcatcatatgtaaatgatgtcttttacttatatagcaccggaatcagtcataatgctatagcaagaat

SEQ ID NO: 498868 - DNA, 942 bp, Homo sapiens
  misc_feature (7)..(7): n is a, c, g, or t
  misc_feature (143)..(143): n is a, c, g, or t
  misc_feature (174)..(174): n is a, c, g, or t
  misc_feature (177)..(177): n is a, c, g, or t
  misc_feature (207)..(207): n is a, c, g, or t
  misc_feature (869)..(869): n is a, c, g, or t
  misc_feature (872)..(872): n is a, c, g, or t
  misc_feature (887)..(887): n is a, c, g, or t
  misc_feature (899)..(899): n is a, c, g, or t
  misc_feature (910)..(910): n is a, c, g, or t
ttcgctnttttgtgcacttctatgacatggaaattattgaagaagaagctttcttggcttggaaagaagatataacccaagagtttccgggaaaaggcaaggctttgttccaggtgaatcagtggctaacctggttagaaacngctgaagaagaagaatcagaggaagaagctnacnaaagaaccagccaaagccttaaattgtgcnttacattctgtttttatgatgtaactgcatttgacctaaccactgcgaaaactcattccgctgtaatgttttcacaatatttcaaagcagaagcacgtcagttaggatttccttcggcagaagggttgtggtgtagtgtaatgtctgtaatcatagtctaccatcaaatattttaggagtatctttaatgtttagatagtatattagcagcatgcaagaattacatcataaggtctcaagcagaggcagtctattgcaaggaccttctttgctgccagttatcataggctgttttaagttagaaaactgaatagcaacactgaatactgtagaaatgcactttgctcagtaatacttgagttgttgcaatatttgattatccatttggttgttacagaaaaattcttaactgtaattgatggttgttgccgtaatagtatattgcctgtatttctacctctagtaatgggctttatgtgctagattttaatatccttgagcctgggcaagtgcacaagtctttttaaaagaaacatggtttacttgcacaaaactgatcagttttgagagatcgttaatgcccttgaagtggtttttgtgggtgtgaaacaaatggtgagaatttgaattggtccctcctattatagtattgaaattaagtntanttaatttatcaagtnatgtcatgcccngattttataanttgtatttatcaataaacattgtgataattgg

SEQ ID NO: 498869 - DNA, 943 bp, Homo sapiens
  misc_feature (7)..(7): n is a, c, g, or t
  misc_feature (143)..(143): n is a, c, g, or t
  misc_feature (174)..(174): n is a, c, g, or t
  misc_feature (177)..(177): n is a, c, g, or t
  misc_feature (207)..(207): n is a, c, g, or t
ttcgctnttttgtgcacttctatgacatggaaattattgaagaagaagctttcttggcttggaaagaagatataacccaagagtttccgggaaaaggcaaggctttgttccaggtgaatcagtggctaacctggttagaaacngctgaagaagaagaatcagaggaagaagctnacnaaagaaccagccaaagccttaaattgtgcnttacattctgtttttatgatgtaactgcatttgacctaaccactgcgaaaactcattccgctgtaatgttttcacaatatttcaaagcagaagcacgtcagttaggatttccttcggcagaagggttgtggtgtagtgtaatgtctgtaatcatagtctaccatcaaatattttaggagtatctttaatgtttagatagtatattagcagcatgcaagaattacatcataaggtctcaagcagaggcagtctattgcaaggaccttctttgctgccagttatcataggctgttttaagttagaaaactgaatagcaacactgaatactgtagaaatgcactttgctcagtaatacttgagttgttgcaatatttgattatccatttggttgttacagaaaaattcttaactgtaattgatggttgttgccgtaatagtatattgcctgtatttctacctctagtaatgggctttatgtgctagattttaatatccttgagcctgggcaagtgcacaagtctttttaaaagaaacatggtttacttgcacaaaactgatcagttttgagagatcgttaatgcccttgaagtggtttttgtgggtgtgaaacaaatggtgagaatttgaattggtccctcctattatagtattgaaacttatagtctacttataattgatcaaggtcatgttcatgtcctgattttaaaccgtgggtctatcaacatttttcttgtgg

SEQ ID NO: 498870 - DNA, 573 bp, Homo sapiens
agaaatcctcatgcctttaagacttctgtgcatgacttgacgttttggatcccgtgcctagggtctgtgaacgaggcctggtctcattccctggaggatttcgtttccatgggcttgtatttctcctcttgccagtgggagtactgctaggtctcttctctgtggaaacttcacgagcgttggctgggcctcgtgcgttcgctggagtgtactccagggtgaaggcagagtgggattcgagacccaggttaggcacgagccaggctgagaagggacgtttccatcattcacagtagcctccccagagacactagctcaggcccgaacctcgaggccacacaggcgagactgggaatgagcaggctggcctggagctggaaggtgagacccggggcctcacggagcaatgggtcctgagtgggcccgagacggacaccaaggccaagaggtgaacaacgtctgactaggggatgcctggaagtcccgggcaccaccagggacggtctgggagaaccacgaaagccagggtctcacaggaggcccgagggcacctcaaggactacccggtacgcc

SEQ ID NO: 498871 - DNA, 719 bp, Homo sapiens
  misc_feature (33)..(33): n is a, c, g, or t
  misc_feature (70)..(70): n is a, c, g, or t
  misc_feature (95)..(95): n is a, c, g, or t
  misc_feature (109)..(109): n is a, c, g, or t
  misc_feature (113)..(115): n is a, c, g, or t
  misc_feature (138)..(138): n is a, c, g, or t
  misc_feature (147)..(147): n is a, c, g, or t
  misc_feature (156)..(156): n is a, c, g, or t
  misc_feature (162)..(162): n is a, c, g, or t
  misc_feature (175)..(175): n is a, c, g, or t
  misc_feature (178)..(178): n is a, c, g, or t
  misc_feature (182)..(182): n is a, c, g, or t
  misc_feature (190)..(190): n is a, c, g, or t
  misc_feature (193)..(193): n is a, c, g, or t
  misc_feature (197)..(197): n is a, c, g, or t
  misc_feature (200)..(200): n is a, c, g, or t
  misc_feature (202)..(202): n is a, c, g, or t
  misc_feature (207)..(207): n is a, c, g, or t
  misc_feature (239)..(239): n is a, c, g, or t
  misc_feature (261)..(261): n is a, c, g, or t
  misc_feature (269)..(269): n is a, c, g, or t
  misc_feature (646)..(646): n is a, c, g, or t
  misc_feature (649)..(649): n is a, c, g, or t
  misc_feature (664)..(664): n is a, c, g, or t
  misc_feature (676)..(676): n is a, c, g, or t
  misc_feature (687)..(687): n is a, c, g, or t
ggctatgaggtaacggcatccgacctccccacngcgaaaagccactccgcggcaaggcgtcacaagaggnaatgccgaagcacgccggtggggangcccgccggcaganggcnnncggtagtgtaatgccccaaccanagccccccnccaaagagngggggnggaccggcaaggnggngacnggagaccngcngcangcnanaaccncaccacaagcccccaagcagaggcagcccatngcaaggcccccccccgccgccnggcaccanaggccgccccaagccagaaaactgaatagcaacactgaatactgtagaaatgcactttgctcagtaatacttgagttgttgcaatatttgattatccatttggttgttacagaaaaattcttaactgtaattgatggttgttgccgtaatagtatattgcctgtatttctacctctagtaatgggctttatgtgctagattttaatatccttgagcctgggcaagtgcacaagtctttttaaaagaaacatggtttacttgcacaaaactgatcagttttgagagatcgttaatgcccttgaagtggtttttgtgggtgtgaaacaaatggtgagaatttgaattggtccctcctattatagtattgaaattaagtntanttaatttatcaagtnatgtcatgcccngattttataanttgtatttatcaataaacattgtgataattgg

SEQ ID NO: 498872 - DNA, 558 bp, Homo sapiens
  misc_feature (485)..(485): n is a, c, g, or t
  misc_feature (488)..(488): n is a, c, g, or t
  misc_feature (503)..(503): n is a, c, g, or t
  misc_feature (515)..(515): n is a, c, g, or t
  misc_feature (526)..(526): n is a, c, g, or t
atagcattgcatatgtatatttatcattcattaatgtatcttcaatgcatgaggcatgtcttatttgcattggatcccttctttgcttgccacgtttttcaatatggcttgtttttatggtttagaaaactgaatagcaacactgaatactgtagaaatgcactttgctcagtaatacttgagttgttgcaatatttgattatccatttggttgttacagaaaaattcttaactgtaattgatggttgttgccgtaatagtatattgcctgtatttctacctctagtaatgggctttatgtgctagattttaatatccttgagcctgggcaagtgcacaagtctttttaaaagaaacatggtttacttgcacaaaactgatcagttttgagagatcgttaatgcccttgaagtggtttttgtgggtgtgaaacaaatggtgagaatttgaattggtccctcctattatagtattgaaattaagtntanttaatttatcaagtnatgtcatgcccngattttataanttgtatttatcaataaacattgtgataattgg

SEQ ID NO: 498873 - DNA, 556 bp, Homo sapiens
tggaaatagggtctcactctgtcgcccaaacgggagtgcagtgaagtggtgcaatcttagctcactgcggtctccacctctcaggtgcaagtgatcctcccatttcagacccccaagcaggtggcactacaggagctcgccaccacgccgggctaatttcctggtatttttttggtaagaagatgggtgttttggccatgttgcccaggctggtcctgaactcctgagctcaagcaatctgcctgcctcggcctctcaaagtggctaggattcacgggcgggacgccaccggtgcctgggcctacctcctttaacctgttgtttcacaaaatctttggtccctttccctttttttttttttttaaaatggggtgtctcccgctcattgtgtgaccccacaagcgttcgggatttacaaatgcggcacatgtacatccagattcaacacgagcaagactacaagcccacatgaggataccaacagaagatacccttggaacaaagacctaccacaaataaaactcggaaatgccacgaccacaaccacaaagaccaa

SEQ ID NO: 498874 - DNA, 241 bp, Homo sapiens
ttctcacgtcagccttccgagcagtagaggttgaggagggaggatcacttgcagcccgggagctccaaggctgcaatgagccaagatcgcactgttgaactccagcctgggtgacacgagcaataacctgtctcaaataatactaatacatccggcttagcgatatattactacgactacgatacggtacgactacgactacgactagaactacgatagactacgactacgactacgactc

SEQ ID NO: 498875 - DNA, 185 bp, Homo sapiens
aaccgggacccctttgacaaatgtctctgagcttctgggatgtagggcgagcccaacaacatagctaccctggaggactgtgccaccatcagagactcttcaaacccaaggcaaaattggaatgatgtaacctgtttcctccattattttcggatttgtgaaatgctaggaattaatcctttgat

SEQ ID NO: 498876 - DNA, 454 bp, Homo sapiens
ataagcccatcgtgactcaaaactcacttgtataataagcagtgttgagggattttaaagtttcaaaaaaagaaaaaaaaaaaaaaaaacaaaaaaccgttgttgtgcgggccgcgcccgcgggcccccgagaaaagagtttctaagaacccgttccgcgttggggggcgcgcggcggcgccccgagggtataggggaaccgggcgggcccagagcagcgcggctgccaagagaaaaatccggggtcacgcggcaaccagcggggcggcgacattccatcccaacactataaaaaacgcgcgccgggggggcagacgcgcggagacgtttgggaaacaactccccaagaggaggagtctccgaggaggcctctatcaggggggctccatcctacacggggaggagtccaaggcggaagccgccgaattcaaatttaggccccgcggcggggaaa

SEQ ID NO: 498877 - DNA, 1590 bp, Homo sapiens
  misc_feature (1469)..(1469): n is a, c, g, or t
atgccagagagctggatttctcctagcattactgccacgtggctttgctaacgagacggctgctctcgctaccctactgcgacgctgcagactccaacgctgcacagcacgccttcctcgcatcaagcgttagcacgttttactgctccctggcctgctgcgtcaacctactctgactcggcctacacttcctacacccatggcacccaacgcagccccgacctctctttgcgcacgctacacacgcaacctccggccttccccactcccactacctggcatctacgcctgcacttcggccacaagaaccccccctacaccccacggcaaaaaacctctcctctgcaactaggccctgggccttcctggcgccttgccttgcacaacaagctctgccgcacgccccttccgtcccgacaaacgccccttatctgcactgcacacacccgtactaactcttgcctgccgcagctcggtggcaccggggcgaagctcaacgccatccctcggcaacacacacgcggaacgcaatctccaccaacgcgcgcctcccctcatggggcccccttgggcaactttcctcatcccaactttccccgggctcgccaatatctcgtcaaaagaagcccacattcctttacgtatttccccccaacgttccaagaacggggcccagtaacgtccttcgcaaccagatgctccccgagactgttcccggccttaacctattccccccgaaaacacctggccacttggcaacttcctttaatcccccccctattaaaccattgccaagcttaaagctggcgcccgttgttgatgcccgacgaacaaccccctctttcccggcaggccgttcgccccaacgagaaacaaacaccctaagagacactatgggcccctgttgcgccacggacagcttgttcggcaaaacgaacttttggagccgcactcccgtttagcgccgcccccctctttaaacaacacacactgggtccccccgcttataacacacccgcttgggcgccatttcgtcaacgtccactgcaactcgggcaaaggaagcgctgccgattgtgttagggtccccaccgctgtttccctcaaatcccgcgtttggctgccgcatccctgcgagggccctcatcccctccctccaaagaagacggcgccatttacacctaagccacaaagattttaatgcttttggcagggatcctcccctcctctgcgtcgcgctggcaccacgccggcccagcataagagtcccgcaactacgagattccgcgaaacgcacgtcgtttccccgcttttagagtcttttgcccgccccctgttgtgtggcccccctattatggggaccccatatattggcggcgcgggcccgcgaccggctcgcggcccccatcatttgctcccgtacttgtaggccgcaccatccaccacgcggagtggacaaaccagtcctnccctctttcggggggggcgcgcggcgccagcacgcaccgctgccgccttctgtcgctcgacacgccctccttgggcggcgacaactaggcaccccctcctacgcctcctcaatccccccgg

SEQ ID NO: 498878 - DNA, 1061 bp, Homo sapiens
  misc_feature (400)..(400): n is a, c, g, or t
  misc_feature (406)..(406): n is a, c, g, or t
  misc_feature (408)..(408): n is a, c, g, or t
  misc_feature (415)..(415): n is a, c, g, or t
  misc_feature (417)..(417): n is a, c, g, or t
  misc_feature (419)..(420): n is a, c, g, or t
  misc_feature (493)..(493): n is a, c, g, or t
  misc_feature (508)..(508): n is a, c, g, or t
ggattacatttattgattcacgtatattgaaccagccttgcatcccagggatgaagcccacttgatcatggtggataagcttttgatgtgctgctggatttggtttgccagtattttattgaggatttttgcatcaatgttcatcaaggatattggtctaaaattctcttttttgattgtgtctgtgccaggctttggtatcaggatgatgctggcctcatacaatgagttagggaggattccctctttttctattgattggaatagtttcagaaggaatggtaccagctcctccttgtacctctggtagaattcggctgtgaatccatctggtcctggactctttttggggggtaagctgttgattattgccacaatttcagagcctgttattggtctnttcaanantaactcntncnnagtcttgggatggaaatgtagtgctcgagtcacattctgcttaaagttgtaacaaatacagatgagttaaaanaaaaaaaaaaaaaanaaaaaaaaaaaaaaaaaaaaaaaaaaaaaaaaaaaaaaaaaaaaaaaaaaaaaaaaaaataaaaaaaaaaaaaaattttggggggggccctgtccccaatatcctctatagtgggtcgtattcaattaactgcccgcggttttacaacctttgaattgggaaaaccttgtggtaccccacttaaatcgcttggcagcaaatccccctttctccagttggtttaaaatccatggggcccgcaccgatggcctttcccaatagttgttaaccttgaatggcaaatgtaaaattgtaagcgtaaatatttggtaaaaattcgcttaaaatttttgtaaaatcagtttattattaacccaataggctctaaatttgcgaaatcctttttaattaaaatgaatagactctaataggtttgcactgtgtcccacttggtaacaacattcctttttataaagaacgttttttcaaccttaaagggctaaaaacctgttttaaggccgattgctcctctcgtgtaccattaccctaatcaagtttttgtgttccggtgctc

SEQ ID NO: 498879 - DNA, 204 bp, Homo sapiens
agacacacacagtactaggtccccgttgacaatctgaggtggggtggccttaggagttcgcctgccaaggctcgcatctcatccctcagggacgttgtcctgagagatgtaccactaactagtattggatgcgcttcccatccaggatacgggacacctcgctctgctgggacttgattacgcgggagccgatgaccgacgtgc

SEQ ID NO: 498880 - DNA, 186 bp, Homo sapiens
gaaatcctaattacgcctgctcctcatgatgctagtcagattcgtttctgctgagccaggacgggaacttctggggtgggtttttttaaataagcgatagaatggtttaactttccaaacctaatcttttaaagtgcctgcctcctttattttctgagtgtaaaggaaacatggcattttagtctc

SEQ ID NO: 498881 - DNA, 878 bp, Homo sapiens
  misc_feature (400)..(400): n is a, c, g, or t
  misc_feature (406)..(406): n is a, c, g, or t
  misc_feature (408)..(408): n is a, c, g, or t
  misc_feature (415)..(415): n is a, c, g, or t
  misc_feature (417)..(417): n is a, c, g, or t
  misc_feature (419)..(420): n is a, c, g, or t
  misc_feature (493)..(493): n is a, c, g, or t
  misc_feature (508)..(508): n is a, c, g, or t
ggattacatttattgattcacgtatattgaaccagccttgcatcccagggatgaagcccacttgatcatggtggataagcttttgatgtgctgctggatttggtttgccagtattttattgaggatttttgcatcaatgttcatcaaggatattggtctaaaattctcttttttgattgtgtctgtgccaggctttggtatcaggatgatgctggcctcatacaatgagttagggaggattccctctttttctattgattggaatagtttcagaaggaatggtaccagctcctccttgtacctctggtagaattcggctgtgaatccatctggtcctggactctttttggggggtaagctgttgattattgccacaatttcagagcctgttattggtctnttcaanantaactcntncnnagtcttgggatggaaatgtagtgctcgagtcacattctgcttaaagttgtaacaaatacagatgagttaaaanaaaaaaaaaaaaaanaaaaaaaaaaaaaaaaaaaaaaaaaaaaaaaaaaaaaaaaaaaaaaaaaaaaaaaaaaaaaaaaaaaaaaaaaaaaaaaaaaaaaaaaaaaaacagataaagtgctcactaataaaaaaacttgaccctacaaggcgcattcagcctaatatatgccatgatccataaaacggctagcctgaaaaaaacatggacgaaatcccataaaatggggtagaaaaaaaagtagaggaagatgcctctaaaccatatgaaggggtaaaaactaggggagacgccaacaaaagtgcgccgaataaaacctagttctactcgatggcgtaaagaaaaaggggtcctatccgatcctgtgcagcgacccacatgacct

SEQ ID NO: 498882 - DNA, 333 bp, Homo sapiens
  misc_feature (32)..(32): n is a, c, g, or t
ctcctaatacctttatctcttggcatggtatnaatatacacggggataaatagtatctcctcaagaatctgtgggcacatgacagtggatatgtagagtgagtgcttcagaacagtgctgacatactgtatgatcagcattgttttcactgccagtttacttttgggttacttccattctactttaaagagaaacagaatattctgttacctctgctgctataaaccctggaacataatttaagttactgcttactctttcatactccgttgtaactaacagtgttaaatcagaatgtccaggctatacgcacatttctaggcatgtacattg

SEQ ID NO: 498883 - DNA, 1356 bp, Homo sapiens
  misc_feature (980)..(980): n is a, c, g, or t
gtcctaatggccttacagcggagccgtagtgggacaagagtggcatctgcatacttatccaatacgaatgaggagcactcatgtcacgctcgtacaggccgtcattcgcaaaggcatcagtgctgatcttgatgtctccttcactgctggggagcctgtggtcgtaaccatgggggcacgcctgggaagtcggagtgtgcggacttgaaatcgactccccacggaccctgcaggatattcatcttactccttaaagtccatccagagacacacgccatgacactcgttgcttcgggctggaggacatgcgggacctgcggaggtacgtaccgggggaaactccggaaccttgacatgtttggtatatccatgaaaacgaatgcgttttctcgtggcatgttgtaccctaagtaactgagaggccaccgcttggtaaagaaaggcttcttttcattcgcccttgggaggcaacaaccgtgggtcgcgtcacgactcgttaacaacggggatccgtaggatagttcgaccccaactttgtgcatcccaaaagtggctgaccaatccgttcactacattaggaccggttccttaccataacatccggaccctgattgaagcaccgtgggtcctgtcttggcactggtcaagctcggaaaagcacgtgggcgcctcctatggtctttagcaatcgagcacttggtttttggcgcctgcggccttgtgagactcatcccaacgttccgcaaacttgcgtgcacccgtcaaggacatggcgccgttgctaccccttccccccacagaggtctctttgggtcagataagcacgtcgcacgctctcggggcatcacctccgctggaggccggacaaacaacaactcagttcacaccccgaacagagctggcacttcccacttgtaactggcggggcgaccgtataactcaaccacacttcgtcctattcttgcccaacagagcatccnaactgggggtctggggcacaccgtttgctggagcgcccttttgcaaagacttaggaaccccttcccttcgcacatcgtggacgcttctgcgcgccaaagtgaacgcacactacatttggttggcgtgaaggacactgtggaacccttaaaaccagtgcgtttggtgggacgaacacaacgcttaggacccttggggtttggtatcgggagccgaccccacccccgatgtggggtcacaggtcccctgcgcaaacagggaaacacaaaccgggggtggcgttcggctttgggaaacattaagtgcggcgcgcccagtgttcccacatgccctgggacttcgcacacatggatgatttgcaccacacttaggcccgtg

SEQ ID NO: 498884 - DNA, 223 bp, Homo sapiens
cacacacacacacacacacactacacacacacacacacacaaacactcactaatagagccatgaagataatacaaccctaagccaggcatggtggtgtgtgcctgtggtcccagctacttaggaggctgaggcatgagggtcacttgagcacaggagttggaggccagcctgggcaatgtagcaagatgttgtctctaaaacaaaaacaaaaacaaaaacaaa

SEQ ID NO: 498885 - DNA, 310 bp, Homo sapiens
ctatcaccatatagtaggaagtgcagacgaactccgtcgcagtgatctcagatatgactcctccagtctggaagatgtagcctaactcctcctgtattgcggcaccaatcttgggatcgccaagtcccaagagtactttcttcttttatggacggcagtgtgggtctccaagagcaggtggaggtcctcatgaacaactcccttcagactacggcgttggcattttccaaggcaacctgggatgaggcaaagggacaaaaggccaccagacgaacgatgctgtggaatttgcccagcttgagacacgcga

SEQ ID NO: 498886 - DNA, 354 bp, Homo sapiens
ccccctgccctccgtgccacgggctttcccctacctaggggagcctcccccagacagggaaaccacgccttgccacccttttttttccctcccactttacctggccgggtcatttttggagccccttctttttggcccgaaatgctccagggccctgttgtattttccctgccccagcctgaacccagctatttttggtgcagcctggttcattgtgggaaaatgtcatccaaagcccggggtttggctccggatgtgctcattgctactggggggtcctttcaactgggggagcaagggaacccatttatgtacatgcccccccgcatatgtataccccccgtttcttgggga

SEQ ID NO: 498887 - DNA, 193 bp, Homo sapiens
ttcccccttttccctttttttttttattaaaaggccaagctttttttttccttggttttttaaaaaccggaaaaaaaaaaactcaagacctttgggggggattttggccttttttcccggggaaaaattgggctttttttggcttttttgggggtgttttttttaagttataaagttgaaaaaataaagggga

SEQ ID NO: 498888 - DNA, 475 bp, Homo sapiens
tgggcttgactcaggattaaaaaacgggaacggtgaaggtgacagcagtcggttggagcgagcatcccccaaagttcacaaggtggccgaggacttgatggcacatggtggtttttaaatagtcatcccaaatatgaaatgcttggttacaggaagtccctgtgccatcctaaaagccaccccacttctctctagggagaagggcccagtcctctcccaagtccacacaggggaggtgatagcatggcttctcgtgtaaattatgtaatgcaaaattttttataatcttcgcctattaatactttttatatttggtttatatttggaatgatgagccttcgggcccccctttcccctttttttgtcccccaactggagatgtatgaagggcttggggtctcccgggcgagtgggtggaggcagccaggggttaaccgtgtacacggactggagaccagttgattaaccagtgcac

SEQ ID NO: 498889 - DNA, 1544 bp, Homo sapiens
  misc_feature (902)..(902): n is a, c, g, or t
agttgtcggaaatgtggtcgccaccacagtatgtttgtgtaaaaggaagggcgcccccttctaaggatgtgttgttcatccgtctgttacatagtgaaccacaaatttgttggtcatcgtctcgcttggtttccatctcccgcgatgaaattttgtctcgttaaaaagtcccctacaggatggtgacaagattcaactttttggtctgcttgggggtggtggacatcacaaaactgtggtgtggttgtgggtggtcacaccacccgtgtaccacacagacgtcgtctgagtcggtcagatcatccattgttttgtgggcctccagtcgtggtgcccaacggatgatattttgttccacaaaggcatggttaatcgaccaacgacgagatggggcgcacacgtgtcaaaccacacccacccccttggtgggtgttggtggttatacaacacaccgtttgtttgtggtgatccctccggaaggcgtttgtccccccgcaaacgagtgttggtcgtgttgcatctcgacccacggtgtccgccaacacatatggatgggtcccggaacacacgagcccgctcggtgtggaagaaaactagtctgtggagatttgtcgtttttgtgtctcctcgggttattctcgctctgtcgcgccacgaaagagattagttgcttcggcccgtctcgcgaagaaagcccccgtcgtttgttgattttcatcgctgggggagaaacactgctttcgtgataaatgcgccgcgaaaccacacgtcttgtgggggcccgccgaaaagttgtcttgtggggtaagacacctcgcttattttgggtcgcggtgcacctctccacgatgggagtggtaacctgtgtccctccgaaagatattgttattgtcccacctggngcccccccgctgggaagacactgcttttgtccccccccaacgatggggggtcccccggctcccaacggtgtcacgctttcggctgggtaacactcgatgagtgtgagggagagattttcgcgggaagaaacacacagcactgtacttccctgtcgatacacaagtctggagactttgttaagaccccaccaccacaagcgaagttttttctgcctctcttcgaagctttgtggcacagcacactgtctttatgtctaacactcaaaaggagtcgaaagggtgtattctctcgcgaggttgaagacacactggagagtggctgtcgccactcggagaaggagaagaaaaagcttgccccatgttgccctgttgttggagcacctgagaagggcacatcttgtgcgcctttatggcttctcgagggctattggagggggcctccctgccatgctgtgtttaccacgatgattaactttgctggccgtatatggagcattgcccctgcccaccctgtgcctctttgagggctttttccctgtctgccttgcccacattggttgtcaactaaagggtatgttccctcttgtccccttccctacccttaaatttggggtccttttttaaacaggaaaaaccaaacca

SEQ ID NO: 498890 - DNA, 328 bp, Homo sapiens
  misc_feature (141)..(141): n is a, c, g, or t
  misc_feature (236)..(236): n is a, c, g, or t
  misc_feature (264)..(264): n is a, c, g, or t
gagatggagtcttgctctgtcgcccaggctggggtgcagtggcgcgatctctgctcactgcaagccccgcctcccaggttcacgccattctcctgcctcagcctcccgagtagctgggactacaggcgcctggcaccacgnccagctaattttttgtatttttggtggagacggggtttcaccgtgttagccaggatggtctcgatctcccgacctcatgacctgcccgcctcggnctcccaaattgctgggattacaggcgtnacaaccgcgcccggccggtagcaatagttttaattaaggtcttaaaatcatacaaaaaggaatt

SEQ ID NO: 498891 - DNA, 854 bp, Homo sapiens
gctccccccgccgcggtcgtggtgtggtggtggcctgccctccccgccggcgtgtgggtcgccctgcgtgcgcccccgggggtgtgagtctctgtccttgggagttgccgctgttcgtgtgcggctcggctcctgccgtgtcgcgcgcgtggcgcgcgcgccgctcccccccgcccgctcgcgcgtgggcgggctgtcgagggggcttctgcgtgttctgtgtctttgatggttgcggtggcgcagaggagcgctggctctggtttctttcttgctcctctccccccccgcctcgccgccggtggggcgtggcagctctctctctgtcttttttgtctccgtctctctctatttttgcgctcgctcgcgcgctcgtctctgctgacgcgcaccgctcgcgcctgtagcatctagttggtggtctttctgttgtgtgggtcgttggcgtcgcactctctcttgtctctcgctctctctgtctgtctgtggcctgcgcgcacacccccgccccgccgcgggcgggcgattttttttgcttatatatagttatttctccttctctatcagagttacgttacggcggcggtccctgaggtatttttctaagtggcggctgggggtgtgcctgtgtttgctctctcctcctcttcttatatagtagagttgtcctcctctccacgtcctgcttcatacacaccacctcctctcgttcttccttcctccttcttcgtctcttcaacacgcgcgcgccctgttcttctgaaggggaaagaaaatacaccacccccacaattttttttttttttttttcggcgcctcccccccccaacaaaaaggtttgtttgcttgcccca

SEQ ID NO: 498892 - DNA, 1074 bp, Homo sapiens
gctgaccagcaccatggcggttggcaagaacaagcgcctatacgaaaggcggcgaaaataggtgagccaagaagaaagtggttggatccattttctaagcaaagattgcgtgtgatgtgaaagcaccgtgcgtagtgttgcaagtataagaacatatgggcgaacgagcgctcggtcaccagtgacccaaggtaaccaaacattggcatctgatggatctcaagcggtcgatgctgtttgacacgtgagatctgggctgatttgacagcaatgatgcaagttggcagttgtaggatagaacttcaacgctgacttactgacaggatgttcacgggtaaaaaatcgtgcctgactaagcttccatggtcatggatcttagcctcggtgacaaaactgtgttccagtggtcaaaaaatggcaggacaagtgagttggaacgctcacgttgattgtcaacgactacgcgatggttgactctgcttcgtctgtgtctggtggttggttgtccactaggaaaacgcaacgaatcagatacggaagacctcttatgctcagcgaccaacaaggtccgccaagatccggaagaagcatgatggaagagtcatgacccgagaggtgccagagcaaatgcacttgacgagaagcggtcaataaattgattccagacagcattggattaagacctagcaaaaggcttgccaatctattgatcctctccatgatgctcttcgttagaaagagtcacaccatgccttgaacgaaggcccaatgtttgaacttaggggaaagctcatggagccttcactggtgtaagggcagctagtcttctgggaaaacgccaactgggggaccgagcaacaggcgtggctcaccacgttttgaacggaccttgatgggactattgaactccacccagttcccaaggaaatcctggtttcacacgcttcagcaactttcacatactatgtgggccaaatacaaacagttgctcatctgtgtaccacaaaacgcaacacacacctcccgatggcattcttttgccagggttcacggccacagcgcgctctcgcatgg

SEQ ID NO: 498893 - DNA, 863 bp, Homo sapiens
aatactattagccactacatgacgatgtgggccaagtgagagaaaagtgtacttcagcttactcagtatgaagcctttatgttctgaacgtaacaagtacacctagcgaactgataggaatcatttgtaaaaatctttaaggagacttttaacagtccttcgtgaatagagcaggcgaagaaatacaaacctgtgcattccttgaatcacaggagcactactggattcaaactgccaaaattattgaaaggttttaggacttactatacctagtactgttaagatcatactgaagtaaaggacgttctctcactaaggaccaggtgtcttaaggttaagtgtgtacaagaagtactccacagaacaatctgctttttgcatcattggtttcatgaatttatccatgttgtgcttaagtgcttctgctaagtgttagccaaaatctacgccatttatatttagtcgtgtaaacctagattaaatgctgtagtatctgtggaatgtactatatagcaacgatacagagaaaattgttcggcatgtcagagccttattggttagcagactgcatgtgtgatacttgtttttcttaaagccaatatatttgatgcgaaagaaattcagtttataagataaatctgaaaatcattaatgaattaggagttataacacaattcatagtgatattaatctttcatatttcccattaaggaacactaagcattcataacgttacccagggaaaaagtgtttgctggaaaatatatttaagaagaagggttccagccaatgggttcccaaataagacgttggcttaacaacattctttctggaagggataagaacaaggacaaacagaaaac

SEQ ID NO: 498894 - DNA, 772 bp, Homo sapiens
  misc_feature (301)..(301): n is a, c, g, or t
  misc_feature (311)..(311): n is a, c, g, or t
  misc_feature (391)..(391): n is a, c, g, or t
  misc_feature (642)..(642): n is a, c, g, or t
ccccagtgcaccctgcaggtggtagattcccaaggtcgattgggtcttggcttggtacaggatgtctggtgcatgtgtgtacgttgctgcaagggagcaaccgttcacgaaaagtgtatctcaggattcctgtatggccccagagtcatcccagaggccccggcttcacctgtggcgctatggagactttcgatcttgatgatgcagacgaatttggctacagccggctaaggaggggatccgggtttggcccccagccccgctcacgcctagtccctcttcctctgccgggagggtgttnttcaactccnaaccccagagaggggttgtagattgggtccagctttgcttcagtgtgtggaaaatgtctcgtggggtggcatcggggctncggggtggggaccccaaggctttctggggcagacccttgtcctctgggatgatgggcactgctatccacagtctctgccagttggttttatttggaggtttgtgggctttttttaaaaaaaaaaagtcctcaaatcaggaagaaacatcaaagactatgtcctagtggagggagtaatcctaacacccaggctggccgccagctggcacctgcctctatcccagactgccctcgtcccagctctctgtccnactgttgattatgtgatttttctgatacgtccattctcaaatgccagtgtgttacacatcttcgctctggccagccccttctgtatttaaagcttttgaggccccataaaatagtacgtgctgtctgcca

SEQ ID NO: 498895 - DNA, 109 bp, Homo sapiens
  misc_feature (19)..(19): n is a, c, g, or t
  misc_feature (64)..(64): n is a, c, g, or t
tggggctggtcaggaaacnaaggagacccccccccccaaccatggacccgggactccgcctcgntgcctcggaagccgtcggtaccttggcagcgccaaatggaccagc

SEQ ID NO: 498896 - DNA, 863 bp, Homo sapiens
cagggtgtcgttcggcgacgattgtagggtgtcgcgttttttttctgcttccctacccccgagggttcggtcccgcccccgttttgcgttttgacgaggctgttagcacagtctttctgctggccctttgtctggctagcccctctactcctggggctgtgggcccctgtccccctcctgtgaaatggggtagccccgtttccgcggatagtgtcaggctttctctcgtttccgcccacccctctggagctctctttttctgccagccgatcctccctgggtggagatgcgtcccggcacggcttgcttctctcgtcacacacgtgccacagagagcgtcgtgcgaccaccggacaaccggtcttcgctggggaaaaagacaggtgggcagacacgagtcttctcgccagaacccctcggtcctcgccacacgaaacactccccccctcgcgaagcgtggtgccccccgccagggcaccccacggctggaaaaaatgtcgaacgcccccacgagggcccacacagtaagtgccaagagcgaccccccccccagcccccccacgagggggtctactgccctcgcccaaggctgagcctctgaaagatcggcgccgcattctttcggtaccaccagtcccgtaggacgagtctgcgccccgcgcccggtgttctccgccctacggggtcgacgggtgatgttctcacgccctggacgtttccaccacgccactgtgcggccctacctctgccacgcggaacccctggctcccccctaatctctctatgacacctgtcccacaagattccggaataaccatcacccctcccaaacattacaaaaagtttccccacgcgtcataaca

SEQ ID NO: 498897 - DNA, 145 bp, Homo sapiens
taatcttagagggtagatacccagttctgctgagatcatatttttaaagctggatacatggcaatgaagagcttgcacagaaagtggaagtgtggttctgccataaagtgtccttgttgttccatgcacactattagcattatct

SEQ ID NO: 498898 - DNA, 1530 bp, Homo sapiens
ataccatggaatactatgcagccataaaaacaggatgagttcatgtccttggcagggacatggatgaagctggaaaccatcattcttagcaaactatcgcaaggacagaaagccaaacactgcatgttcccactcataggtgggaatggaccaagtgagaacacttggtcacagcgcaggaacatcgcacatgtgacttgtgtggggggctggcgggcttgggggagggactggcattaggagaaatacctaatgtacaatgacggagtggatgggtgcagcaaaccagcatggcacattgtatacctatgtaacaaaccttcatgtggtgcacatgtatcctagaattcaccagtataataaaaaaaatcataccagggtctttcctatagaaagatctaagcttgttaaaaaaaaaaacaaaacacacaaaaagacaaagaaaaatgagaaaaaaagcaacagaaaaagcaagaaagagacacagacaacgacacggagcagaagaacaaatgagaagtaaggaaaaaatagagagggcgcactaaaaagaagaggtagagacacagagaagggcgggggactgagagatgagcagagacctcaggcaagaacccgacggggccgacacacaaaagagcgactcgacgacaggaggcccacgaagagagagtgtgagcaaaaactacagacgtacaagcggggaagaaatacagagagatgaagaacgacaagggaggaaaaaaaagcaggagagaacgaggagctagaataagaagagaaaacgcaggacgagaaaagagagacaaaagagagaaagtaaaagggggaggaggacggaggactatagcgcggaacacgtagagagagcactaggggcaaggaaaggggagagaccaggaaaggaggagagggaggagacagatggtagggaagcgcggaagaagaaaagacggcacacggagcgaaggaacgagagcgcggcaagcaaggcaagggaggcggacggaacgagaggaggcgcaagccgagaggaaaacagcaaaggcaagaatgaagacacgtggcgactggagcaaacgggcgacagcggacagagcgagagaatagaagaaaatgaaggagaacaaggaaggagaagcagaaaacgggaagggagacgagagaacgaggaggaagcaaaggaaggagggagggagttaggatagagagaggagcaggagaagaggagagagggaagaggagacaagaaagaaaaagcgaggagagagagggagagaaagagagaaggagggagaaaaacaagaaaggagaggcaggagaaggagcagggagggagagctccagaggagcaaggcgaacaaatagaggaaggaacggaaaaaaggaagagaaagagcaagaggacacaagaaagaagacaacacaaggagggaagaaagaagcagaagaagacaagcggcagaagacgagggaaaaacggaaggagagggagagagaagaaagagcgaaacgaacgaggaagcagag

SEQ ID NO: 498899 - DNA, 174 bp, Homo sapiens
gatctcgaaggttgtttgctcatgcgcacagtcatgaccttcttgccgtagttgcggccgtgcatcatcatggagtttgtgaggcgctccacaatgggacactgagctttgcggaagcgtctggcggcataccgccctgcactggtgatgctatgaccactgtcgaggctagga

SEQ ID NO: 498900 - DNA, 440 bp, Homo sapiens
ttgcaacagaaaacacaagaaagtcaaaaaaagaggcaacaagatgatactgatgaatacgatgatgacaagtctgcagactcgacttcataaaagccacagcctgtgcaacctcagcaaggtgatattcctccaatggcacagacaggactgcaaccagtaccaggagcaccaagaatgcctccaggaatacctcaataaatgccaggtgttcctcctctgatgccaggaatgccaccagttatgccaggcatgccacctggattgcatcatcagagaaaatacacccagtcattttgcggtgaaaacataatgatgccaatgggtggaatgatgccacctggaccaggaataccacctactgatgccctgaatgccaccaggtacgcccccacctataccacgtcctggaattcctccaataactcaagcacaggctg

SEQ ID NO: 498901 - DNA, 204 bp, Homo sapiens
tcatcctgctacacaacaaaaaaaaaaaaaggaaaggaaaaaaattgccctacctataattataaggggaaaatagcagtaggtaacaataaaatattttatagtccttatgtaaatagatgggacacgactattttagaagacaaaacttgaccccacagatttcctaaggggcccccaagaaaattacagcccagtttgaga

SEQ ID NO: 498902 - DNA, 438 bp, Homo sapiens
gctacttggaagctcgaggtgcaatgttccaggtacgtagcggctggggagtccctgggagggatctcatctattttcagactttcaacaaatccgcacgtgtccatggtcgactgactcatcgttcatatttctgtttccaggctatcagcttgtgaccactgctatccaagactttgcaatccctcctacatgatctgcactgaaataacccgatcccttctctctctgtcactatttaacacactacttaaccactagttcagggattctcactaactgctcagactgactcgaacccttatgtgaccccatctgaggcggacaaatttctctgccgcagtgacactgatctaataatcctgcagtgcctacagccctccgttggaagggaaggtaagctgagacagtgctgttcctagagactgaggacgatcc

SEQ ID NO: 498903 - DNA, 113 bp, Homo sapiens
cgttagacactggtaggttcggagacactggcaggttcggagacactggcaggttcggagacactggcaggttcggagacactggcaggttcggagacactggcagtgttcgg

SEQ ID NO: 498904 - DNA, 773 bp, Homo sapiens
  misc_feature (113)..(113): n is a, c, g, or t
  misc_feature (156)..(156): n is a, c, g, or t
  misc_feature (160)..(160): n is a, c, g, or t
  misc_feature (162)..(162): n is a, c, g, or t
  misc_feature (164)..(164): n is a, c, g, or t
  misc_feature (177)..(177): n is a, c, g, or t
  misc_feature (191)..(191): n is a, c, g, or t
  misc_feature (236)..(236): n is a, c, g, or t
  misc_feature (273)..(273): n is a, c, g, or t
  misc_feature (276)..(277): n is a, c, g, or t
  misc_feature (285)..(285): n is a, c, g, or t
  misc_feature (329)..(330): n is a, c, g, or t
  misc_feature (336)..(336): n is a, c, g, or t
  misc_feature (364)..(364): n is a, c, g, or t
  misc_feature (373)..(373): n is a, c, g, or t
  misc_feature (400)..(400): n is a, c, g, or t
  misc_feature (407)..(407): n is a, c, g, or t
  misc_feature (420)..(420): n is a, c, g, or t
  misc_feature (441)..(441): n is a, c, g, or t
  misc_feature (457)..(457): n is a, c, g, or t
  misc_feature (466)..(466): n is a, c, g, or t
  misc_feature (474)..(474): n is a, c, g, or t
  misc_feature (493)..(493): n is a, c, g, or t
  misc_feature (507)..(507): n is a, c, g, or t
  misc_feature (602)..(602): n is a, c, g, or t
  misc_feature (614)..(616): n is a, c, g, or t
  misc_feature (620)..(620): n is a, c, g, or t
  misc_feature (646)..(646): n is a, c, g, or t
  misc_feature (656)..(656): n is a, c, g, or t
  misc_feature (659)..(659): n is a, c, g, or t
  misc_feature (661)..(661): n is a, c, g, or t
  misc_feature (675)..(675): n is a, c, g, or t
  misc_feature (679)..(679): n is a, c, g, or t
  misc_feature (693)..(693): n is a, c, g, or t
  misc_feature (772)..(772): n is a, c, g, or t
cgtcgtcgtcgccgctgctgccgctgctgttgctcctgaggctgctggctgaggccggaggatcgagcggcggcggcggcggcggctgagagggcggcggcgggagcggaggngaacgagggaacgggaggaagcgagcgaggagcgcgcagagcntatntntnccgtccgcctgangagccgaagcagcnccggccccgccgccgccgcctgcccgccggacaaagccgagagcncgcgcccacagccatgtcctcgtcagcaggcagcggncannagcccagncagagccgcgccatccccacccgcaccgtggccatcaacgacgnngcgcantacctaatgactattgcaccaacagccnggaggggangctcttctccaccacaacgggaggaantcgaatnatttatgataganagtttactagttggtatcgtngcaattatcacatggntcagacccnaacctgcnatctgcccaatatcccagnagtaactaacactngcaccttaattgaagactccaaagtagaagtaaacatttgaacaactatgaacaatcacgacaggaaacatgcagttggggatgatgctcagttngagatggacaannnactntcctgcaagatttagaagaaaagcancaacactganacntntgtgcacctgattnggcnaataggatcaacantgaaaagacagaagaggcaataccagcagtacccattacagtctccacctccccgtcttcctctgggtgcaaaatgatng

SEQ ID NO: 498905 - DNA, 84 bp, Homo sapiens
gtgatccgaggattactcttcagcttgtgtgacctgagagtagccctgcactccagcctgggcgacagagcaagactctgtctt

SEQ ID NO: 498906 - DNA, 168 bp, Homo sapiens
aatactataaaatccaacagaaaaaaatagcatttactattaaaaaaaaaaaaagaattagtctttgtgggtttggggcaagcaactgcccttctcagttaggatgggggagttctggacatttctagctaaagcccaggggtcaagggaatgataaactcctcggtc

SEQ ID NO: 498907 - DNA, 537 bp, Homo sapiens
  misc_feature (77)..(77): n is a, c, g, or t
  misc_feature (85)..(85): n is a, c, g, or t
  misc_feature (307)..(307): n is a, c, g, or t
  misc_feature (381)..(381): n is a, c, g, or t
ggaaacatgccccctagcgggtatactctatccaagattctgcaaatgccaacattttaccatggatcacccctggnccatcctnttcatcttccgggactaaggcacgctctgcagctctgcagagctcaagtagtgactggtgaaccaagtaacaacttgttccaggtcaccacagagtggggacaaacttaagctcccttagcaatttagctttagaccacaaaggccaaatctaccaggatatatttagtgctatcgagaccagcacacagcctgtaacagcaacctatcaggcacatgagangagaacatgattttcccaaagtgggggaaatgccatcttgggcagcggggcttcctcacaagcaggcccttgtncttcctgagaagtggaacagacactagctaaccctaatggccctctggtccctgctgttctcctcaactgtagggcaggaggacttgttccatctgcttccctcttcctcttccttctctcttctatttaccccttcctttttgattaagaaactt

SEQ ID NO: 498908 - DNA, 455 bp, Homo sapiens
  misc_feature (281)..(281): n is a, c, g, or t
  misc_feature (357)..(357): n is a, c, g, or t
  misc_feature (412)..(412): n is a, c, g, or t
  misc_feature (448)..(448): n is a, c, g, or t
aattcgcggccgcgtacgacaatgtaataaaaaaaaatgaaaaaaaggtctcagtgtttttaatgcactacatatttgtatgcaagacaagcatccagtttttttctgtaatgcagtgacagtgtggaatgaccactcagccattataaatttgtgtactcagggcccttgtctcacccaactatctctataaactgctgcagtagcttatttgtacaagacacttgtgaaatcagttttcttacattatagtcatgtcacatatggaagttggtcttgantccgtaaagggaatatgtttctacataacaggaataggagaaatcgtaacgttgaatatcttgaaagaaggctaangatgttagtccgtgcctataggagaggacccgtaccagcagagttaattaagggnatcatgctatcagttcatagcacatagtgaccaggngtgtcgc

SEQ ID NO: 498909 - DNA, 1631 bp, Homo sapiens
cccacgcgtccgcaagcctgggtgacgagtgaaactgtctccaaaaaaaaaaaaaaatctagaattctgggaagtacattataattggcccttcagaatagattcccagtccctggtggtggctcacctttataattttaccataagttttacctaattcgtaagtgggcagttttagatagataacattctgggggggtagctagggatttacctttggtcatccttttcctggcacttctctggaattccctttatagatgtacaggttttggctttaacccactggaagatggctggtacaattcataaaggggtggtgatagaatccacatgggctgtcaagaaggagatcttaccaagggacagttgactgactagtctcagatggtttcatatcatttatactggggtaagagtaacctagataactggggcgtcgtggtgcacacctgtagtcccagccactctgaggcaggaggacggcttgtgcccagaagtccgaggctgcaggtgcagctgtgatggggctacggcactccagccggggcaacagataacggaacctccatactctttaaaaacaacacaaacgggccgggggtgacaaaaggcaaagcctgaaaccccaagacacctgggggaaggccaaaggccgcgacggaaccaccgtgaaaggacacggacccttgaaaacacagccgagcgccaacatgtgtgaacaccccaactctctagcacacagtttcgacacaatcgctgggctaggaggcagcgaccctgggggcagacacacaatatgaacagcgaaagagagaaaatccgcgcaccatcgggacaacgggggcaatcaaaaggcaacaagcgcacacaagcagacctagcgccgggcacaatcagagaccgtctccaacgacaaggacgccctagacggacaaatctacatcgcatcggcaacgactcatactaaccacacatgcacggcggcacacacatgcgctcgacaagacagcagcagcatatcaagaaaaagactctccccgttcatcttctgctggtgaataaattacgaccccagccgacaccagacaccaagcacaccacgagatcaaaaccacgccaacaacacaaaaatcacaacgcaccaaagcaccaaaccagcccaccaaaccacacacaccaaacgaacacgcacgacacaacagaaacagcaccacaaaccacatcaacacaaaaagagaccgacactaggcccgacaacacacagcaacaccacagactacaacaaaccaaacaccgaacagcaaaaccaccgccaaataaacaacaaaaggaaacaagagaggcggcgaggacagaagaaaacaccacaaaagcaagaaaccacacaaacgcagagaaagcatacagaaaagaagagaagaaagaacaacaggaaaagagagagaacaaagagcaaagaaagcacgaaacgagaagaaaaaggagaggaacgagaaagaagagaaagagatcagtcatacaagaacagaaaatacagccaggaaaaaacaaaacacatacagagaacaagaaacaaaaagcaagaggagaaagagcgcaaagagacagacacgacaaaaacaccatag

SEQ ID NO: 498910 - DNA, 290 bp, Homo sapiens
agcgcactagcctcatgcttgtctgtgggacggaaaagatggaaggaggcatctgtgcctcagtgcctgagcacagagagggtaggcctcttagaggcacaactggtttccttcgtggggttcacagtctgatgcgcggctggtgtatcgccaccagtgtatctcctcccaggaccctgggggcacggggctgtggaggggaggaactgctcatgcccagtgcctgatactgtgggcacgcattcatgggcatccattgacgaggactaagtgcccagcaggataccgag

SEQ ID NO: 498911 - DNA, 103 bp, Homo sapiens
  misc_feature (19)..(19): n is a, c, g, or t
agaacaaacgaaagcatgnggcacggtcaagaagagacatatagaaaaagtatacggtggcatgcccccttccttaagcttgaatcctttaaagcggccgcct

SEQ ID NO: 498912 - DNA, 239 bp, Homo sapiens
tcctcgcgtccgagtctgactacgcggtgggggtgtgaggatccgaacaggtgtggggggtggaggcggctcctgcgatcgaaggggacttgagactcaccggccgtcacgccatgagggccctgtgggtgctggtgcctctgctgcgtccctgcttgacctttctgggttcgtgctcagacgctgacgatgagatttgatgtggatggtacagtagaagaggatctgggtaaaagtag

SEQ ID NO: 498913 - DNA, 256 bp, Homo sapiens
ccgaatatataataaggggtgggggtggtgttagacttctccctaagaatagtgggcatccattataggatttaagtgtggtgagctgtagtcagatttgaattttcagaagtccactggctgggatgtggagagtacactgaagagcgtaagaagagatgtgaggatcctagctgggaagctgttgcaggaatttgagcaggagatgatgggatggcagtgtcgtagagtaggaggaaagcacagccatttaggt

SEQ ID NO: 498914 - DNA, 429 bp, Homo sapiens
gagacagtaacactatctcacagcagcacccccggagcctgcactgaggagggcggagcgtggcgtcaaaggactgggccagcagctcacatcaccctgtcctccctttttcaggcctaggttcactgtcccccaggcagcttcacggctgtttttacacacctcccattgtagctgtctcaccgggtcatcggtgaccacggtgtccaccatgttaccgagagcttctctgtgcccctggacgagtcctaaggctgtgctgtctccggactttctgcaaaggaccctgtaagtgctcccagcctccccggcctcgcaggcaaccttctctcccccgcctcccggagccggcctcgaaggcaccttctctccccggcctcccggcacgaagactcgtgccggcacgaggatgaagcagacatcgaaaga

SEQ ID NO: 498915 - DNA, 1074 bp, Homo sapiens
gggaagtgaggttccataccacctggactggcctggagcaaaactggtggccgtgtgtgcaaaaatgaactgagctggactgccatctggaccctctgcctggatcagtgtcctcctccccctccaacagagaccccctactacccacagtcatcataccagatatcaggactcagatgaggacgtgcgttcccgcgtcaggcactagatacggcgcatgattaagtcaggtgggagagcattacaacatgaaccgtggaaaaaattgatagtcatgatgacactgaagagactacacaagaagccctgccctgaaaggcatcagaagatagggtccaagcgacggcaggtgggaccgcaacagccagtagcacctgcgagccgtaaagacacgccgaagaagagagccagtccggcccaaggaggagacacagcggcagaggaagggagggccaggcatgggaaacgtaggaagagtgagagaggcaaagaaaggtgcgagaaggaggaagagagtcagggggaagaagaagcagggtgacgcagaggacgtaggaggtgaaggtaaggaagggacgaagtagaaggcttagagacaaaggagaagatagggtcgttagaccacttaggataagagagcagagtgtagatagagagaaagaaggaaacaggataaggcaagaggatatcaagagtgggagaaaaggaagtgaaagtaggtatcgcgagatataaacaagggaaaagaagtaagagggaagggtataggcaagagcacgtactgaggcgctaggggacaaggtacgagaagatcggacctcgaaagacgctagagggccagatagagggtcggagcagagaagtagagagacagaagacgaagaggtacaaggagcgcagtagatgaacaggagcggggatacaagagatgaaaaaatatagaagagaggaaagggaagtgagccggaaagagcagagagtagaatagtcagagagacaagagcagtaggagagcgataggaattgggacatagggaagcacaatgggtaatacaagccaatagaggcagcggg

SEQ ID NO: 498916 - DNA, 303 bp, Homo sapiens
tgcccctgccaaggttgccctggcgttgagtcctggggtccctcccggagtttttgggaaaaagggccctttgtggccccctcccgcacgccaggcccgggttcccccgtgggtttcaaaagcccttgggccccggcccccttttgttttagcatgggccccccatttgaggggtggcctggcctttggggtccccccgctcctttgcgaagtcccctgtgggtgccatcatggtttccgggacctgggccagcgggaacgtgggggccctgggtgtgttgatataaagtcggcattactcca

SEQ ID NO: 498917 - DNA, 692 bp, Homo sapiens
ggagaactgtctcagtttttttttttggtggttcgatctatatctatttttggaagaaaccaatccggggtaaagaaaaaagggaatgaggtttggggacagaggtgctgggggtgcgaaagaagccccagcccctgagtggtgtggtggagggaagggaagggtcacttgtaaaactacatgctccggctcgtccttctggatgacagtctggtatgctttctcgaagtccttggccaggacaatgtagcggttttcacggacagccaacattccactctcctgacagatgggacgttaatatcagttcctgaaatcttatctgggccgggccacatagtcttccaagtcaacctcctcagagaggttcatctggcaagtggatagtgggagaaaatcaagtctcttctgggcggaggtcaggaagtggaaatccaatttaagggtccagccgtccgggccgtacacagggccggatccagggtgtctgctctgttgggggccatgattaccttgacattgaacattctgatacaaatccatccatcggattcaggcagctccagcaggatcccttgaacctccctgtgggcccctgtttgagcatcggaatcctctggggggcaatggcatacaatctccgtctatgacagcatcgatggcaggtgaattctccttggccaggggaaacc

SEQ ID NO: 498918 - DNA, 419 bp, Homo sapiens
tgatcttggtgcactgtaagctctgccgtccagggctcaagcgattctcatgcctcattgctcttgattaactcacattagaggagtgtgccatcacatccatctaattattgtatttgtatagaagagacagggtttcgtcatgctagcccaggctggacttgacgtctcggctcggcatcgcaaagggctgggagtgacaggcatgaggtactggtgccagatcagaattgtaatgtatggtatggcatttcatttcctttccatatgattacacaattatcccagtatcatatgttaactctttccttactgcattggattgctgcgatgcctgaatagcaaatcagatgttggagtaaaggaaaggttactgcagagctctgtattgcagtgatctgtgtctggtccacattacg

SEQ ID NO: 498919 - DNA, 132 bp, Homo sapiens
tggggcgcttcgagctgagcggtatccctccggcccccaggagcgtgccccagatcgaggcgaccttcgacatcgatgccaactggattactgaacgtcacggccacggccaagagcaccggcaagcccaac

SEQ ID NO: 498920 - DNA, 622 bp, Homo sapiens
  misc_feature (160)..(160): n is a, c, g, or t
  misc_feature (283)..(283): n is a, c, g, or t
  misc_feature (286)..(286): n is a, c, g, or t
  misc_feature (289)..(289): n is a, c, g, or t
  misc_feature (297)..(297): n is a, c, g, or t
  misc_feature (317)..(317): n is a, c, g, or t
  misc_feature (346)..(346): n is a, c, g, or t
acgtggaaccgtcacgcaaacccaagaggcggagggccgctgacgtggaaccatcatcacccgaacccaagaggcggagggtcggtgatgtggaaccgtcacgcaaacccaagaggcggagggccgctgacgggggggggggggcccccccggcttgaancggtggaaccatcatcacccgaacccaagaggcggagggtcggtgacgtggaaccgtcacgcaaacccaagaggcggagggccgctgacgtggaaccatcattacccgaacccaagaggcggnggntgngctgagangaggcagtgcactcaagccngagcataagaataaaaccgagtagaacanaataaaaaattcaaaaaacaaaacaaaacccacactccaaaaactaacaaagaataaataaataatataaaaataaaaaaaaaaaaaagggggccaggggttcccaaagatccattttcctctttacacccggggtctccacagggcccagggcggcagagggggcagcagggaagcaaacgcttcccaccgggcttcggggggagacccggggataataacaaatcagcgcccagggaggggcgctaggggcctctcaggcacaacccggggggt

SEQ ID NO: 498921 - DNA, 723 bp, Homo sapiens
agaaggaaagatataatatgtaccaacaacatggttttgcctacctaagcttatttagccatctcaggttcaagaaatagacgctgaggagacacgattaactggagtctttctcagcttctctagttgttttatatgagagtcagccaagactaagaaagaggagaaaaactggcttttaacgaatattttgtgtaactgcaagaactactagggtttgatgtaccttgctcattaaactacgctaggaattccctatgtaaacgctgatgcgtttgccttaacgaaaaaaattttctctaacgatacagaaattgtaacctcatttttaccatagtcaccggcagtgaagggatatatcgggacctctatcagtagtctttgttcttttgagtattgttccctcagggtcctgtgaaaccaggtgcaattatggtattcgttgagtgtctatgttaaatagggtgcaaatttttagacggtcttgcataaaaaaacaaaaaacgttcttctatcggaaaaagccgttcctgcttacaaagccaagatcttgttttgtacgcagttgctctgggattcagattacgtgtttctaagaagcaggtccccctcttctaaaattattccatggcatacctttattattcttctcttctcagccacgttactcttagtagaagtttcttgctagcgcccgctttatcccgaaaacgtcatttcaca

SEQ ID NO: 498922 - DNA, 401 bp, Homo sapiens
cctggctctgaacttaggcacgcagggctagaggccaagtggtatatgagcggcctgtgggggttatgaatagcagagacagactggtgctgtcacagcccagtcataccacaccttcttggaatggctgcatcgccagaaacgcacacagatggttaggccttcacgtaccgttatgggctgcttaattagggaagaggatgggaaatcatgagatcatcccaggagagtgagtctctggacggatactcagagtgatgtcctgatgaagcagagtctcaaagtagccggctaagctgtgtagtactgtgttcacctccacaggatattcctaggtgcaagatcggttgttgtctatcataggatctctgttgggatggctgaaggtcctaagttcagaa

SEQ ID NO: 498923 - DNA, 591 bp, Homo sapiens
  misc_feature (252)..(252): n is a, c, g, or t
  misc_feature (255)..(255): n is a, c, g, or t
  misc_feature (258)..(258): n is a, c, g, or t
  misc_feature (266)..(266): n is a, c, g, or t
  misc_feature (286)..(286): n is a, c, g, or t
  misc_feature (315)..(315): n is a, c, g, or t
acgtggaaccgtcacgcaaacccaagaggcggagggccgctgacgtggaaccatcatcacccgaacccaagaggcggagggtcggtgatgtggaaccgtcacgcaaacccaagaggcggagggccgctgacgtggaaccatcatcacccgaacccaagaggcggagggtcggtgacgtggaaccgtcacgcaaacccaagaggcggagggccgctgacgtggaaccatcattacccgaacccaagaggcggnggntgngctgagangaggcagtgcactcaagccngagcataagaataaaaccgagtagaacanaataaaaaattcaaaaaacaaaacaaaacccacactccaaaaactaacaaagaataaataaataatataaaaataaaaaaaaaaaaaagggggccaggggttcccaaagatccattttcctctttacacccggggtctccacagggcccagggcggcagagggggcagcagggaagcaaacgcttcccaccgggcttcggggggagacccggggataataacaaatcagcgcccagggaggggcgctaggggcctctcaggcacaacccggggggt

SEQ ID NO: 498924 - DNA, 108 bp, Homo sapiens
tctttgctggaaactggatagacgcacctgtctgactacaacatcagaaagagtcacctgcacttgtgctcgtcttagaggtggatcagatcttcgattttgacgcgt

SEQ ID NO: 498925 - DNA, 1126 bp, Homo sapiens
aagctctgggccactcagcatcggtgcatggatgccttcttttgtcccttctgatggacgccaggctgctgattatcgcacgcaactctgcatgttcctggcatggactcgtgttccagaacactgaggatgtacgaaactccagcaagcccagcctggggccagagcggtccttttccacccttaggcaaagcagaaggccctatcacagcacctctggcagcaggccaggacgctggactggcactgctgacatacatacgcgcagcgcccttacacaaccacccatatacgacacggcaaaccggactatgctagatcaaatctacacggactatacccatgaagcacgccacgcatccgccacacaagtacgaaccaaccacaacgcactcaaactcaaacaactaccatctcatcttgggacatcccaagccccaggtccatcgtgctacccatgacgctctttcacgactccccgcgcatagggacgtcactcatttggccaaaccacactcccggcaccctcacatcggcatctcaagacagggccctgaagaacaactcgacctcgcacccactgctgcaaagacaccggtcagcaaccctctaagccagagccacccagcactccaggccatccccagacaccagctgtggtggccctggcacaccacacccacctaatcatacacccaaccgtcccatccacagaatgctcaccaggacgaccccctcaaagcaaatggtccacacacataccaccaccacggccggacaaggcccacgcacactaccccccactccacgggacacagatgggcgggcaactcactaacacctggcacaataccgccacaggacagaaaccaccctgaacaagggagccacagaactgactgcacaggggctgacaccaccgagggagaccccgcaaaagcaatgatacacaacgcgttgacacgacagcgctgcaactggggcgcaccaaacggctaccaacacagaacacaggagggaggcaccacaccacacaggcctgccaatccagcgagcgacacccgcaacgcgatcgtcagcacgcccctccccggccagcacaaccacaacacggtggctgcacact

SEQ ID NO: 498926 - DNA, 429 bp, Homo sapiens
  misc_feature (1)..(1): n is a, c, g, or t
ngccttcccctttaacccccggttcaatgagaacaacaggggagtccttgtttgccatacaaagctggattataactggggaagggaaaaaaaaccgtcggttttcccctttgaaagtggggaacccttcaaaatacaaggtctggttgaacctggccccttcaagggtgcagtgaatgatggtcccctgttgcaggaccatcctcgggtttaaaaactccatgaaatcagccaactgggaatttttgggggcataggcctcccccggggtttatataccctgatattatttgaaaggggccgatttaaaaaaaaaaaaagaattttaacccttcatgggtaaagggttcatgttccctgtgagtgaaaattttttccttcctccatatccctcttgtaagtcatttacttaattaatatttccgtgga

SEQ ID NO: 498927 - DNA, 484 bp, Homo sapiens
  misc_feature (79)..(79): n is a, c, g, or t
  misc_feature (273)..(273): n is a, c, g, or t
  misc_feature (380)..(380): n is a, c, g, or t
  misc_feature (393)..(393): n is a, c, g, or t
  misc_feature (403)..(403): n is a, c, g, or t
  misc_feature (454)..(454): n is a, c, g, or t
  misc_feature (468)..(468): n is a, c, g, or t
  misc_feature (479)..(479): n is a, c, g, or t
gagagtgggagtagacagaagatccctagacacctggagtatctctcacttgttatctttagtgctgcataggaatttnagaaatgagagaatcagtaaggcattgcatctgaggggacaagctctgggcagaacctcctggacacatactccttctttggcctccaaaccactatgcatagaaatatttcttcttacatttggggagtggggagaaaaaaagaacgtgaagaggacccacctaagatgaccctttgatcaaagccttgaggntccaagggtagtgcccccggacaaggagaaccccacatcaaaccaatactttgcccttgatgaggccagggttgactcccagaagaggactttgtgataagaatgtngaaaaagaggatnaaccccaggnccacttaagcattagctgtgctcatgttttgccacacagttaggttacaancttagtttacctgnatttccctagnggttt

SEQ ID NO: 498928 - DNA, 315 bp, Homo sapiens
taagatagatggccaagagttatggaaagcacagtgtaacgtgtctggaagttgaacagtacatcagagcctccaccacaccctgggagggaacacagtgtacagttgatgctactgagcctgtgttactgccccactagacaaaaacatggaggcttggcctgcagacctggacacagcttagccacaaaacacatccctctcgtcttaaaagtgtaggacgttctctaagggggttctccttcctgacctcattttcgcctctccaaaacccgatgtgataaggaagtagacattatgattctcatttgatag

SEQ ID NO: 498929 - DNA, 183 bp, Homo sapiens
gaaacctaattagggtttgaaacctaattacggggacatggtggccctgggcagagatagagggataatgtattcttatgtggtactcaatctttccatgaagtggcacttgtcattgactttatgaaattttacacttttttacgcatgcatgaaaaatatactatgaaatgtttcaaattg

SEQ ID NO: 498930 - DNA, 330 bp, Homo sapiens
ggaagatcctggtggtgatttgtgagtaccaacttaaaaaaacaacaacaaaaaaactttgcgggcgcagtggtgaacgcctgtagtcctagctacttggcaggctgaggcaggattgcttgggcccaggagtgggaggtcagccggggcaacacaggaaaaaaaaaaaattggccaagaggaaaaaatccttatgtaaggtgtccttatcgcaaaaagtaacataaatagagccagaggaaacttaaaaaaaattcagcattacctattaataaatgaaaggagaaatcaggcgaacctaacactttggtccggatcaccaccagaatg

SEQ ID NO: 498931 - DNA, 844 bp, Homo sapiens
gacagggggagctggaagtcaactacttccttaagatcatccaactatggatgattatccgaaatgtttcattgtgggagcaggacaatgtgggctccaagcagaatgcagcagatccgctatgtccctgcgcgggaaggctgtggtgctgatgggcaagaacaccatgatgcgcaaggccagccgaggacaccgtggaaaacaaacccagtctctggagaaactgctgtcctcatatccgggggaatgtgggctttgtgttcaccaatgggaggaacctcgactgagatcaggcacatgttgctggccaataaggtgccagctgttgcccgtgctggtgccattgtcccactgtgaagtcactgtggcagcccagaagactggtctcggggcccgagaagacctcctttttccaggctttagcgtatcaccactaagaaatctccaggggacacacattgaaatccgtgagtgatgtgcacgcctgatcaaggactgtgacgacaaccgttgggatgccagcgaagaccacgcggctgaacagtgctacaagatctcccggcttctcctttgggcgggtcatgccagcaggtgtgcgagcatggcaggcgatctacaaccctgaaggtgggttgatatcacagaggagaactctgcattctcgcttccgtggagggtgtcccgcaatgttgccaggagtctgtcctgcagattgggtatccaactgttgcatcagtagccccattctatcatcaagggtccaaccgagtcgggcgtgtcgtgggcagggttaaccttccattggtgaaacggcaggcctttgggggcccacccctgggggtgc

SEQ ID NO: 498932 - DNA, 505 bp, Homo sapiens
  misc_feature (44)..(44): n is a, c, g, or t
  misc_feature (131)..(131): n is a, c, g, or t
  misc_feature (142)..(142): n is a, c, g, or t
  misc_feature (181)..(181): n is a, c, g, or t
  misc_feature (240)..(240): n is a, c, g, or t
  misc_feature (244)..(244): n is a, c, g, or t
  misc_feature (251)..(251): n is a, c, g, or t
  misc_feature (255)..(255): n is a, c, g, or t
  misc_feature (259)..(259): n is a, c, g, or t
  misc_feature (270)..(270): n is a, c, g, or t
  misc_feature (283)..(283): n is a, c, g, or t
  misc_feature (307)..(307): n is a, c, g, or t
  misc_feature (326)..(326): n is a, c, g, or t
  misc_feature (344)..(344): n is a, c, g, or t
  misc_feature (389)..(389): n is a, c, g, or t
  misc_feature (398)..(399): n is a, c, g, or t
  misc_feature (408)..(408): n is a, c, g, or t
  misc_feature (414)..(420): n is a, c, g, or t
  misc_feature (422)..(422): n is a, c, g, or t
  misc_feature (424)..(424): n is a, c, g, or t
  misc_feature (432)..(432): n is a, c, g, or t
  misc_feature (442)..(442): n is a, c, g, or t
  misc_feature (444)..(444): n is a, c, g, or t
  misc_feature (505)..(505): n is a, c, g, or t
aaacaatataaagaggaaggcttctgacgccaaacatgcaagtnataacaaaggaacagagaaaaatattaataacaaaaagaaaatcattaaaaataaaaaaacaaagtacttcacatttcacagcagtnctttggcagtnctggcaagcatttctggtcaactgcttccaacagcaggnatatgaagaaacccccagatcttagcaaaagtgtaacaacattttctccctgacagctnacantccaagncagnccanaccataccgcnccactccacagtnttataaacctgatcttaagatgtnactaggtaatatgtgtgcncacaataaaaactaactnaaaacaaatcagagggtagcagacaagtaaacaaagtttccagtnaggcatcannagatcactnctggtnnnnnnntnantttaccancataaagaantnttgatttttatttctcagcaaactcaatattcagaagctttaccagcagactcagttaaan

SEQ ID NO: 498933 - DNA, 490 bp, Homo sapiens
  misc_feature (1)..(1): n is a, c, g, or t
  misc_feature (110)..(112): n is a, c, g, or t
  misc_feature (143)..(143): n is a, c, g, or t
  misc_feature (160)..(160): n is a, c, g, or t
ncgtaacctcaaactcctgggctcaagcaatcctctcatgtcagcctcctgagtagctaggaatgcaagtgtatgccaccacgcccagatagaatttgtagagatggggnnntgctatgttgcccaggctggtctcaaactcntggcctcaagtgatccntctgccttggcctcccaaagctgaaattataggtgtgaaccaccatgtccagccttacttttatcttataccaacatttgagtaaggcttactttgctggttttacagtctatgcatatgtatttatttacccatgcagtcaaggaaaaaaatatgcgtcatactaaggataggaattttatatgtcattttggataacaaaaagttccatttttacagaacaaaaatcatactgtgtgaccttctgtactattaagtattttgaaaggctttctgtgcttttgcaactattggcataaaccacatcctctttctagttgtgccaggtaa

SEQ ID NO: 498934 - DNA, 407 bp, Homo sapiens
ggtctttaaaaaattatccaaaggggtttaaaaaaatgtttattctgtttgtcagggacaaaaatatttatgaaacatggatgacttgtttaagttattaacattttttttagccttaggtaaagcatgaaagcccatgtttcagggcccctcccataaaaagggcccgggaagtgttagctattattgtctacttgaggtaccactttttaaaaggaaggtgaagtctttttctggaaatgcagatttgttgattttgcatttgaggattttttatattttgaagctgttaaaagcaaagtcatgatttttgggggaatgttttatcaatttttgaaaattgcctttgtttcaaaaaaagcttttcaaattgaactatattttgtttggtattaaaaacttcccag

SEQ ID NO: 498935 - DNA, 615 bp, Homo sapiens
cgggcagtttaaaagagaggcgagtcaaacagatgatcggaatactaaggacaaaggaaggatgaaggactgaacaggcaagcaaccagaggaaaatcataaggaaaatcacacagcataggaagaatccactaaagtttcttctttggattactggacagtatgattaagtaaatgaaatccgcaccaaatggaagaatcatgtgagtactgacctcaatactatagtaactgtcaggcgtgggtgtcgaagttgataggtttctcatggacagttattgtaaattagcctttactgtggtacaaattctttataactgacttagtcatttgccgcttagcagtttcatatcactgaaatgaacacacatctggtggggcacaccagtgactttagattatgacactcacttcaaatgaactctatttaaaatggggtcctattttggacaacaggaacatcacgaatgtcacagtccagacagccttgaggtaaaacagtgtgctttggcttagaagggatccagtatattaattacatcttttattatgatcgtttatttctaagaatcatttctggctttctcaaaacaaactactactactgcgtccttc

SEQ ID NO: 498936 - DNA, 455 bp, Homo sapiens
  misc_feature (455)..(455): n is a, c, g, or t
tcgcccaggctggagtgcagtggcaggatctcagctcactgcaagctctgcctcccgggttcatgccattttcctgcctcagcctccagagtagctgggactacaggcacctgccaccacgcccagctatatttttttatttttattagagaaggggtttcactgtgttagccaggatggtctcgatttcctgatctcgtgatccacccgcctcggcctcccaaagtgctgggattacaggtgtgagccacaacgcccggccgatttttatattattaatatcattgcacaaagctctcagttgcaattggctaatcaattttattcatattgaaaagggacccacaattccgccttaaactttgcacagtacagctcagtgttttctactcagacaattctcaaccataatgttataattataccattttctcagcggcatcacccacatactn

SEQ ID NO: 498937 - DNA, 558 bp, Homo sapiens
ggatcccggtggaggggttctggaaaggggaagtattggtgagagcgggagaccttgggggtggcttggtttctctggtacctgaagataaagaggaggtcatatgtcagagctgattttacactgattccctccttgccatttcagggagagaagagagggccaggtgacgggaagaatccaggcatgcagttggtgttgcctttctgcaaacacatctacgtggggtgccggggctcggcttgtggagaaaaccacaaaaagcaaggcaggcacgtgtgtggtccagacaggaaacggaccagcaggggaaggaagactggcggattttcccttcgcgctaacctgacaataacaccctcgtgtcagtctctgggttccattcacccagggagagagggtggcatgaattcatcaatgaattcttttcacagcttaccagggtttgcgtgacgcagagccgtgatcatcagagaagctgaggttcttatttcccaagagaaataagtcacaggcaggggaataaaacaggtacccaaggtcaaatcgtggagggat

SEQ ID NO: 498938 - DNA, 256 bp, Homo sapiens
accccttcccccacatgtggagatcagttatatctaagggataacaggtagtttccaacgctgctcggtgaacttttatattctaagtatagactgggatcaccatattgcatggtctcgtactcctcacctcagttaatacaactgctgtggcctcccaaagtgctgtcattacagtcttcatccattgtgcctgtcctttatattgttcttcttgctctgtcccccaggcttgattgcagtggtgccatctcag

SEQ ID NO: 498939 - DNA, 814 bp, Homo sapiens
agcggttgcacacggcggccggcatgcgtatctgaaagtgtaatgtctggttagcaggccatctatcctagatcgcggagatgatgtacgtccagcctactgatgtgtgtggctgatgctggcatgaaagctgttgctgaaaagtagtcgatagaacatatcttctggcataacacgaaacgtctactatgccttccgcgcgtgaacgtcgcctcgccggatgcgggcccaggtcctgctcctgagtgtcccaagcggatagtcacatgtcaggatgaggagaaggtctcctggagcctatcactctatgagatgagagcttatcgggttgtatcgccttgatgtgctgaggaagaagttgtgatacaatctgaaacagagggcgccaaagcgtaatgtctaatacagtgaagctaggatcggtgcacaaatgattcatatgcagtctaacaggtacagctgcgaaggcgcgtatcaatcagtgatgtcaagacagccaactattgcagtcatctatccgcagtcccgtcttggcgttgcgaacgggaagcgggtggacgagacagatcgtacagcaatgtctgcaacgaggatggtggaccaccggaacgatgctcttaagaataatctcctggtgaccacgactagtatgtggcgtcatgaaaataccactttgggtactgggacctgccatgagactggactctgtcaactgaccggcacttaccatgcatagtgactgaaaacctctttgcgagaagaaagaacaacgtacataacagaccattttccgccacgacacaaaaaatcatac

SEQ ID NO: 498940 - DNA, 273 bp, Homo sapiens
gagtcaatggcagcgtaggtattgctcgacctcaacgaccaccgatgcagagccggccgatatcaccagatcacgtattttgctgcgcttgccatccaccgctcccaccaggctccccctgtacgggatcaacacgaggtacgaagctactcgctattcgcttcccggcgatttttacgctgagacatccttcaacgggtaccggttcttcgccccggccgagcactatcgctcggccgatttcagcagagccgagcgcgacttggtcgacgc

SEQ ID NO: 498941 - DNA, 118 bp, Homo sapiens
cgttatcaattccatctcagaggtgctcagcgcggagcttcctgtattttccaaaggctttaaatagcttaaaaccgtttccatacaaaaagggctccacgacatttatccgcgcaga

SEQ ID NO: 498942 - DNA, 216 bp, Homo sapiens
  misc_feature (194)..(194): n is a, c, g, or t
cccactctttcctgcacggaaaaacaacactccagagaaaatacacaagactagaagcagactaaacagaaactcattaaccatcagagaaatgcaaatcaaaaccacaatgagataccatctcacaactgagtcagaatgactattaataaaaagtcaaggccgggcgctgtgactcatgcctttaatcccangcactttgaggaggccgtaggc

SEQ ID NO: 498943 - DNA, 369 bp, Homo sapiens
tagagaatcaaagcaaagtaggggaggctcgcgggggactgcttctggtggaggatgggtaccgccttgcagacacacaggaagcaagctcaggcacgagaggtcacgactcatcgttctctgctggggcacatagcgatgcagccggaaacaggtatgagctcacgttgagtggaggacgggtgcttgagagctagaactggccggccttatacaactccagggcatgggggagccactgtacattcttgagcaggcgatgacttcacccaaggacttctcaaaggttagtcctgcaacagaagacagcgtggattggactggaagagtgggagggcaggtggagaaggcattggtctgcaagtgggg

SEQ ID NO: 498944 - DNA, 379 bp, Homo sapiens
tcagcaggaggcagcacctattacatgacgtcggggataggaaggacccacactcaccttccctaggctatactgacgtctgtacataaggttataattgaggtatacccaccctaagtaacatctgattgaaggcatgtacttgcttgagatccactctcagaaacaggtttagagggcaaaagaaacagactactgtgagcttctaggagtaagaaaagggcccacagaagcaaggggaagctgggcctatagcagtccagcatgctatggggccaacagttgccttctaaacaggtaatgggttagcacagtcatccttatatcatgtccgtgagatgctgaattttctctcagctaagtacacagtttctatttt

SEQ ID NO: 498945 - DNA, 201 bp, Homo sapiens
tcatgcatgtagacaacactgatccaacactcatgcacgggcacaccgccatgcgcaaacacatgcccactcatgcatggtgccgcaaactcatcacacaatcctcacacactcatgcacaagcacacacatgcacgggccaacactgactcacccgtatgcacgggaacaaacccatgcacacacacatacgcacactca

SEQ ID NO: 498946 - DNA, 165 bp, Homo sapiens
gcaacacccaccacggaaaagagcagatgattaaccttaaacactacacgaaagtttcactaagctatactaaccccaggattgatcaatttcgtgccagccaccgcggtcacacgattaccccaagtcactcgaagccggcgtaaagagtgtttacgatcaccc

SEQ ID NO: 498947 - DNA, 761 bp, Homo sapiens
agtgctgtacgcctccggattacgggatgctagtgggactgagccctgatggtggagtgaggggagactgagggggtgctggcatccgtccacttgccagacccctgaccccccatgctgcagcaagccctctgcctgggacagcctgaggcaagcccctcctgggagtcgctccctgggctgaagactaaggaagggagaacccagaagcatggcgttcccagggtgcggggaagtgaaaccgggactgagggacgggaggttagccacttcctctacccaccccaaagcccctgagtagctgctccgggagctgtggtgccctctccttctccctttggctcctctcctgctgcacttaacagatgaccccagagacccggctaaggggcatggacttcacctcactggtccctactcttacctcaggtatggcgttgacggtggatgtggaccgggacagcagcccatgagggctatccgatatcacaggggtaaggggataaaccaacacgccgcaatcatgggaggactaaagggtggccgacgcgcgggccaaaagcacaagggaccgctagacactccgggggccttggaggacccataactccgtgggccactcaagcggaggaacacgcgcggacgggcattgcgtgcattgccagagggaccatagagcacaggatccagcagagacccctagccccctgagagctgcatggtggaccaggactcaggctacggtcatccagggcgacaca

SEQ ID NO: 498948 - DNA, 153 bp, Homo sapiens
ggcagaaaatccagccagcccacacagcaatactgcgcaagttagaaacaggttcctcaggccaggcacggtggctcacgcctgaaatcccagcactttgggaggccaaggggagtggatcatctgaggtcaggagttggagactaggtcgac

SEQ ID NO: 498949 - DNA, 288 bp, Homo sapiens
gccgacttggcatccaaacgcgctgggatttacacggcactgatgccatcgcacccggcccgagtgtacatggttcataacattattagccaagaacaccatgtcaatgctgatgcctaccacatcgaataaactcacagtaatcgtcacacatcagcccgtagatgtgtatttcccccgtgtgcatttcgcagatcatcgctgggattggacaacggtgccattaacggcatgtcaagggtatccagtagcgtagtacgtagttaggtggcttgcgattctggacac

SEQ ID NO: 498950 - DNA, 761 bp, Homo sapiens
ctcccgccaccctgcgcgcccgacagatgccgacgcttgccccgtcatgggtcgactgaatggagctggtgtcccgctgcggggagatgctccacatcctgatatcggctgctccgacaggcgctggccgagtgcctggggaccctcatcctcgttgatgtttggctgtggctccgtggcccagtgttgtgcgtcagcctggggcacccacggtgtgtttcctcatcatcgaacctggcctttggctttgctgtcactctgggcatcctcatcgctggaccaggtctctggggcccaccgtgaaccctgccgtgacctttggcatgtgcttcctggactcagtgagcccttgtgatcaaagctgcccatcgtacacctctggcacagacgctgggagccttctatgggtgcatggaaatagataatacgggctggtatcatgatgcaatctggcaacttcgctcagacagaaccagacatttacgatatacgaggccccaaatggtcacagccggggatcttagctacctacccctctggacacttggatatgatcaatggctcctttgaccagttacataggcacagactcccttatcgtgtgtgtgctggccattgttgacccctacaacaatcccagttagaacgaggcctgaaggccttcaaagtgggcaagagaaagaacctgtgtcataggcaactcctatggatatcaaatccggatatgccagacaaacctgacccgggaacttaggacccag

SEQ ID NO: 498951 - DNA, 127 bp, Homo sapiens
gacgttgtagcatgagagacgaccggctcctgctcaaagatctcagagaaggaggaggtgaccacgcgcgagggtgagtggcatcaacggcgcgtgtacgagatcggaggctggccgactgcccgga

SEQ ID NO: 498952 - DNA, 579 bp, Homo sapiens
  misc_feature (14)..(14): n is a, c, g, or t
  misc_feature (17)..(17): n is a, c, g, or t
  misc_feature (23)..(23): n is a, c, g, or t
  misc_feature (35)..(35): n is a, c, g, or t
  misc_feature (153)..(153): n is a, c, g, or t
  misc_feature (185)..(185): n is a, c, g, or t
  misc_feature (527)..(527): n is a, c, g, or t
  misc_feature (541)..(541): n is a, c, g, or t
aaagaaaccccagnagntccagncagaacatctgnactgctggccatattccttcttgtatagcatctgtttgagacaacaaaatcccgaggcagaaggtcaaccgctccttaggttcattctgatgggctcagctattcgcccgaggctggntccccgaggctggtgtgctcgcaagtcgtggnctggcagggttgccagggcttgtctgcaaaggaccaggggggatgggttttcagctttggggggcacacctggtctcatcacagctgctcaccacggcccttggtcatgacaggccagcacgtggggggcctgcaggctggtagatgctcactgaagatggaggttcctagatttgtcatgtggcacaaaatatttttttgcatttttttctgtcattaaaaatcatttaaaagccattctcagttcacagctgtacaaaagcagccagcaggtttctctgggcgccgtactttctaacctcaatgtgagtgaatttacttcgatcttaaaaggcttgtctntagcattcaggttnactttcttagaacatactatttaaagacatgtgggaag

SEQ ID NO: 498953 - DNA, 145 bp, Homo sapiens
gcggccgcctactactactactactgctcgaattcaagcttctaacgatgtacggggacatgaggaaagctgctgccaagaaagactgagcccctcccctgccctctccctgaaataaagaacagcttgacagaaaaaaaaaaaa

SEQ ID NO: 498954 - DNA, 189 bp, Homo sapiens
acttgttgtcagggggcccttctcctcgttgcgctagctccaagccctccaagtccttctggggctccccttcaccctctgccgtttccaggcaccccacactgtcctccatctactttttcatgtcagcacctgggcatggagggtggcgatctgcttctccagtgttgtgcatggactcctcctcct

SEQ ID NO: 498955 - DNA, 975 bp, Homo sapiens
  misc_feature (448)..(448): n is a, c, g, or t
tattccggcctaggagcatgcaaccatgtaggacccatcagcggataccgagactggcgcgccctactgagcctgctgaatgccgatttcgtaatgtagctcgcatactgcacgtgcacgaaccctactgtgggactcacgtactatcaaccgtatcagaagatagctacattttctcatacatttactttggagaaccgttccttacttcccgagattatggctcgtgcggatgtagcatgtaacaatcacatcgtatgttcgaaccagaattcacaacacgactctccatgtgatctcaacagagtctagcactacatcctcgtaccatgtgattatcccgtagaatgggtcagatcacaagcatcaggggcatgctgcggtctggaatccggtatgcatataatatgttgaaatcgcgtaagtcccgtggaaagagttcgtgaantcactctgccccctgttcttagccaagacacatcccatctacctcttcattaggctactaccatccgaggttcattatgagagcgaaacgctggggtttgaccttcgaagctgaatcgtcactaagttggtaggactgggcctgtccgggtagccccactgactgccgaaggcgacagggtcacgtgtataggagtccacttttggcatgcccttttaaaactcattgtggggctcggggtcatttgagttgagttccaacaggtaagtgcaccgaatcgttgggcgtcatccatcgtctttagactcgatgtgcacaatgtcgtagtcgtgacacgggtctaagaaacgtgctgtgtggatttatccatagttttgacaggaacatggacctcttatgggcctgcctttagccttcattgattttgtcaaatgccaattttaaactcaaccccaaagggtcgtaaatatacccgattacgtgccatttggataggacacggcctgcgttcgtaatcttagtcaaca

SEQ ID NO: 498956 - DNA, 186 bp, Homo sapiens
gaggagtgaggtctgcggtattttatggtgacacccatcctgcttatgaacgtgactctccttcccttccctgcacattgagctgcactgcttcatcagagaagtgccctccagttctcctgcctggtggtatgtgcacactgtgacggtgggtgtacgtaaatggtacctgagtataggggtctc

SEQ ID NO: 498957 - DNA, 504 bp, Homo sapiens
agtgcaccggatgctgcacagtcgatgtctagaggcatctctctattcacgggcagctgcggatcatggtgtagaacgtcagagctgtgggtggacaagaagggcacgtggcatgggtgaggaggtgtaggcaggcgccgccgaggacaagaaagagcgttccaggatgagaagggctttcgtgcacccaccaggggagaaaagcagtgagaactaccagatcgtcaagggcatcctggaaaggctgaacaagatgtgcggggttggggagcaaatgaggaagaagcagcaacggctgctgaagaacatggatgcccacaaggtcatgctggacctgctgcagatcccctatgacaagggtgatgccaagatgatggagatcctgcgctacacgcaccagttcctgcagaagttctgtgcagggaaccccggcaaccaggccctgttgcacaaaaaactgcacctcttcctcacgccagggctcctggaggcagagaccatgca

SEQ ID NO: 498958 - DNA, 276 bp, Homo sapiens
aggttattacgtagtcaggcatatgtgttggagatgagactagtagggtaggcccacgctgcttcgagggcggaagactagatggccataggcacaattggtaaagggatgggtgttgagggttatgagagtagctataatgaacagcgatagtaaataccttctaggcatagtagggaggatatgaggtgtgagcgatatactggtattcctagaagtgagatggtaaatgctagtataatatttattgtaaatgccaatcacctgaatgttcag

SEQ ID NO: 498959 - DNA, 167 bp, Homo sapiens
cggatcttatatttgcggctgcctttccttaggcaacgtatggtccccgctcccgggagtcaccatattgatgccgaacttagtgcgataccgatcgggatagcgcactacagccagaaatacctggactcaagcgatcctccagccttagcctcccaagtagctgg

SEQ ID NO: 498960 - DNA, 804 bp, Homo sapiens
  misc_feature (64)..(64): n is a, c, g, or t
  misc_feature (69)..(69): n is a, c, g, or t
  misc_feature (119)..(119): n is a, c, g, or t
  misc_feature (122)..(122): n is a, c, g, or t
  misc_feature (144)..(144): n is a, c, g, or t
  misc_feature (150)..(150): n is a, c, g, or t
  misc_feature (167)..(167): n is a, c, g, or t
  misc_feature (182)..(182): n is a, c, g, or t
  misc_feature (217)..(217): n is a, c, g, or t
  misc_feature (223)..(223): n is a, c, g, or t
  misc_feature (229)..(229): n is a, c, g, or t
  misc_feature (231)..(231): n is a, c, g, or t
  misc_feature (237)..(237): n is a, c, g, or t
  misc_feature (241)..(241): n is a, c, g, or t
  misc_feature (244)..(244): n is a, c, g, or t
  misc_feature (281)..(282): n is a, c, g, or t
  misc_feature (288)..(288): n is a, c, g, or t
  misc_feature (290)..(290): n is a, c, g, or t
  misc_feature (296)..(296): n is a, c, g, or t
  misc_feature (299)..(299): n is a, c, g, or t
  misc_feature (305)..(305): n is a, c, g, or t
  misc_feature (314)..(314): n is a, c, g, or t
  misc_feature (317)..(317): n is a, c, g, or t
  misc_feature (339)..(339): n is a, c, g, or t
  misc_feature (368)..(368): n is a, c, g, or t
  misc_feature (390)..(390): n is a, c, g, or t
  misc_feature (409)..(410): n is a, c, g, or t
  misc_feature (457)..(457): n is a, c, g, or t
  misc_feature (483)..(483): n is a, c, g, or t
  misc_feature (487)..(487): n is a, c, g, or t
  misc_feature (490)..(490): n is a, c, g, or t
  misc_feature (505)..(505): n is a, c, g, or t
  misc_feature (515)..(515): n is a, c, g, or t
  misc_feature (540)..(541): n is a, c, g, or t
  misc_feature (545)..(545): n is a, c, g, or t
  misc_feature (551)..(551): n is a, c, g, or t
  misc_feature (557)..(557): n is a, c, g, or t
  misc_feature (561)..(561): n is a, c, g, or t
  misc_feature (576)..(577): n is a, c, g, or t
  misc_feature (584)..(585): n is a, c, g, or t
  misc_feature (594)..(595): n is a, c, g, or t
  misc_feature (604)..(605): n is a, c, g, or t
  misc_feature (618)..(618): n is a, c, g, or t
  misc_feature (660)..(660): n is a, c, g, or t
  misc_feature (678)..(678): n is a, c, g, or t
  misc_feature (680)..(680): n is a, c, g, or t
  misc_feature (740)..(740): n is a, c, g, or t
  misc_feature (782)..(782): n is a, c, g, or t
catgcccctattcccaagaagagggcatgtgggtcgtaccagctgggcaggcagtgggtctgcntcccnggagagggacccgaaactgggagacttggagattttatcagggctgtggnggncctgcctttcttctcctccagngatagntgactcattatccagcnacacagaggtcagcnccgacctcaccagcagcaggctcacaggagtggcnggggcnttgggngngtgggnggcngcncagggtcagctctttcacgaaaacagagaaacggggnngctctngngtgggngtnggggcncagagaacnggnaggaaaggcggccggcgaggtntgatatcacaccagctcccactgtgggcncccaaacccaagcctcctgggnaagtctgggaactgttaannatccacacctcagcatcaccctgccaaggggtggggtggggtatgtncacatccccatcattccttgattganggcngcnggagagtggagttcntgccaaggcncttgagatcgaccatggatgccgcnnggcngaggcngagganggcncgcctatccagagannggcaggnnaggggtggnnatggggccnngggctctgtggcngtgatacagggacctgggcaggcacagtgtcagtcagaggtncagagacctgaaggtganangggcgggacccttgaggttcagggaaagagcctcttatactttttccattttgcagtganttggagatttgtccacaccagtgcacagagacgtgtcctccnttttatttcttttaacagccgc

SEQ ID NO: 498961 - DNA, 755 bp, Homo sapiens
  misc_feature (64)..(64): n is a, c, g, or t
  misc_feature (69)..(69): n is a, c, g, or t
  misc_feature (119)..(119): n is a, c, g, or t
  misc_feature (122)..(122): n is a, c, g, or t
  misc_feature (144)..(144): n is a, c, g, or t
  misc_feature (150)..(150): n is a, c, g, or t
  misc_feature (167)..(167): n is a, c, g, or t
  misc_feature (182)..(182): n is a, c, g, or t
  misc_feature (217)..(217): n is a, c, g, or t
  misc_feature (223)..(223): n is a, c, g, or t
  misc_feature (229)..(229): n is a, c, g, or t
  misc_feature (231)..(231): n is a, c, g, or t
  misc_feature (237)..(237): n is a, c, g, or t
  misc_feature (241)..(241): n is a, c, g, or t
  misc_feature (244)..(244): n is a, c, g, or t
  misc_feature (281)..(282): n is a, c, g, or t
  misc_feature (288)..(288): n is a, c, g, or t
  misc_feature (290)..(290): n is a, c, g, or t
  misc_feature (296)..(296): n is a, c, g, or t
  misc_feature (299)..(299): n is a, c, g, or t
  misc_feature (305)..(305): n is a, c, g, or t
  misc_feature (314)..(314): n is a, c, g, or t
  misc_feature (317)..(317): n is a, c, g, or t
  misc_feature (339)..(339): n is a, c, g, or t
  misc_feature (368)..(368): n is a, c, g, or t
  misc_feature (390)..(390): n is a, c, g, or t
  misc_feature (409)..(410): n is a, c, g, or t
  misc_feature (457)..(457): n is a, c, g, or t
  misc_feature (483)..(483): n is a, c, g, or t
  misc_feature (487)..(487): n is a, c, g, or t
  misc_feature (490)..(490): n is a, c, g, or t
  misc_feature (505)..(505): n is a, c, g, or t
  misc_feature (515)..(515): n is a, c, g, or t
  misc_feature (540)..(541): n is a, c, g, or t
  misc_feature (545)..(545): n is a, c, g, or t
  misc_feature (551)..(551): n is a, c, g, or t
  misc_feature (557)..(557): n is a, c, g, or t
  misc_feature (561)..(561): n is a, c, g, or t
  misc_feature (576)..(577): n is a, c, g, or t
  misc_feature (584)..(585): n is a, c, g, or t
  misc_feature (594)..(595): n is a, c, g, or t
  misc_feature (604)..(605): n is a, c, g, or t
  misc_feature (618)..(618): n is a, c, g, or t
  misc_feature (660)..(660): n is a, c, g, or t
  misc_feature (681)..(681): n is a, c, g, or t
  misc_feature (752)..(752): n is a, c, g, or t
catgcccctattcccaagaagagggcatgtgggtcgtaccagctgggcaggcagtgggtctgcntcccnggagagggacccgaaactgggagacttggagattttatcagggctgtggnggncctgcctttcttctcctccagngatagntgactcattatccagcnacacagaggtcagcnccgacctcaccagcagcaggctcacaggagtggcnggggcnttgggngngtgggnggcngcncagggtcagctctttcacgaaaacagagaaacggggnngctctngngtgggngtnggggcncagagaacnggnaggaaaggcggccggcgaggtntgatatcacaccagctcccactgtgggcncccaaacccaagcctcctgggnaagtctgggaactgttaannatccacacctcagcatcaccctgccaaggggtggggtggggtatgtncacatccccatcattccttgattganggcngcnggagagtggagttcntgccaaggcncttgagatcgaccatggatgccgcnnggcngaggcngagganggcncgcctatccagagannggcaggnnaggggtggnnatggggccnngggctctgtggcngtgatacagggacctgggcaggcacagtgtcagtcagaggtncagagacacccgggttcactnagcaggcgggttccggggaccttttggcttccaattgcgcaggttgaaaccttgccaccgggtttgagctncac

SEQ ID NO: 498962 - DNA, 245 bp, Homo sapiens
attgatatttcatgttcatcaagttctacctggtgtctttgggagaactgagttcctgatttcatgtgtgcagtgtgccctctcgtcttcctctctgcctagagcttttatgtcctgcttcctcccagagcttatggagttacctccctgcatccttctctaagagcgggggagtggtaccttcttagctggtcttccaccctcctggagttggtttttgggtatgagatagaaacaaaaaaaaa

SEQ ID NO: 498963 - DNA, 965 bp, Homo sapiens
ccctgtccgcatcgcagcagtcgcttgtgccagatcaaacaagaatgagggcttggacttgatcaaccgagagacggtccacgaacgggaggtgcagaccgcaatgcagatgatgcccactcctggagaggatacagtttcagccatgaagtgacatagctgacagtggaagtaaatcctgcctcccccaagcgtcatcgatttcattcctgtgtcaccaggcacctgtcagcccatccgtcgtggggaattgagggagagcagtgtgattacgaccatccgttgcaagagttttggtatagtagcaacggattgcctccaatgccctattccctagtccctatcggacccgatttaccgatcctggagaagctcaggagtccgccatcatattgctgttagatcgaagtgttcttgtgaccattgaatagacgatacatgtgaacatgggaaactgaattatctagccgaaagtagatttttccgagggcatcaacctaactatgctttacttcttgacgttgcatcagctgtcgagatcctggttgtgtgtgtatcttcgtgataacccattggatggagaagctagcacgtcatgtgcccggatcttcttgtaactcaccagtcgaaaagtcagcattaccaccgacttctcctgtgtcacctggccaagcggcttctccatttacttccacgtagatgaagcgttcgtctaagtgattcagctcatcctgagactttcttgttgctagggcgagacgagagaataagctagttggggcaaacactgaaactttgtcgaattcatttgaggcctatttcctatttgagccccttttcttttttgaaattcccttgaaatgatgtattctagagaacttcctatgtcagggttcctttggagttcccttggaattcacgtgtaagtactaatttcacggacggtttccccaataaggtgtgta

SEQ ID NO: 498964 - DNA, 579 bp, Homo sapiens
tggaaaaagtcatggaggccatggggttggcttgaaaccagcttgggggggtccgatcccttcctttttggtctaaatttatgtatacgggttctccgaatgtgtggtagggtggggggcatccatatagtccctccaggttatggagggtcttctactattaggactttccgcttcgaagcgaaggcttctcaaactcagtgaaaatttattaattattactgctgtcagaagaaattgaagtgagcctacagattgataggagtgttccatggtggtgtatgcactcggggatagccgagtaacgtcggggcatcccggataggccgagaaagtgttgtgggaagaacgttagcatttaccgccgatgaattatgatagtgaaacgggattctgggcgtaaggttgggccctagggtgtacgcctgagaataggggacactcacgtgcaagtgaagccccctatgatggcaaatacaggtcctatggaataggcaccctcggtggacgctgacgctcacaaggtattaccgagtcgtggtcgcaaacgacgtgtcctacatgctgagcttgcaccac

SEQ ID NO: 498965 - DNA, 140 bp, Homo sapiens
cggatgctccatccggtgggaggttctacattaaaacatgattactttggccataaaagaaaatattacccttaaaatatctattggatatgtacaaaccacatttttattcggacaggtcacagattcggagcaagtgc

SEQ ID NO: 498966 - DNA, 165 bp, Homo sapiens
ctgctatttgcaaggccaagttggtcagagcgcgagaagctgcggttgcacatcccggcactggaagtggcttgtgcgcctgatgtgcttctcggtactgtcggatcagctcatccgattgcgccgcaaattccgaataacagactcctccacgtacagttgatt

SEQ ID NO: 498967 - DNA, 234 bp, Homo sapiens
tccagtacccgagcatgcttgcctgcctgcgggtcgacgtgtattcagctactgcggtgcatgcctccctgggcgagtaccgtcgagacgtgagcgccgcgctgagcgtccaaatctctgtttcgctggagcctggtcgacgtgtattcaccactgcggtgcatgcctccctgtacaagttctgtcgacacgtgagcaccgtgctgacctccacgtatcgttgagctggagcct

SEQ ID NO: 498968 - DNA, 200 bp, Homo sapiens
cgtgggggtatctagaggatccggctcccacttggtgctgcaatgccatcagtcaatgagtggataaagaaattgtggtatatatacatgatggaatattactcagccatagaaaggaatgaattggtcctgacatattaaagtaaatatataggccaggcatggtggtgcacaccttatagttccagctactcaggagg

SEQ ID NO: 498969 - DNA, 125 bp, Homo sapiens
acctctctatatctacagaaatcctaaaatgtcagtctcacaatcttataggtaaattaccaaagtaaaaatgaagggaggaaaagacgatagagaagataatataaatatctttaagtaccatg

SEQ ID NO: 498970 - DNA, 177 bp, Homo sapiens
agtgcttataacgcactgctcagaactacgggctagttatgcttcaggaaggacataggacaaggtacgagacatatcctagcgcataggtagcagtagccgctactagtaggacgggcatgctgtggctatctagtgcacccgctgagggggatacctactacgagtacgacctag

SEQ ID NO: 498971 - DNA, 136 bp, Homo sapiens
gcttcaacggagattacaaggccagcaacacaaggtgacagagagtgagtgcaatatgtggccccatgtccatcatgtccagcaccttagttcttggggggaccatcagtctttctttttcccccaaaacccaagg

SEQ ID NO: 498972 - DNA, 162 bp, Homo sapiens
ttgatcccaacaacataagcacatgcatcgagggcacctggaaaacaaccagctctggagaaactgctgcctcatactcgggggaatgtgggctttgttgttcaccaaggaggacctcactgagatcaggtacatgttgctggccaataaggtggcagctgc

SEQ ID NO: 498973 - DNA, 561 bp, Homo sapiens
tcggatcctttggagaccaggctgagcgcagcgagctgttggagtgcagagcccaggccagagcctgctggagaggaggcagactgaggcagcaggcccgcagcaggcgaagcagggagatgtcagactggtacacggagctggagaagggagtcattgtcctgggtggaaaacttctacaaatatgtgtctaagtacagcctggtcaagaacaagatcagcaagagcagcttccgcgagatgctccagaaagagctgaaccacatgctgtcggacacagggaaccggaaggctgcggataagctcatccagaacctggatgccaatcatgatgggcgcatcagcttcgatgagtactggaccttgataggcggcatcaccggccccatcgccaaactcatccatgagcaggagcagcagagcagcagctagagacccctttggccacaccttccaggcactggcctgatgccctttactctcttctccctccagaccttcctctgacccttgctgaactggggtccctttgtgagtgtctcagtctaagaggtacctcct

SEQ ID NO: 498974 - DNA, 524 bp, Homo sapiens
atggggagtggtggggactgcggctcagacccacggattactgccacccagggactcgggtccagagatgccagatcttctaaaattccaacaggaagtgccagtgtacagatttatatctctacatgtcagcagtggattcacattttggaagaaatggcattaagttaacaaatacgcactgggtctatctagatctgttcatcaggcaggacagctgtggtgggattaataaccgattccaaaggcatcaggttctgatgtctggaacccatgagtctgtcaatttccatggtcaaagggactttacagacgagattaagttagagaccctgagacggagagtgcccttgatcacccaggtgcaccctgaatacaatcaccagtgtcttataagagagaagcgggccggacacagtggctcacgcctgtaatctcagcactgtgggaggccaaggcgggtggatcaccaggtcaggagttcaagaccagcctgaccaacatgatgaaacctcatctctact

SEQ ID NO: 498975 - DNA, 496 bp, Homo sapiens
tccccacgagatttttcaccagttccacctctctgactctaaagcatgctagcattttttccaagtgaaatcctgcatccggacgtagttctgttaacatcagacaacgtactcagaatttactcactacgtgagccgcagacacccactaacgtgataatactttcagaagccgacgagcaaagtctagtactcaataaaggaagcgcgtataccgcatctctagtagagacagcagttgcatttgactttgggccattggcagcagtcccaaagactctattcggacaaaacggcaaagacgaagtagtggcatacccactgtacatcttatacgaaacaggcgagactatcctgacatacatcagtctgctacacagccctgggaatactggaaagctgttgaatccattgccgatgcatcctgcggctgaagataactatggatatgatgcgagtgctagactctgcttaccctgcgtccccaacatcttag

SEQ ID NO: 498976 - DNA, 255 bp, Homo sapiens
ctggccccccttttttccttggctccgggggccttttccagtgccgggagggccacctagttttttttttcttcccctgccccttttaggggagggaggggtggggggggggccagctttttgggaccctggtcctggccctggcccttcccccccgttttgggtaaggccggagcttggaggggggggagggggagggggaagtgtctccctttttgtccctttttttgaaaaaaaagggaaagcctttctgga

SEQ ID NO: 498977 - DNA, 208 bp, Homo sapiens
actctagaggatcttcgtgacggtacccaacagatgataggatgtttcagtgtggtgtatgcattcggggtagtccgagtaaggtcgggggcattcctggataggccgagaaagggtggtgggaagaaaaatgattaaggatactagtataagagatcaggttcgtcctttagtggttgggtatggttatcaattggtttttgaggtt

SEQ ID NO: 498978 - DNA, 435 bp, Homo sapiens
ctgtcctggaagggaaatcatggtatgagatgcacagatcaggggactggaggttactaccccaaagcatgacccaccaggaaatcagaatcagccagtcccacagaatcaggaacaagatcattgcatgagaggcgacatcagacagtacccataagagacaagtccagtaccgaatctgaaccctgagttcgtttgattgtacatcccttcagggatgtgcgtgtgtgtgtgtgtgtgtgtgcgtgtgagtgcgtgcatgcatgtgtgtactatatggaaatatactttgtgtgactcatgtaaacactcaatagtaaatatagatcactttccctcatccatacaaaattagctcatcctgcctcagatgccagaagcattagggtttcactgcagggccaagtaattggggttgctgtaacaagagtgtat

SEQ ID NO: 498979 - DNA, 106 bp, Homo sapiens
ctagtgaggagagctggaagaacccaggaacccactctaggaaaacccattgccagctagactacacacttgagaattagtgataccctatactagtgaacaccta

SEQ ID NO: 498980 - DNA, 610 bp, Homo sapiens
gtacggaagtgttggtggcggcttctttcggcgctgcggtggtttgggttggggcctggctagttgggttgcgcgccggagttccggctccccatgtggtcgtggggcgccgcctcgttgtcgtacgtgctctcctttgcgtacgcctccgctgtcatttaatggttgctctttggctagttcctccgtcacgtgtgtgggtgagtagcaccgttgcgcgtgtgctgtatgctcgcgtgggtcgcctctttgtcgtaggtgtatgtgcttaccgtcgccgttatgtggtagtgcgccctctgattggcgcctgattttaaaagtgtctacgccccacgcgcggacttgctcattcaatctttttgttggtaccaccactagtcaccacccctgggtaatgacgtgacgtcgggtgagggcgcgcctactcgacgactcgcttatacagtggcgaggcgatacgtctttttttgcgacacccccgcatgggtgtcgcctcttactctcgacgtctgttgcccggagtgttctacgtacgtcccaagcccttggggtcctcgaaccttttattataccctatttccctgcccaacaacacatcccaaaaaac

SEQ ID NO: 498981 - DNA, 191 bp, Homo sapiens
gatactgtatgccttaacctaagactcacaacaaaataactaatactaacatctcagacgctacaagaaatagacaccgtctgaactatacgcgtggccgaccatacatcctagatacctacatcgccctacccatccctaacgcatccttatacataaacagacagaggtacaaagactccctaccctta

SEQ ID NO: 498982 - DNA, 396 bp, Homo sapiens
  misc_feature (30)..(30): n is a, c, g, or t
  misc_feature (157)..(157): n is a, c, g, or t
  misc_feature (196)..(196): n is a, c, g, or t
  misc_feature (199)..(199): n is a, c, g, or t
  misc_feature (202)..(202): n is a, c, g, or t
  misc_feature (206)..(207): n is a, c, g, or t
  misc_feature (212)..(213): n is a, c, g, or t
  misc_feature (216)..(216): n is a, c, g, or t
  misc_feature (218)..(218): n is a, c, g, or t
  misc_feature (250)..(250): n is a, c, g, or t
  misc_feature (258)..(258): n is a, c, g, or t
  misc_feature (262)..(262): n is a, c, g, or t
  misc_feature (268)..(268): n is a, c, g, or t
  misc_feature (275)..(275): n is a, c, g, or t
  misc_feature (277)..(277): n is a, c, g, or t
  misc_feature (308)..(309): n is a, c, g, or t
  misc_feature (327)..(327): n is a, c, g, or t
  misc_feature (352)..(353): n is a, c, g, or t
  misc_feature (370)..(370): n is a, c, g, or t
  misc_feature (374)..(374): n is a, c, g, or t
  misc_feature (392)..(392): n is a, c, g, or t
tctttcattttctgtcacccaccctgtccnaccacgttatgttggccatatcaatatgtggcgttagaacatatataaatctatatcatatatttatacacacaaacacattctaccagcactgtgaagacacagactaggctttactaggcttggngcctctcccatgccacttaaaaatgagcacaggtttgcnctntgnaagnntttcnncancnttggtctggccatcagtctgcaatttccccgngataaganaggntgacanaatgggncngcaactttgaagtgaggtcagtccaatttgnntatcatagaagaaaaganataggatgtgctaggttaagcctgnnatggtatctgggaaatntccncttttttgttgtgttctntaag

SEQ ID NO: 498983 - DNA, 167 bp, Homo sapiens
gaagtgttgagtttaagtcaaaggcctttccggcaaactggaaggagctagagctcgggctagagttactggagagtcaagtactaaatctggagaaaacattcgtggcttagaagcgactgtccgtcagaaactgaagtcaaagccatcacctgagtgatggacca

SEQ ID NO: 498984 - DNA, 805 bp, Homo sapiens
tacaaaacacatgtattttgcaaaaaaaaaaaattgaagaccatgagttgaacagtggtttccttaacccagtggcttatttagaattctttggccaaagaattgacaatgatgcaaaaatgggaacagttgggattttaattagaactgtttaggagtgatgatgtgtaaaacgtggacttctctttggcattggcacagagaaattatattccttacttcatggtcagtttatggtcctaaatctttttcactggaattttaaaaatctggttaaatggccattaggcaccaacttaaagagggttggtacaaactttttaaaagtatatcggtaatctggtatctggtggctggtctttggtaagtgattactgtgttatgaccattaggtggttacagttgccaaatttatttttaaatgggtcaaaaagaagagtgctatttaaacattctgtcttaaacaaaaactggtcataacttttctttttccttttcccattaggagaactttctagtgggtaacaatttcaaaatgtgcttgacacctggccttaaatagcacagacctatggtgcccattctttcacactcatttcagctggcagaaaagatttacttttaaaactgaaatcagggactcaatacaaagattatcctgagctctttctaacctcggggggcctattggacattcggtactcctatttttacgaacccgccctcttgtaaaccagaccaggtttcccggggccagacctatgaggaacttgtcccttgatgtcccaccgggcacctggcctta

SEQ ID NO: 498985 - DNA, 126 bp, Homo sapiens
ttccccccccaacagttgctttgggggggttaaattatttttattttgtagagagaatttatatttgtaggggttcggggcccagcccgggtccttatctctgtgtataaactgtacagaccgtga

SEQ ID NO: 498986 - DNA, 394 bp, Homo sapiens
ctgcacctatctgtcagaaacccactgcccacccagagcccctgactctgaatgatggcccagtgctttctgaagacagagatgggacctggtgctgagagacaatccattcctttcacaaagactgtaagccttacccaagcattaattttgatgcataggcgaccagatctcccccaaagcactgaataagaagaaaaggggcccagataacccagcagggcctggcagacaacttatagatccattgccataaaaggtcccaaggaatgtggagacattggtaggggacaggaagggtatggaagagacggattttttcctctaagtctataaaactataactctctgtcttatactctatctctcatagataaaactgtgaatttgtaaa

SEQ ID NO: 498987 - DNA, 138 bp, Homo sapiens
tgggtatctgccccgtggccctgacagcactccaactaggagcacatacctgagactggtggttggcctgggtctcctgcagcaatgggcacggagatgtcctgttacggttcatggagtagtgaggcctgttacaga

SEQ ID NO: 498988 - DNA, 225 bp, Homo sapiens
cactgatgagcggcacagatgatataggctttcgcgtggagacccccaatgccctagccccgtttttaggggacgaacacctacccctattatccccatactagttattatcgccatcatcagtctactccttccacttatagctctggccgcacgcataaccgttaacattagtggaggccacctactagtgcacctaattggacgcgccaccctaacaataac

SEQ ID NO: 498989 - DNA, 371 bp, Homo sapiens
  misc_feature (29)..(29): n is a, c, g, or t
  misc_feature (34)..(34): n is a, c, g, or t
gtagcccatgatattgtagcacaatgcantaccncatgcggtgattgccaagtgtaaatgctgccttacccagtcatataaatgtatagcacaaggggccaggtggggtggcttatgcctgtaatctcagcactttgggaagctgaggggggaagattgcttgagcacaggaatacaagtctagcctggttaatgtagggagggcacgtttctacaaaaactaaataaaattagcctggcatggtggcatgcacctgtagtcccagctactttggaggctgagacggaaggattgcttgagccctggaggttgagctgcagtgagccatgatcatgccactgcactccagtctgggcgacagagcaatccc

SEQ ID NO: 498990 - DNA, 464 bp, Homo sapiens
tcctaagactcctcggactggatggagtaggagatctgtgtgttagagcagtacacatctcatatgcaactttaaggaggcgcaagatgtcaggctcaatgttgatggattgaggaaggtgcggctgtagcgtcggaagggctctccctccggccctatgaggaacttctcaaagttccaggccacatctgagcggcgcacagggctccacatgatgagcttgggatcggtcatgagggaaaatgggtcatcataagggtaggggagcttgtccttcaggtaggctaagacaggatgctcgttctgcccattcacctcacatttttggacaagggtgaaggtgggctggtatccacccccaggacggacatacttgagactgttcaggatctcctcattctgacagttctcctgatgtccaaattggttgcaagggaagccaaggaccaccaggcgcctgggaa

SEQ ID NO: 498991 - DNA, 193 bp, Homo sapiens
gacaagtacttcgtcaactggtcggcgaggcgttcgaccggcgtctgcttctccaccagaccgagcagttgcagcaggccgcgaccgacatccagcaggccctgcaccgtgctcttgaccagggtcttgagggtggcgataaagccttcctggggcggtaccctggacagctcgtcgaggtattgctcggcta

SEQ ID NO: 498992 - DNA, 799 bp, Homo sapiens
agcggattgtcgtctctgaatacaggctgctacacatcatctttccacactcactataatacatgtgaatgctcaacgagtgaatcaatgtctctgacatgatgggttctgcctatcgagctgaacatgagtttccagatgaatcatagaacaggcactgaacataagtacctgactggaagtgtgcacgtgagtcagtgtggtgtaggcaatccaagggcgaccaggcttaggtttcacttatcacggggcacataacttccacgctatagtgcagttgtaggaactacaaatgggtggcgcatgattacacatatttctagtattctctctctaaattgtcctcgtgcaaggtttccgtgtgcttaagacaaatatacccatggagtttctagaatgactccaagggaaaggtagaagacttacagtcacaagaactatcttatcagtcggaccacatcgagataaccatctgtcgagaaatcttccatctctaatttcctacgacctttgattccatacatatgtgtatgcagagaggggggaattccttaatgagagatgggggtatgtggacatctccttacgactcagccagacatatatttgtgtcccgtgatccatgtgcacagagactttggcattctgggtgacggaagaaagaagagaatatacatggaaacccagggaatgagactgagcatggtaaatcagtatttgcttcagtggggatccagaacagcattctgaggaccggatactctcgacatggcatagaaaaggatctaacgtacccctc

SEQ ID NO: 498993 - DNA, 128 bp, Homo sapiens
atgtgtggcgaacgcgcgggctactcaaactcatgctagtaggtatcttgcttgcaatcgtcaaccagacgacaggcgttaataccgtgatgtattacgcgccgaaagtactggagtatgccggtatg

SEQ ID NO: 498994 - DNA, 540 bp, Homo sapiens
tattaggtacgtccaagtgcacttcccagtaacactataccagtgtccacaggactgtgtctcctctatataaatgcgtaggggttttagttaaatgtccttggaagtatactgtgaggagggtagacgggcggggagtgtacgcgcttcagggccctgtgttcaactaagcactctactcatcagttaacggctaaatccaccttcgacccttaagtttacataggggctattcgatagtttccgtggggatagaaaagtgtagcccatttcttgtgaccacctcagtgggctacacctttgacctaacgctctttacgagtgggatactgtgcgctatacttgggtacgcctacacatcagggcttggcgtgaacaaatggcggtatataggctgagcaacgacgcggggtcgcggttagcaccggggtcaactcagataacagcaacagggcccctcctagacgggatatggaacgcaccgcacacggacccctataagcactaacacacaacccttgtggcgccccgccacccttg

SEQ ID NO: 498995 - DNA, 414 bp, Homo sapiens
aggcagtggtggcaggctcgatgggtagagcaggggtgtccatgactcttctccctctagaactggggtctgaagcggtgtgtaccgtgggcatagtgaaggaaccaggacagggctgtggacagaaggtggtctcagtcatggtttcactctcagaaatatcctgaggctatggtttaaggcttcgtggagcatgaagtggaccttgtggttctttacaaggctgggccatagtaaagcattgcgaatcatggagtgaagaggatccttggagatgagctgtttcagttcactcctctgatccagcataggaatacataatggcccagagaggagacatgtgcagtgcctggtcagacgtgggacctgaacccagcccggtgtctgactccctgtcccccagtcccaccgctg

SEQ ID NO: 498996 - DNA, 153 bp, Homo sapiens
gaccgacacagagggacacggaaatcatgcagacagaagagaaacaggaaaaagagaagaagagaggaaccaagataagctaagtggctatacgtgtccaaacctcttggccatcgcctgtgtgactaggagacagtacccaacacgactacg

SEQ ID NO: 498997 - DNA, 273 bp, Homo sapiens
  misc_feature (264)..(265): n is a, c, g, or t
ggacaacctaattatagtgtagctggtgatcgtacggcatggcaccgagagtatcagaggcaaggaaaagatctaggaaaaagtaaagcagcgataaataagagataagctaatcacgtagacaagtattacagaccactagaacatacggatacgtataaggtaggacgtaggaagtagtaggaatagacataggacaaatagctacggtaaagtacaggacccattgcaccaagcctaccatagaatttactaggactaggnnaggaagat

SEQ ID NO: 498998 - DNA, 522 bp, Homo sapiens
ggatcagtttgacttggaggtcgactttgatatctcgaatgtggatcaggccaaaattcaggaactgcacgagcgcttggaacatgtcatgcttcgacggctgaagcgcgacgtggccaaagagcttcccaccaaaaccgagcagattcttcgcgtggaaatgtccgcgatgcagcagcgcatgtacaaggccatcctaactcgcaactattcccgtgctaagtggcacccattcgacgcagttctcgctgctcaacattgctatcgagttgaaaaaggcgtcgaaccatccgtacctcttcgatggtgtcgaaacgcccagggcgtcgcgtgaggaaacgctccatggcctgattatgcacggcggtaagatggtgctgctggacaaactgctggcgcgcctcagggcagacggacaccgtgtgctcatcttcagtcagatggtgcacatgcttgaccatcatttccgactacctatcgcttcgcggctatgtgcaccagcgtctggatggcaccgtgtcg

SEQ ID NO: 498999 - DNA, 934 bp, Homo sapiens
gtgccaactctcgcaactactgtatctatccgcacgctccgccgtcgctgtttctctgccggtcgcaatggaagaagagatcgccgcgctggtcatatgacaatgtgcatcctggcatatgtgcaaagcataggtttatagctaggcggcacgacgctccaccgaagccagtgatttcctatccatctgtcgagtgcgcccgcagaacaccagtggacgatcataggtgggcaatgtaggccagaaggacatcctacgctgggcgacagaggaccgagagcaatgcgtggacatacactgaccctgcaagtaccccatctgagcatggcatcgtacacctacttgggacgaccatggagcagatctggcaccacaacctatctacaaccgagactgcgcgtgtgccctggaggagcaaccagtgctgactgaccggaggcaccacctgaacacccaaggccaaacagagagaagatgactcaagattctgttagagaccttcaacagccctggacatgtacgtggacatcccaggccgtgctagtaccctactaatgcctctgggactgcaccaattggacatatgtacatggacctctcggagtaacgtggagctcaacacgacaacgggatgacccaatcataacggaatgagactacgaccgcatcaacccgcaaggcgcatccctgcacggatactgagaaacactggacatgtgaccggagaaaccttgaaccgtaactaagcgctcagtggccaagccctccctacaacgttgcaggcccgacgggcgtaacagtgcgctacaacccatcaagaggcgccggacagcaggggaacgaagccagctgactcccgaccctcaccagggtcgcacagccttgtgtcctcagcggttagcaccgcctggagacgattagccacacatcggag

SEQ ID NO: 499000 - DNA, 649 bp, Homo sapiens
gctgcctgaagccctttggaggcccccctgggactgagctcactacgcgtgtgagcctttccacagcactgagctagaggacgacgccatctattcagtgcacgtacctgctggcctttacctggatccggaaagcgggtgtcttgcctcagatgtgcccttcactccctcctcccctgatgctgtcactgctcccagtgagggaatgcctgtccacactgagcaagctttcccgccactggaagtgggagccgacagtgactatgagaacacgcaaagtgtgggacccactgctgtgggcttggacacgtggaagaggtttctagagctgggcaaagaggaagacttccgacccagagctgggaaaggccctggcatgggaggacctagatcctgggctatacccacgaaacagagagatgtcatcttgaaagaacatgagcaaggtcacaccaacgaaaatttcaggaaactgtttgcgggcaagccaggagttcaagagatgacaacttcgctgcctgctcaagagactcgatccccatttggcttgtgacctgagatgggctccctcttcccaaaggaggcagccctgcgaagccagtgctggaggtcatttggtgaggtgtcaaacgcaagatgcctaaccggt

SEQ ID NO: 499001 - DNA, 922 bp, Homo sapiens
ctcagtagcagacaggggatttcacccatgattcagccaggcatgtcccacgtattatttcttcacaatgacacatcatagtacttataacccagcaaatgacagtcttcacttctgcgcagtccagcaacacacaatattcagtcataacagctcatcattctctgcatatatatattacacaattcgcatcaccaagttcagcatcaccgttccagaattcacctcacagttcacacgtctattctgccacaaatgcctactctccactgaccctatatatatcgtacaagctctactgcagttttacttagcttgctacagcctactacgatctcgctgtagtaggtatctctactacctctgacgcctgttttcgggaccactggaggacaatacgactaccacgactttaccactttaacgagagtgttgtacacacacagcacttccaccttcgtccacttgtcagggcaccaccgcagtggacaactacacggttcattgttcacaggccgcagaatttacccaagcagagcgcccgatgtattcaccccacagtcacccacagtaccactatcacgaacaacgctgacgcgacacacgccccctcccaactccctgaacagccatacggcgaacaaatttccaggtacacagggggcacaacacaaatttttccccttaccgaccaagctccgttggggacttacacaacatcgggcggacaattccttaagctgggcaaaccgcacaacacacccatttgcgggtatcaagaccaattcctcatttcaccctcttaccacattgtggttagcaacagcgggcaaccttggggacttattacttcttgcccccaccacgccttgagacaggccattccacagaagacagacgaccaacgtgcacatctcatcag

SEQ ID NO: 499002 - DNA, 207 bp, Homo sapiens
gtatctagcaaggttcataatttttgctccatcaacatgcgtgatctcccagcatataccatccactgaggcaatgtcaggaaaaagccaaacaagaatacattatatgatgttaccaacaatatttgacccaagatggtattctacctaaaagatctgtaaagtgtggatgggattactgaaaacttccaaggaggatcaagacag

SEQ ID NO: 499003 - DNA, 391 bp, Homo sapiens
caaaggattttaaaggtcctgtggccaaatttaaagtgacctaagatcattctggacaacaagcattcccaagcctcgtaagtttgtcgcttcaaccaataatcctcccactatttgcctcaatagccggtggccctttaaccggttctaagaaacctcgccggggtccggggttttaagcttggcctctccttgcaaagtaattccaagtaaatccataatccagaaggtataggggtaagtcctggcaatataagcctgggtaataattttcatcctttcccttccggtcctatatctatggcgccaggtttcaatttcatcggcctatactttatttgggtaaatggtttggctaaggttgtctggtagtaaggtggagtggtttggg

SEQ ID NO: 499004 - DNA, 364 bp, Homo sapiens
ttcgatgtgggactcagagcaagactcgtctcagaaaaaaaaaaaggaatttgggcggggtgcggggggttcatgcttgtattgtcggcattttgaaaggccagggaggaagatcacttaaggtcaggagtcggaggttgaggaagaaaattcctttaaacttggaaggtgaagtttgtggtgagttgaaatcgcgccatggccttcaagctggggcaggcaggaaaggaattccggtctcaaccaccaacaacaacaaaaagacttgggcctcttgatgaattagggcccacttgtttcaaatccccacatatgggtgtggcgccagtctctaaagatgccgagcttcagtcccctctttctc

SEQ ID NO: 499005 - DNA, 128 bp, Homo sapiens
ctgacgctcaccaatcaactgtacttccccatctagttttggttgctctagttgcttccagacagctctgcctcttctcttaatctaatcagtatatagacttctactaatacttattgaacagaggt

SEQ ID NO: 499006 - DNA, 358 bp, Homo sapiens
gcagggaagagcaacaaagggcacaggtaatgtggttcgctagcctcgaggagtttggattaaaaaaagattacctgggccgggcaaggtggctcacacctataatcccagcactttgggaggccaaggcgggcagatcacgaggtcaggggatcgagaccatcctggctaacgtggtgaaacgccgtctctactaaaaaagtacaaaaattagccaggcatggtggcggacgcctgtagtcccagctactcgggaggctgaggcaggagaatggtgtgaacccaggaggcggagcttacagtgagctgagatcctgtcactgcactccagcctgggtgacaaagcgagactccgtct

SEQ ID NO: 499007 - DNA, 541 bp, Homo sapiens
accatcctgggttgccaggaatcccgtgcactgggatgcttggtcagccagtcatgagcagaaggatgcctgggtgcgggactatacatcttaccggtagtcctgggccgtgtgtggtgccgtgggcttttgtgccgtacgcggtgacgcataatgcgtgatctgctgtttgatggaccaagaggccgaatggcccgtagctgactgctggttgcatgatacttgtggtgcaagcttgattgccgagtggtcttgctccagatgacttatgatgagcatcacggtggccgcaataagtggtacgacatgttccaatagcacgatgttcagaagacgatcctaaaggacaagtcctggcgacggccaattgtacgaatacgcggagcactgcgtgtggcaatcgggtgtgtggggcggaactgagcccgaggtgggggggcctatccatctctatgtgttgtggattggcgccagtcgtcggtcggtctttcgcttccggtggtgttcccgtttggtccccgaggaattgtgagcccggggg

SEQ ID NO: 499008 - DNA, 249 bp, Homo sapiens
tcgcccaacaccatgcgatatcagcaccaaatgtaagaagtaaagaaagagaaaagaaacatgaaaagtggctcaacagtcaaagacaagtttattttggagaataaacctgagaggggcttctggacaattttttttttttttttgggtataggagtgcttgctcctatggactatgagttttaatgggtttaagggtgagagagttaatcacaggcttggaatgtgtcggtgtgggggataaatgtt

SEQ ID NO: 499009 - DNA, 663 bp, Homo sapiens
ggggacagttttttttcttcatcgagcgcggtagagacagcgcctacgcacgtgaaaccctcccggccactaaacgactctcttcctacttgcggaaaaataattaaacattggcgaaggagatcctcacacactaactggctaaatgtcttcccataccttttttgtcctaactaagcaggtgggagcatacaaaaaaacccccacatgcttctgtcaacttatcatagataaggaagaagcccttagaaaagtggatgaccatgtatgctatctacatacgacactcggaatacctagcaaaagctgccttggccagttatgatagaaatacgactccctatatacatcccaaaggggacacgttaaagaagtttaaggattccaatgcacccaacatgcctgcttcgacctttttgctcttatgatctgagtatagcccaaaaatttaaggagaacaccctgtcctggccataagataatgctgaaaaaagctcagagaaatgcccaatacacttctgcagatgacacgcatccttataaaagaaggttaacatctgattgataaaaccaagtggtattgctggtaaaccgcttaaggaacccctgggccgaaaaaaggcagtctccaggctcacaaaaaaagattggaatgtaaagcgg

SEQ ID NO: 499010 - DNA, 804 bp, Homo sapiens
cgtggtggctctcgcctgtaatcccagcactttgggaggctgaggcgggcagatcacaaggtcaagagttggagaccagcctaatcaacatggcgaaaccccgtctctactaaaaatacaaaaattagccgggtgtggtggcacgtgcctgtaatcccagctactcaagaggctgaggcaggagaatcgcttgaacccggtaggcagaggttgcagtgagctgagatcgcaccactgcactccagcctgggtgacagagggagactccatctcaaaaaacaaaagaaaagtggcaagtcacactgacagtatgtatggatgaaaattgtacttatatctctgtggtactttctctccgaaacgacattaccccaatataataacgagaaaacacatgagcacaaatctcaactgacattctacaaaacacctgagcagtaaccctcaaaactttcacgagcatcaaaaaacaaggaatgtctgagaactcatcacaatcaagaggtgcctaaaggagacaggactactcaatgtaatgtggtatcctggatgggatcctggaccagacacaacgcatatcagaggacacaatgacgaaatgccattcaaagtatagcctttagtacactaaagctatcaatatacagatgaaggaattcataacgaaaggttgacaatagtaatctacagcagtttagtaataaatggaagtggaaaaataagagaactacataaggggagaaaatcatgcgaattataaggataaaaaaaaaggtaataaagaagagcaaaaaggggtaaaaa

SEQ ID NO: 499011 - DNA, 116 bp, Homo sapiens
tactggcttatgcatggctagtctccatctaaaaaaaataaaaagaaacggaaatcaaattcctttaagttcaactagtttaaatttttactgtattgcagccatttgcactccgg

SEQ ID NO: 499012 - DNA, 695 bp, Homo sapiens
agatttattaatggtcggttggacagacagggttaacatagcataccaagatgaattaccatattgggctgatagcacatcattctacattataacccagtggcttctgctagcacattggaaaggcaagtagttccggatgctaggcatcatctcaaaagaggcaagctacttctttctttggtcctaagaaccgactcctctacttactgcgagactttgagctagtcaccgcgagacttgaggacaatatggtgggtgggggcgggggtagccttccacacatgatcaacgagaactgtctctctactagagcagatgcctaggaaaaaagcaatgtgacgctctttcgacgaacaggttacttgtccaagcccacgaaaggtgctctgggcgccaactcccggttcaactaagaggctcttctcgtttgcgaaataaccccaaaatctcgtagatttgggggctcttctcatgaaaccctacattatttagcaaactccgacggttgcgctcaaaagttttcaatgggcagggttggaagaatacgccaaactttacctttggcggtaacaaccagaggtttaaattcgaaaagttattataagcgaacttcccagtgaactgccccttaaacttatagagccttggatccaaaaataaaaagatttcttgtatggggggtctcaagtatc

SEQ ID NO: 499013 - DNA, 108 bp, Homo sapiens
ggcaccacccgctggagcctccaggtcagtgtccggggtcccccggtgtgctggtgctgatacctcatacccgtggagtctgacgaacctgaacaacaagctgtacat

SEQ ID NO: 499014 - DNA, 191 bp, Homo sapiens
cacgagggggaacgacgcggcacgaagtgataagtgtaaatggattgctattcacatgacccggataaccccacgaaatcacgcaaatcaaaaggttcgaaacttcgggttcactttaataacactcgtgaaagtgctcatgacaacaatggtatgcatatacgaacagtcacaaggtacctgaaagatgt

SEQ ID NO: 499015 - DNA, 548 bp, Homo sapiens
ggagagcgcctgcccaaggtggggcttgtattttgctgtctgagtgacccctgggatgcatgacgggcttctcaactgtgactagcgggcagcgccttctgctgagcgagtcatggaccgcatgcataactaactgtgcctgcagccttcactcttacgatgctgccccggtgggcccactgggccacgatgtggcttgacgcactgctgaccactcatggtctgttcaagccttgagggccaagctctttcaagaacctgaccctgcaatgcttcgcgggtgtgagcaccacctgtcacgtaaagcctgagcaccagatgctgatctataaagatgacgtgctgctttacaacatatactacatgaagagcacagagagctatcttattcctgaagtactcatctatgactcaaggacatataaatgtactgcgattgtgaacaacacagagaagaccactgcacatgaccagcttgtggcgtgaggaaagcccagagacactggtgtcacttgacaagaagaaggccttcggtgccacgtgagggt

SEQ ID NO: 499016 - DNA, 84 bp, Homo sapiens
tggaaagtgttctttggtttaactctaaacgcccatgatagtagtttcaaatgggaaatagcgaaataaaataactcagtctgc

SEQ ID NO: 499017 - DNA, 1724 bp, Homo sapiens
  misc_feature (269)..(269): n is a, c, g, or t
  misc_feature (375)..(375): n is a, c, g, or t
  misc_feature (417)..(417): n is a, c, g, or t
  misc_feature (447)..(447): n is a, c, g, or t
  misc_feature (469)..(469): n is a, c, g, or t
  misc_feature (476)..(476): n is a, c, g, or t
  misc_feature (488)..(488): n is a, c, g, or t
  misc_feature (510)..(510): n is a, c, g, or t
  misc_feature (745)..(745): n is a, c, g, or t
gtgctaagtgggccgggcatggtgtagacactggtactgggctgctgggctgacatgcctccatcgtacgtacgtaggtagtaaacatgcgtcatgcagctggcctctgcaaggtcgagcgtcaatcacctgtgtgggcgaagtggacgcaggttcctggtagtcgcggcgaggctgcctgttactcagccatatcactttcgcatgagagtaatcacgcacatctatgcgggtcattcgacgtagcatcccaagctgtcgagacgccntatcatgcaaagagtgtactggtggaccagttcgcgtccagaagcaccttgataatggccaaccactgcgtgcggtgtcgtgcgagtgtcgagtcagcgatagatnattcgcatgggcagaattcgtcagttaccagagttagtgacncagacagagaggacgcctctcactcagtgncactctgtgtcgtctccagagncaactcnatgtgacaagcnagtcaaagacataccatacagncatcaacgcgcggagaatgcctgcaaagcataacctctgggtgttgagcatcgcgctgtgcatcctgagtctggtgagccatccatggtgcttcccagcttttcccccagtgcggacgcaaaggctgtccaaatttgaccttgaacgccatagcggagataacgtcatggacagagtctcggagcccactggtctcccactcggtttccacacacgggtaatcactgcttatccntatacactggcgccactgcgaaggttatagatcgccgttctatccaactctatgtgcctggtcgagaagaagggctcaagatatggaacgtacataaggccaacattcacgaagctcgcctcggggcaaaacattcgcgacccaacgacctgggaacttgtcctgaaatgcttccaaagggaaacaacttggaatagagtcctaggccctgtcggaaccacagcaggaactaggtggctcgagaataagccctttgagtactgttggaattagtactaggtcatctctgcggattggggtccgggaactggttcgcacttggcaaaggagacatgtggttcagcacctatatggtcacttaagtagacgtttaaaccgtttggcaaccacacccttatgggaatccttggcaacgggttagagtctcaagggggtgcagctggggagttctccgcgcgaaacaaatctggtcctaagagaacaaagagtcgcggtcttggaggcacaattccccggagccttcgggtagtggccgtacaaatgaatgtgacgaaagggcacacgcccataccatgtgcggagactaggaagaaagccccatccatgtggaacgcctttcaaaggcagcagtctttcgggagcaaagacacacggggcaagaggtacccgaccctgaaaagggcgcgcgaccgccacggcggatacgaaggacaacgccatgtgaacagaatcgagctacccgaggaggagaacagcaacacataggcaacccgagcattagatacactgagaagacagcaacgaccaccggagacaaacaggatctcgaaaacaagacccagcagaacacagtgagccagaacacaaggacgggacccaacagaaaaacgacacacgcaccgacagcgaggacaacacgtgcaaactactgtacaacgaccagcccttacgcacaaaacgcagccagcgacttcacacc

SEQ ID NO: 499018 - DNA, 740 bp, Homo sapiens
caccacgagcgattgtggccataccaggatgtctgagtgtggccctctcctctgaccaccggcagaatttctctggatctcgagatttaccctccagctatgggatacgctgggtgtgtgccaataccctgtcccggatgagagcccctccgagtgggttcttgtgtccgcttttcgccccaccgccgccaccctatcgatcggtctcctgtggctggggcaagctggtcaaaggtatggaacctggctaaactgccagctggagacccaccacccttggccaccacccggctaatctgacaccggtgagctgtctctccacgatggagtccctctgtgcttctggaggccaggagtggcccggccctgttaatgggagtctccacgaaggcacaacaccctttacacgctatgatggtggggacaatcactccacgccctgtgcttcagccctataccgctactggctgtgtgctgccaccacggccccacgcaatccagagtctgggagtttatgagggaaagatcacttgtagatgaactgaagccagaagttaatcacgtaaccacagcagccaaggcagaaccccccccgtgcacctccctggcctggtttgctgatggcccagactttgtttgctgggtacacggacaacctggtgcgagtgtggcaggtgacccttggcacacgctagaagtttatggcagagcttttaccaaattaccaaaaaaactggcca

SEQ ID NO: 499019 - DNA, 552 bp, Homo sapiens
agcgatctcaaaatagaactacagaaagccaaacaaacggatccatatcaggaagacaatctgaagagcagagatctccaaaaactaagcatttcaagtgataatatgcagcatgcatactgggaactgaagagagaaatgtctaatttacatctggtgactcaagtacaagctgaactactaagaaaactgaaaacctcaactgcaatcaagaaaggcaagtcactgtttaccggaaaccactgattccagccaaactgcctgaagagcaactagctgtcatatcttatcaaaatctcatcaaatgagagattgataagccaaagtatatatagtacattcgcagcctacccattctctgctttggcttcagtctcatactggtcaacttcacacataaaggtgttgctgatgtgttttttcttcagtactgtattcttttccccttgtggcttttctcagccaagtgttgcttatgtgtataagactgaggtgttaagtttgctctagttgaccttttaccacagctacttcatatatttgaaaaaaaaa

SEQ ID NO: 499020 - DNA, 134 bp, Homo sapiens
  misc_feature (28)..(28): n is a, c, g, or t
  misc_feature (67)..(67): n is a, c, g, or t
ttgaaatacgtcttttaaaggtgctggngatcgaaactgtggctttggttccgctggcggtcgtgtngccacgggtgccatcaccaatgcccgcgtcgatgggttgcgctggttgtggtccttcctgctgtgct

SEQ ID NO: 499021 - DNA, 1240 bp, Homo sapiens
  misc_feature (20)..(20): n is a, c, g, or t
  misc_feature (37)..(37): n is a, c, g, or t
  misc_feature (41)..(41): n is a, c, g, or t
  misc_feature (48)..(48): n is a, c, g, or t
  misc_feature (54)..(54): n is a, c, g, or t
  misc_feature (58)..(58): n is a, c, g, or t
  misc_feature (1240)..(1240): n is a, c, g, or t
tcgtgttccttgtctaaaanagaatgatgagtataantttnagtaaanaaattnattncagtgataatatgcagcatgcatactgggaactgaagagagaaatgtctaatttacatctggtgactcaagtacaagctgaactactaagaaaactgaaaacctcaactgcaatcaagaaagcctgtgcccctgtaggatgcagtgaagaccttggaagagacagcacaaaactgcacttgatgaattttactgcaacatacacaagacatccccctctcttaccaaatggcaaagctctttgtcataccacatcttcccctttaccaggagatgtaaaggttttatcagagaaagcaatcctccaatcatggacagacaatgagagatccattcctaatgatggtacatgctttcaggaacacagttcttatggcagaaattctctggaagacaattcctgggtatttccaagtcctcctaaatcaagtgagacagcatttggggaaactaaaactaacaactttgcctttacccaaccttccaccactgcattacttggatcaacataatcagaactgcctttatacagaattaattcggacagagattcacgatcttcaccatgaggacacttatctctttcagtggtcctcccaagacattcatcttaacaaactgacacggaccgcatttgattacaatcttgcacgaggtcttcagttatctatatttggaacaccactgtaacaatagtacaaaaaccaacatagtaggttcctagtactgacaggagccccctctagctcatactctaacactctgaactctgctactcatactacttactacgtacccttaaagcgctccaccaaacatcgccctcccttattcactggtccaatgttgccctcctcaacccaactgcacttggccattgcacaaccttgctctacaaccgtcacacgccaccactcgcccacacgcgtcacggacacacgctccatcaaaatgcgaagcgggccacactgcgaggagagacacataaacagcgcacacaggaaaacacttgaactctgcgcacagcgacaccgacgtcacgaaaagcacggcgaacaatagctacgagcggccgaggccgagcaatgagacacagcatacgaacgagctgctagtaactctgacagacaaagccgcacaaggaagaccagtacgcgcagtcttctcgtgctccatctgtgtn

SEQ ID NO: 499022 - DNA, 1162 bp, Homo sapiens
  misc_feature (317)..(317): n is a, c, g, or t
  misc_feature (355)..(355): n is a, c, g, or t
  misc_feature (481)..(481): n is a, c, g, or t
agcggggaggaggagtaggtgcgggtgaagattgcggacagccgagggcgagatctgcatcatggaggtgtcctggtggccaggcggaaagcagtgagcaatcccatacgctgaggagacagtgacatctcagacagatttacttactttgcacctcctcatcgccacacttggcgtccatcctacgaggcatgcattgcttgcacatggcatccgatggctgcgctacccttccaacttacactgcaagcgtccattgctttcaatagactcaggccacaccatcgtatcacaggtactaacgggtgcgtcgcgtnggcacggctcagtgcatacgggtggcaaacttctggcnatcgccttcgtgactaatcgtctcgtcggtgcaccaaaagagcgcgtgaggcgcgctgactagaggggtctagtccgggtggatcacgcagctgcttcccagtttcatcctcagtgagttgatgcnggctgcaatgcatcggatcataggagcccaagcaacagttagtacgcaacagtgagtggaaccagtcaatctacggcggaccgggtgcgaggacggtcgtgagctcaccgaccgttgtgggaaagggtgggacagtctagtcattctacgacgagttcggatggtgcttacgtgtctctcttcatacgaggtccgattgctccatgactctgtgtctcgtatgtccctgggtatcccgtggactgagcggcaccgaatggcactcagtcttctccagaaacgcggccactgctgtagtgtgaccggtcatctgatgacccggccagtctacgaagactacatagtatccactggttgggagaacgtgtagtggtttcgaatatgtctggctgtcaaagcatgttgggccatgtaaagggatgccactgaggtggattgtacggatggacccccaaaagaagttgggtcaccccaagtcctgggctcgattaggcggagggtgggaacgttctagtactcgtcaagggtggagagaccgtgactctttcaacctccccggtgctgtcgtgcaatgtgaatgcgagaaatggactactttgaacgacccttggtgggctatatccaacatcgaggttcaaaagcctgcccaagagggaggcgcctctcagcagccctgatccc

SEQ ID NO: 499023 - DNA, 101 bp, Homo sapiens
  misc_feature (73)..(73): n is a, c, g, or t
gaaaagtagctggtcctcttaaggctttggcacttttatagtatttgaaattggtggtttgtttgtttatttntttatcttatacattttctcgctctgtt

SEQ ID NO: 499024 - DNA, 1277 bp, Homo sapiens
  misc_feature (1277)..(1277): n is a, c, g, or t
agcgatctcaaaatagaactacagaaagccaaacaaacggatccatatcaggaagacaatctgaagagcagagatctccaaaaactaagcatttcaagtgataatatgcagcatgcatactgggaactgaagagagaaatgtctaatttacatctggtgactcaagtacaagctgaactactaagaaaactgaaaacctcaactgcaatcaagaaagcctgtgcccctgtaggatgcagtgaagaccttggaagagacagcacaaaactgcacttgatgaattttactgcaacatacacaagacatccccctctcttaccaaatggcaaagctctttgtcataccacatcttcccctttaccaggagatgtaaaggttttatcagagaaagcaatcctccaatcatggacagacaatgagagatccattcctaatgatggtacatgctttcaggaacacagttcttatggcagaaattctctggaagacaattcctgggtatttccaagtcctcctaaatcaagtgagacagcatttggggaaactaaaactaacaactttgcctttacccaaccttccaccactgcattacttggatcaacataatcagaactgcctttatacagaattaattcggacagagattcacgatcttcaccatgaggacacttatctctttcagtggtcctcccaagacattcatcttaacaaactgacacggaccgcatttgattacaatcttgcacgaggtcttcagttatctatatttggaacaccactgtaacaatagtacaaaaaccaacatagtaggttcctagtactgacaggagccccctctagctcatactctaacactctgaactctgctactcatactacttactacgtacccttaaagcgctccaccaaacatcgccctcccttattcactggtccaatgttgccctcctcaacccaactgcacttggccattgcacaaccttgctctacaaccgtcacacgccaccactcgcccacacgcgtcacggacacacgctccatcaaaatgcgaagcgggccacactgcgaggagagacacataaacagcgcacacaggaaaacacttgaactctgcgcacagcgacaccgacgtcacgaaaagcacggcgaacaatagctacgagcggccgaggccgagcaatgagacacagcatacgaacgagctgctagtaactctgacagacaaagccgcacaaggaagaccagtacgcgcagtcttctcgtgctccatctgtgtn

SEQ ID NO: 499025 - DNA, 852 bp, Homo sapiens
  misc_feature (135)..(135): n is a, c, g, or t
  misc_feature (338)..(338): n is a, c, g, or t
agcggaggaggtgaggctccggcgcacacccaaagcgggctgcgcccgctccttccagggccccggagcatggctgcctccaccgggatgacgctaggccagtcctggtgcgtataccagagtgcggacctcggngcgcgcagggggaccgagcatgggtcgcccccgatcgggtttggcatttcgtgaatgacatctggtgcgtgtagcttctcatggatgtggattctatttcgttgaggactcaagacattggaacgaagaatgtcggatcctcgagtgcatgcagctgtcataagccttctttcgcaggcgtgccctatgccgtcctctcgggnatggcttggccggacgatcgtccttccatgggtgccaagcgacatagcgctgttcgcaggtcttcctctctagtcccttacactcgttggtggttgccacggtgttgtgcgcctgtcttgtgcgccacctcgtagggctctgttccgaccgtccttgtctacgatcctcttgtgacctgtctggtctgcaagctcagtaggctagtcatgatacccgcaaagtgaggctcaacggagttctctgcaagtcaagaagctgtgtcaacgaggagtgaaggctagcgcctccgactaatgttcccgaggagcattacccgtcttgaccgaaatgtgctcaattgcgccatttgtcctggcatgtgccaactcctcctgtgcccatgagctggtgagtcagccatcatccacatgtggacatggcagcctggacttccacgtacgctcctgcaggtagatgtcgccagttccaaccgtgctgcttcacgcaatgtggccccctagtgcagaggggcat

SEQ ID NO: 499026 - DNA, 699 bp, Homo sapiens
cgcagtggctcacgcctgtaatcccaacactttgggaggccgaggtgggtggatcacctgaggtcaggagctcgagaccagcctggccaacatggtgaagccccatctctatcaaaaatacaaaaatttagctgggcgtggtggtgggcacctgtaatcccaggtatttgggaggctgaggcaggagaatcccttgaacccaggaggcaaaggttgcagttagctgagatcgcaccactgcactccagcctgggcaacaagagcgaaactccgtctcaaaaaaaaaaaaaccctattgtaaaccattggaccttggggtggtaacagatgtctgaattgtaggctccatcaatttttaacaaatgtgttaccactttccgggggggatataatatactctggataataattataccttgagaaaatcctttcatttccggataattctaacaaattcaccaattctgaacttacttttcaaatacaagggccttagggtccatcagagatcctcttttaagcgaactatctaagtgcccaaatggattcacttacacagtgaactttcaaaagtacttaaagggtcaagtccacaaatctggatgctctagagaaacgttataacgcagttcacacgggggaccattactaggacagaacacaaggtaccgggaaatgccattaaggtaccaagagaac

SEQ ID NO: 499027 - DNA, 208 bp, Homo sapiens
  misc_feature (11)..(11): n is a, c, g, or t
  misc_feature (70)..(70): n is a, c, g, or t
  misc_feature (109)..(109): n is a, c, g, or t
  misc_feature (198)..(198): n is a, c, g, or t
  misc_feature (208)..(208): n is a, c, g, or t
ggaggggaggnggaacggagggagggatggaaaggaagggagggagggagggagagggagggcgggaatnagggaaaggtgggaaggaagggaggcagggaaaggaagngagggagggagggagggaggctggctatgacctaatattgacacagtaacacaagaggacagattttgagagataggacaaaaggacanaaataagcan

SEQ ID NO: 499028 - DNA, 134 bp, Homo sapiens
aggatacctcagataaagcatctctaatctcctcccgtactgctttgacccagttcattcaaaagcatggagcatagttttcagtatgtccctgcagttcgcatcagtttccaacccgttcgcccaccagttcg

SEQ ID NO: 499029 - DNA, 145 bp, Homo sapiens
agaggggtcccccaagataccatttaggaacaagggcaagcttgaggaaaaaagccagtaaagacatgagctccatcagctgatgacccacggtatacatgtgcccacattgctagggtaccgaggagctgagggtcaacaggcg

SEQ ID NO: 499030 - DNA, 106 bp, Homo sapiens
tgatctagaggatctcgtataagagatcgggttcgtcctttagtgttgtgtatggttatcatctgttttgaggttagtttgattagtcattgttagcgcgtgctgt

SEQ ID NO: 499031 - DNA, 603 bp, Homo sapiens
agcgtgtagtcatttcctgtgcagccctaagcccaggccctaagcaagcactaatctagttcccatctctatagatctgcctattctgaatattttatataagatgaagattacacgatcattgtggtctttgtgtgactggacttctttgcaacgcgaccgacaattgctttagaggctcatccattttgcgtatccttgtgtcacgtggttctcattcataagtaatgtgcttgaataaatagcctccattgtcatgggcgtcagaccagcagcattaatacgaagcattgtgagatattggatcccagtgatacacgacggattagcgtcttgcttctggcttggcgcttgtgctgggtgtgcacgaggagaatttggagttgtgcacgtaagtgattaggcgcgcaagggaccataagcgtcgtgtccaaaagcgttccccgttggcggggcattccaaggaagtgaaaggtctccgttccgcgttgacgctattgcaagagcaccattacgcgcaaagaggagttactatagaggggacggaagccgtaacaaaggggatggagagatttggccccatactttgggaagtcccctata

SEQ ID NO: 499032 - DNA, 343 bp, Homo sapiens
ggaaatatgctataaagtcctatgtacagtgctatattctcatatgtgtaggaaaaatgggtcagagaatttggctcgcctcgatttaatttactttatatttcagtgatagatgagtctttcacacttactttcctgaggtgatatattaacacttaccctagactctgtaagtttgaggaactcttatgaccagctacatacactataatttcttggctaacccaaatctttggccaaaccacaactcttagatttcatagtcagtggtgcacaaaccttcgctagatgatgtattcatgaagtctagtcaccaagaatgtgctctttggtctctgggcct

SEQ ID NO: 499033 - DNA, 892 bp, Homo sapiens
gaacaagaggaacaacaatggctatggatcaggctggtgtaagtggacgaggccagaacgtacagatagcaggagggcttgccgagggcttcgtgcgcgccctggccgaactgcacatgccagaacacgctgcccagtcgtcacgtggcggcgcagccggtcaatggggcaggcatggtggctcccgtggtaggcctcggtggcaggaggcagcggcagcggtggcttcagcgccagtcctgcactagctgagccgccgggtctacgcaaaccctctagcaacttcaacaccaggcgcgctgagcagctggctggcggtgcgccctccatactggcagcggccgtgccatggccttttcccgctggcaaccctagtcatgcagctagcagccgtcgcaggcagctgggcccagcagatgcccgtgcagcacccgcgcgtgatgctggccctgaaaggaggagcctcagtacagtgcccagagtatgccgccggtcgaagactagcgcgcacccatgtccctcgcgatcagacgaatgtggagtccccacagagcggatctaaggcggagaggaagcggcatgatggaaccagcatcgcgttgctccatggttgtccgtatgcaggaagctggaggagaatcgccctggcttggtaggagagaagagtggagaaaccccttttgaaagcctcgaggaaaccgctcggaagccgtggccggttcccaccaggacgccgaaattaaattggcctccacagggggggaaaacccaggggtttggggcccccaagggcgtttaaataacggaggcaagggtcctagttgaaaccgcacggttagaccacgttggggtgcccaaacctcaagtgttaaccggcaagaagttggcaaac

SEQ ID NO: 499034 - DNA, 320 bp, Homo sapiens
tggggatcacactacctctccaagtgtgcacagctccatgattatccagacaggattctctgtgatgactccaatcagcttcgcaatatgaggatggtcaaagtgacgcattgttactaggaaaaaagttctccatagttattctttcttattatttttttttttagacggagtctcattctgtcaccaggctggagtgcagtggtacaatctcgactcattgcaacctccacctcctgggttcaagtgattctcctgcctcagcctcctgagtatctgggactacaggcacgtgctgccaggcccagctaattttcgca

SEQ ID NO: 499035 - DNA, 195 bp, Homo sapiens
  misc_feature (27)..(27): n is a, c, g, or t
  misc_feature (29)..(29): n is a, c, g, or t
  misc_feature (84)..(84): n is a, c, g, or t
  misc_feature (125)..(125): n is a, c, g, or t
aggctctcctagcagcatccatcgccncnaccctatcttcactggcttcaccttctccttctctcttcgttgctgagcgacaanttcctagcgctatgactgtcgtctccgtcccgcagcgggancagctcgtcctgggtggccgccttgcccgcttggttttcctcccgaggttactttggggccctcccgatg

SEQ ID NO: 499036 - DNA, 354 bp, Homo sapiens
gttctttgattttaagtggggttaagggaattttttcaaatgttggaagggggggggtttttccccccccccccccccttttggaaaaatgaaagcaaatgtttaaaagaatcccttttgaaaagctgtgtcgtgttccctgtaaaactgaccaggggtgtgttggcgcgctaagtcccccatgcttgtgtgtaaggaagaagggggcccccccggctccgcgctgttgggcctgtgacccccccctgccccccgcccctgttgccaccagcccccccggcccccctttgtcaaatacttggcatccctgtcatactcccaccttcgtgaaaaaagttgtgtgcttttttcgta

SEQ ID NO: 499037 - DNA, 806 bp, Homo sapiens
taagaaggcctcattcccagactccttgtggagactcgccgccgtgatgctaggctggtcactactccgagccctgtgacgtgtgcgggagtccaggccgttcgaccgaatgtcctcacctgaataacgtctctggagaaattgcagacaacgctgcagtgggagaaaatccggggtaacctgatactgtgccatacggtgaaagagtgactcggagcgtagacatatttgctagagacacaatcctgttgtaacgttcatgttggcaccctaataaattggtgagcatacgacatacatgattattctaagggtgtctgggaccagatatttgaaccatccaaaagccaagccgtacggtcgtttggaatatacatatggagagaagagcaaaaggggcatcagtcatcagccaaatagaatatcgcttcactttcgtggacactcggtggaggaaccttctttattgggacttagttcagacatacccatcaccaggtgatcgccttatggatgtcaactcttgatctcgttctcgccactctttcagaatccgtagtgatctcgtggcccaccatggtagaatctctgtgcaggccacaagaagccatgtaggaccaacgtgatgagtgaaactggggaaagaggaattgcgtaaagcctgtctctgaaactgagaccagaggatctggaataattatgccgaggatcatgctgatcatgaatttattgaaccatttccggtacctctggtcatgatggaagtaggatgagttgcaggatttgagttggaaaaaaccgggttg

SEQ ID NO: 499038 - DNA, 218 bp, Homo sapiens
aattaagacattaccaagtatcagtggcagtaagggcaagctgaagaataaatagcactgagttcccgggcaatgtcttgtcctccaacgacatccaaactgcgttcaggcagctgagacaggcttctttcccagcgacaagcatatgtggtcagaaatacatacgatggtaaatgaggctactacataggcccagttaacaaactcctcttctcctc

SEQ ID NO: 499039 - DNA, 175 bp, Homo sapiens
tcgcatctgtacctcagctgtatggtcttctctgacctcagccgcttgccttactctgacctcaccctgcctggccttctctgagactctacaatggttttcatccacaccagcaggtctagcacttgcgcaagatggaggatctcagaggacctgtttggccttgccctgtcca

SEQ ID NO: 499040 - DNA, 121 bp, Homo sapiens
cagcaccccgactctataggatcacctctacgttggggaaggaacataaacactgagatcactccagagatgcagtggacagcctaagagtgcatctcacaatttacagcctgttcttaag

SEQ ID NO: 499041 - DNA, 700 bp, Homo sapiens
ttcatgccatgcagtgacctgatgctgcctgctgtccccttctcgctcctgcgtgtggccccagctgtgaccccttccgcgactggtaccctgcatagcctgcctcttctgaccatgtgccttctgggctgcccctgtgctgcctggatggatgttggtctgcatgttgtgttatgtgctgtgcatgcatgcttggccatgtgctactgtgctgcccccttgcccccctgcctgccatctgatgatgcccctgcattgtgtgcctgctgccctgccttaacatgcctgctgctgctcatgcctgtgcaaactcatgcatgctgtgtggtctctgtgaggagtcctgtgcacagcattgctgtgacctgcttggctgctgttgtccctttgtgatttgtcagaccagctatcatgcccctgtgactgaatgccttgactgtgtcaatgaccaatggattggctgttggtttggatgaatcaccctgtgcaaatgcactgatgtgagtgctgtgcaatgtgaacctgaatccattgtgctaacatcatcccctgtgttgctatcaactgctgggagaatacactgcttgccccacctgtgtttgtttgtgacccccacgccaaacgttttccgtaccctacccttgtcaccccttgaatgtgtgcaaccaccttttgaacccttgtcgtccatgtgcccacg

SEQ ID NO: 499042 - DNA, 888 bp, Homo sapiens
  misc_feature (1)..(1): n is a, c, g, or t
  misc_feature (79)..(79): n is a, c, g, or t
  misc_feature (92)..(93): n is a, c, g, or t
  misc_feature (134)..(134): n is a, c, g, or t
  misc_feature (155)..(155): n is a, c, g, or t
  misc_feature (160)..(160): n is a, c, g, or t
  misc_feature (180)..(180): n is a, c, g, or t
  misc_feature (183)..(183): n is a, c, g, or t
  misc_feature (196)..(196): n is a, c, g, or t
  misc_feature (236)..(236): n is a, c, g, or t
  misc_feature (276)..(276): n is a, c, g, or t
  misc_feature (302)..(302): n is a, c, g, or t
  misc_feature (326)..(326): n is a, c, g, or t
  misc_feature (345)..(345): n is a, c, g, or t
  misc_feature (387)..(387): n is a, c, g, or t
  misc_feature (418)..(418): n is a, c, g, or t
  misc_feature (429)..(429): n is a, c, g, or t
  misc_feature (464)..(464): n is a, c, g, or t
  misc_feature (482)..(482): n is a, c, g, or t
  misc_feature (598)..(598): n is a, c, g, or t
  misc_feature (663)..(663): n is a, c, g, or t
  misc_feature (674)..(674): n is a, c, g, or t
  misc_feature (717)..(717): n is a, c, g, or t
  misc_feature (725)..(725): n is a, c, g, or t
  misc_feature (739)..(739): n is a, c, g, or t
  misc_feature (748)..(748): n is a, c, g, or t
  misc_feature (753)..(753): n is a, c, g, or t
  misc_feature (757)..(758): n is a, c, g, or t
  misc_feature (769)..(769): n is a, c, g, or t
  misc_feature (774)..(774): n is a, c, g, or t
  misc_feature (787)..(787): n is a, c, g, or t
  misc_feature (800)..(800): n is a, c, g, or t
  misc_feature (809)..(809): n is a, c, g, or t
  misc_feature (812)..(812): n is a, c, g, or t
  misc_feature (856)..(856): n is a, c, g, or t
ngggatcttgagtcttggagctcctagagggaagcttctggaaaggaaggctcttcaggacctcttaggagccagtgcntaggaaagttgtnnccttgaatgtaagtgtgaaggtgaaggaggaagcagatgcntgttcatatggaaaaaaaganctggntgtgaagaggggaggcgganacnaaagtcctgaaanttgggcgggaaagaattgatctagaagaggacgttgtcanagataaagagccaggctcaccagctcctgaagaatgaatnatgacaatgagaaaaaaatggaaaanagacctcagccctttgtgcggtcntgctcctcgtcgtcgccanaccgtccgtaaatctccatcgcgtcaagagcaaaaaatcgtnatcacgcgagaacaacacaaaacgatcgccnactcgccatcnagttgacgaacgcaccaaaagcgaccccctcgccncctccccaacgccccccnacgtcgttccccacgcacgctaaacgcacgtcgtcccacgcattcgcgaacgtcgaccctcgcgccacgaccgtcgcgaacgtcgccacctcgatatcgcgaaccgctcgacgctntaatccctcgtcgtcgcgcctcgcacgcccgctttccccccaaccttccacgcaatccctcctanctcgcgctcgnggcaaatcgcgttccctttcaatttcgacgcaccctccccacngccccganctcgtccgcgaccngcgacgcanccacncccnncgaaccgtccncgacncacacgcgtaccncacgcctcgtcgnaacgcgccnttngcgtcgctcgcgacgcacgctcgaaccccctcgcccctcgcaanacgcaaccaaacatttcctccctcgtcgtcgc

SEQ ID NO: 499043 - DNA, 207 bp, Homo sapiens
ctacgtagcctactaaaatataagatcatgagaacaggaacatgggtgttcttcactagaactgctccagtgtcctgtgtttcagaccgaagacactaaacagtgtatgaatacatagtcaattacatggtaaggccatactgtcacttcccaggtttgtccaatgtaggcatgatgatttctaggttatctttgatgtagaagggg

SEQ ID NO: 499044 - DNA, 89 bp, Homo sapiens
tgtggattagaggatcccagttctgggtccccatcccttctacttttcatcctcctccgttggcttcaaaaaagggaaattttcccttg

SEQ ID NO: 499045 - DNA, 173 bp, Homo sapiens
gccggcccctgcttgtaaggtggctctcagtctatcccagaagagctacctgtgcccatgtgatttctctcccttcccataccccatcctgatgttgcttccgacagctccatgcatcctgttttgttaatgaacagaatcgcttctttaacttcattaattccagctcttca

SEQ ID NO: 499046 - DNA, 411 bp, Homo sapiens
tctatacatattataaaatattcgcttactaaacgaataaggactttccaactgcgtttctgagttctacagatgggaaaactaacgccaaaggataggagcggggttcacacagctaattctgaagggaaactggaagcagcaaccacctatgcacctaacctgggctaagaggggtttaggacttgggccaccaaactctagggcctgtccctcaagtgcaattgcagctgctcctaggctatgccaacctctgccagagagcaactgcgagggtgcgagcaaagacaggaacagctgaggccagtggagggagtggcgaacaggtccaagggacctctcgagcttgacctcttaggcctgaaacaatccgtgtgagtgtgcgcatcccctttccccccaaaatctttc

SEQ ID NO: 499047 - DNA, 401 bp, Homo sapiens
tgtgatctaagcatccgcttactcatccagtggcactccatgtctgataggtgggacactcgtggtcatgagtcaagaaccagtgagggccaggcgcagtggcttgtgctgtaatcccagcatttgggaggttgaggcgggcggatcatttgaaatcaagagtttgagaccagcctgaccaacatgatgaaaccctgtctctactaaagatacaaaaaattagctgggcgtggtggtgcatgcctgtaatcccagctactcaggaggctgaggcaggataattgcttgaacccgagaggcagaggttgcagtgagccaggattacaccattgcactgcagcctgggcaatggcgcaagactctgtctcaaaaaaaatacaaacaaaattagccagacgtgg

SEQ ID NO: 499048 - DNA, 540 bp, Homo sapiens
  misc_feature (366)..(366): n is a, c, g, or t
aaggctggtttttgtaatagctgtttgggattgcaagtttggaccagcgctccctactcaatgatggtttgaaagctggactacctaacttcaaatacactgatgcggggtaggtgccttacaacagggatgtaaatcccgcgcttgatcttttgtaggcgtgcgcataccactttatctgaaaggaagatcacaaacctcgatctaagaatccaggctagacgtctcagaatccctacttattgaataatatagggtcaaatcgcgagcaactacaaacgtgtttaatccgatacagcttaaggaccagacgcactacgtgtgctcagaggttgctaggaagatgagggctgaaatataaatccnttctcatagcctacacatagggctatgcatcctacagatcaaaacacggctcacggagcactatggctctgtgaggcaggccctgggcttcgtacttttattgatcattggccacatgactccctactgtttatgcataccatacaccggctgtgccatgcattgcatagccag

SEQ ID NO: 499049 - DNA, 195 bp, Homo sapiens
catgatggagttcattgcctacaccaggtctttctagactggtttactccttcctataaaagaaaatccctttttacctaccccttgagagtttgtagatttatggcctggagtgttctccctgtttacagagtcttaccaccctcaccagccccaaactcatcactgttcaaatatgtggcaagtgagacccat

SEQ ID NO: 499050 - DNA, 181 bp, Homo sapiens
  misc_feature (5)..(5): n is a, c, g, or t
tgtanatttcactgtcgtcccaccccacttctatcacccacttcttccttcaactacatgcaagtactatccttacctgccagccagatagatagacagatgggaaaggcaggcgcggccttcgttgtcagtagttctttgatgtgaaaggggcagcacagtcatttaaacttgatccaac

SEQ ID NO: 499051 - DNA, 344 bp, Homo sapiens
  misc_feature (41)..(41): n is a, c, g, or t
  misc_feature (132)..(132): n is a, c, g, or t
  misc_feature (145)..(145): n is a, c, g, or t
  misc_feature (306)..(306): n is a, c, g, or t
  misc_feature (312)..(312): n is a, c, g, or t
  misc_feature (337)..(338): n is a, c, g, or t
aggctggtccttctccctaaatgtccaggctgccctataanaattggaagggggagccccaggcgcagtggctcactcctgtaatccctagcacttggggaggctgaggcaggtggatcacctgaggttganagtttgagaccancctggccaacatggtgaaaccccatctctactaaaaatacaaaaattagctgggtgtagcagtgggcacctgtaatcccagctactcaggaggcggaggcaggagaatctcttgaacccgggaggtggaggttgcagtgagccaagatcacaccactgcanctccancctgggcgacagagcaagtctctanntcaaaa

SEQ ID NO: 499052 - DNA, 114 bp, Homo sapiens
  misc_feature (114)..(114): n is a, c, g, or t
agaaactcactcaaaaccacaaaattacatggaaatttgacaaccttcttcttaattacttcttggttaattattgaatttagggcggaattaagaggttctttgaaaccattn

SEQ ID NO: 499053 - DNA, 104 bp, Homo sapiens
cagcgcctggaggtgcccgtagagatgaacccagagggctacatgaccagccgcacggtccgggaggcctcgggcctgctctccctcaccagcacccactacct

SEQ ID NO: 499054 - DNA, 446 bp, Homo sapiens
gaggctgtgttctgagtttggtttgcccttgttgtgaaaaatgtggtgagtctcacatactcccagctgtctgctggttgtcatgcagcagacatccagaagggcattgggtagtattgagtgagtaggaggagacaaagaagcctggctgttgggtgagcagagggtgaaatacttaatcaggtcttgaaaatttttatgaaaagtctaactccagtattttttggaaatttcgatgatattggtatcatccaatttgtataatccaagtctaacaggtcttgctgctctctgcttatttaagaataatgtatttaaatacgatcaagtgtgataatcttaactatcaccttctttatctcttatcaccctgactaaggctatggtatatcacataagtcatataccataaattaaatgaataaaaaataaagaaatactataat

SEQ ID NO: 499055 - DNA, 270 bp, Homo sapiens
ggtcggggggagggcttcggccgcaaactccccgctagagccaacgaggccatggctttattatttttctggtacattcgtctccttaaggggaggagttagaagcactaaacatcccagagatagtaactgtcttcttcagaactttttccaacaaatcactccattggctgatgaaaaagaagatgactgaaaagggttatacttcctggagttccactatcttgcgctgtaatttggggggggggtgatgtggcttgatatgttcgc

SEQ ID NO: 499056 - DNA, 160 bp, Homo sapiens
cagagtaacacccggggaagaattcacataatagaacacggactatacatacactacattactataatagcctaacaaactcaaactacgaacgcactcacagtcgcatacataatcctacacatcaaggcacttcaacactctactacccactaatagc

SEQ ID NO: 499057 - DNA, 194 bp, Homo sapiens
agctcggacctcatcgaaacctcatcttcaacttctgcatgcccgtagctctccagttacatcctcttataatgtgacattgggattaggtcatctcccctgattactcccagtcccattagactagatgcctgtagaaggcagggtcctggcaaaatatcaatgtattcaattgctttttttttttttttgga

SEQ ID NO: 499058 - DNA, 526 bp, Homo sapiens
  misc_feature (65)..(65): n is a, c, g, or t
  misc_feature (76)..(76): n is a, c, g, or t
ctgggttgtaggatgctgagtaatgtaacctctctgcacatgatctttaacctccaactctaggnaggctcaatanactcctgatctgtgccctggttgtttcattgtctctactgcttattactatcgttttgcctcaatatgtcatagatggctcctgaggcacaatatccaaagtatttttctgacctcctgacatcctcagtttggtggacattctcatcgatgatccttatatttgctgttgaaattatggaggaaaaattttattaaattcagacaggacactgttcttgtgagactactatgtggattaagctatacacacatgttttgttccattgattttttttctacaagaatggattttatattatttgacctactttggagataaagaactggtttcagagtaatttagagtaattagactctaaagtgaacagatgcaagaactgcatgtagaacaccagatgttgcttccttcatagaaggatttgtcgacgtggccgcgaatttagtagta

SEQ ID NO: 499059 - DNA, 818 bp, Homo sapiens
tgtgttagtctttttgtaggtgtatgagagattatcatgcttcacatactgatgatcaatgttgattgaatgcagatactggatggcatcacagatgctcttcatgatctcggatgcttctctttctgtgaatgcctggtctcctcgattctgaattcggctaaagagttctccaccgtccaaacattccatgacaatcagcatgcacttcatccttgtgtacagattctcgtacacatccacgatcagtatgatgtgcgggcactgggaggcccgccagtgcagctccacctccctgcgggccttggggcagtcctgaagcattttgagggcgaatttctcctgggtcctcttgttgaagatctgcaaaactttgccgttgatgcccagccccaggacctggctggtgaccttgtagtcatcgatgatggcgttcttcttgatctgcaggccggacttgacgtggaactgcgggaactgctgcgggggcggcggcggcggctgcgccggggggtgcggcagggcaggggtcgggggctgcggcggcggggccggggcggggaacggcaccggcgggctctggccctgggagttggacagcatggtgcccggggacgccggggcacaggcgggggtgcccgcggccgccccctcctccggctccgggccccctccccgccgccccccgacgggctgcgaagttcgctccgggctggagccggcttccccgacccggcccggctccaggctcggcgggtcgcggggctccgtgggtcccaccgcgcgccgctggctcccaccggcccggcgcccccgct

SEQ ID NO: 499060 - DNA, 270 bp, Homo sapiens
gcacactgcatattaaagttattagataaggacagtagttgtatgatttacgaaggtgttctgttcttgacggtttgacgaaggtgaagtggagagctttcctgagtgtgtgtttttagtagaataagacaaattggtgagatgttaatacttgtctcttgggagagaatgaggctgaagatcttaaatattccttggccacatcattcagtatctgatgctatttataaaagcatagaacagtcagacaagaatacctataaaattaaa

SEQ ID NO: 499061 - DNA, 198 bp, Homo sapiens
ttctagagtgatcccccagcatccaggctgtccgacatgcccaggttcacgataatccaaccgttctccagctctgatcagcagatatttggcccggcgctgcacgctgagcaccggccgatcgctcagcgtcaggatctgctcggaaaccggccagcgcaggcgcgcgttgcgcaccaccgcatactgaatgctgtg

SEQ ID NO: 499062 - DNA, 317 bp, Homo sapiens
tcccttgggcgcgggcgggtggtgggggcatgggggtggccccgtggggccccatggcgaggttatgttttggttttcggagcggggcggttgttggggtccgggggggtttttgcgtgtgggcgggtcggtgttggtgggggggggggggggggggttggggggccttccccccctcccttcctccggcccccccccccatttccagggggtttcccccccctgcctcccctgcctggtccccagccggtgggcccgtttgggaagtggtgtccggttggcttccctttaggcggcctctttttggggcctggggg

SEQ ID NO: 499063 - DNA, 747 bp, Homo sapiens
gcgagatttaggacaaacctctgccgagtgagcctctggttgggactatgtctgagaaacacaaactggcaaggcgttagtcaagcaaagctgacggcacgaggaaatttgatatctggctggagtctagaggatttaactgcaccactacaagatacctctcgagggcagcgtggcaaaaaacgacctaccaacttcccggtggtcacagccgtttgagaacgcgatgctttctgagacttgtacgataactaggagcctgtgtttgaactatccaggctcacggacagcctcttgaccacacaacaaccttttctacttaaccctaacaccgccggacttttgacgctgcggatcttccattcccctagcatcgaacttcacgggcaccaccaacgctatgggacacgacacttcttacaccaactgactgtaaccggggacacctgtctacccttatacagaccttattccctttctctacactcgacttgacctccctaaactcttagagacgtacgagtacgctccgatgctcacggtgagctccctgggacgctcattgttcgaacaggggcgcaacacctcagagagactattccttgcatagcaggcacaaaccgcggacggcgccaaacaacggccgcgccttcccgcggacttctaagacttgcagagcttcacttcgacatacacctggtgcaaagtccacgttgcaccagcatgcccttcctcctgacagctcct

SEQ ID NO: 499064 - DNA, 141 bp, Homo sapiens
agagaccacagtacttcatatggaggtcattgtggacgaaatgcacacgccgagagtccatacgcggagtctccatatacttcttgaggtcagtgtggagaagttgtagcaggtacgatggaggaagttgttgcggggaag

SEQ ID NO: 499065 - DNA, 968 bp, Homo sapiens
ggccgcaatgcgacgcctgcgccggtgcagacgtaaacgcagccgggcgaagttttaccgatctgtgtaccgcggacccggccgaggctgagtcttcccgagggtcatggatcaggctgctttgcttgagtcccttttgtgtgcctgccatggacaattccgggcaaggaagctggaggcgatgtgcgctgtttgtgccgagggcggagcgcaaagtgaagaactcgacagtccttcttactctgtgcctcttttggaggctcatccaaaatagaggaagcatgcgaaatctacgccagagcagcaaacagtgttcacaaatgtgccaataaactgtgatgtgctgctggaaacgcgtactgcccagggctgcacagcttgacaacctgcaggctccaggatgcaagcaacggacgcagcccaccttgcttctgtagggaactggcttggccacagcgcagattacagaggagacatgcgcgaaccccccaaagaagtgaccatataaagcttggtctgtgggactgccgaggcaatacggaaggatcctaacaggcagggaaccacattgcgggccccctggaattttccaccgggaagttgggccggggccccacaatgccctacacctcaagccaattcagcttccgactaattagtgggcctttgcaagcgacatttcctcaaagagtgggaacggacacccagtgaacggcaatatatggcggacagctcggggcgagggaacaccccaaattctcaccggtgaaaaagacgtaaacaagacgtggggtgggtccccacccaaacaggttgtaggtacggcacccgcccgcccaaaaggcctctcttcaaacatcgctgtgaacaagaagagccccacaacaaaggtcaatcttcccctagtttggtggacacacacaaacagtagcaaaagcgccgaagtgtaccgcccccgtcttgaaact

SEQ ID NO: 499066 - DNA, 294 bp, Homo sapiens
ctactcggtgaagtgcaagatgagagctgggcaggacagagcagatcaacaagggagcaggcacttacacaggacaccaaggaacagccagccaaaatgtaaggtactgtagaaccaagaaaatagagtttccacaaggagggactgaggagcagatgactcggagtgtcaggacacttggggacagatgtgtccatgctattctctaaccccaagtctaagcctaagaggaaatcaggattcagggaggttgtatttggtttccagcaactcgcccaccaagaatttcaaaat

SEQ ID NO: 499067 - DNA, 451 bp, Homo sapiens
cccatgtgtgccactaataggaacactcttctctccactagataaacattctgatcaatttttaagaaatgtatgacatgttatttaagatgttccagatgcatggaaaaaaaaaacagcaagcttagaaatcctttcttaagaagcctaaaatgagtaacaaaacttaaaaacgacccaagaaaactgcaaaccagcttcacttaagagtattgatgaaaatttccttttttaaaatgaacaaactccaggccgggcatggtacctcatgcctgtaattctggcgccgtgggaggccaaggcaggtggatcacttgaggtcaggagttcgagaccagcctggccaacatggcaaaaccccgtctctactaaaaatacaaaaattagccacatgtggtggcatgcacctgtaagtctagctactcaggaggctgagaggcacaagaatcac

SEQ ID NO: 499068 - DNA, 155 bp, Homo sapiens
ccttactccacacctcaggctcagtacacaccggaagcaatatgaaatgatctgctgcagtagcatactgagccctaggattacatcgtttcttttcaccgtaggtggccctgactggcacttgtattagcaaagtcatcactagacatcgtact

SEQ ID NO: 499069 - DNA, 128 bp, Homo sapiens
ccagatacggggtctgtgactctgggcagggacccggggtctcctggtaccttgacagagtcagctaactccgagtagcagtgggcaggtgtccgcccctgaggcttcacgtccgggagtaagccacc

SEQ ID NO: 499070 - DNA, 908 bp, Homo sapiens
gtacaaaccacaaatgacattggaacactatacctattattctggcgcatgagctggagtcctagtgcacatgctctaagcctccttattctgagcctgagctggtgccagccatgtgcaaccttctaggtaactgaccacatctacaacgttatctgtcacagcccatgcatatgtaataatctatcttcatcagtaaatacccatcataatctggatggcttttggcaacttgactagttcccctaataatctggtgccccctgatatggctgtttcccctgcataaacaacataagcttcttgactcttacctccactctctcctactcctgctcgcatctgctatagttggagtgcctggagcagtgaacaggtttgaacatgtctaccctccacttagacagggaactacatccacaccctgtgaagcctcctgtagacctaaacattctatctccttacaccatagacagtgtgtctccatctagtacttagtgggcccactcaactttcatcacaaccaacttactcaaatatacaaacccccattgaccataaccacaaataccaaacctgcaccctcattcgtcttgatcctgtacctaatcaacatgccattccatacttactcctaatctctccacagttcctagacttgctgtgcctcaacatactactacactaaacagaacctcaaacactctaacaacaaaacttcatttcaaaccccctgcccttcacgtgatgtgatgaacacacaatatctatataccaaacataccctaattccttgagttactacagggtcacaccccttgaaaggtttcatatttcattattcttaacacagtgcacaacgaacttcaatctcatcaatatttggaaccgttaactagcaaccggga

SEQ ID NO: 499071 - DNA, 416 bp, Homo sapiens
tatgctgtctcacagccctatatataaaaaatatagttctccaaagacaaatatttttatcttcataaatagaaatgtcattaaaatagtctaaccaggtcgatcacttatagaaacgagacaaccaattaaacaaccagagtttttacgatatgggttagaatcacaggacatagtaagattctatgaatccagatgtctatgagcaacatataacatttgtaagaactgtataatctatagaaaataagcgcaggctgatatgccgttataactaaatacacagctactatactagcacttatgatgtgaatgctttcagttctatatctaatacaggacaggccctcttactcagaatgtaatacgctctgcagctgcaggggagagagcaggagcatctcttctcatcttac

SEQ ID NO: 499072 - DNA, 351 bp, Homo sapiens
cagaagcctttcctttgtgaaccccactgtgttcttgtatcatcgtccttctccttttactatgttgtaagttacggttttcattaggccccatcacatcttctttactgtaaaattattaaaaggctgtttccaagtggggcagctaatgaagttctaattattgcagacatatttttgagatgtaaaacactttaaagtgaaatgataagtctcttggaggcgagtgaggaataacatggatgtaaacatttacatgggatgcattcggattctgctgtgtgtattgtcttttggttgaaacaaattatgaacagtgactaataataaaaagtcaatactcaatgattt

SEQ ID NO: 499073 - DNA, 1008 bp, Homo sapiens
gcgcgcccgccgtggttctacgcgcgccgaacctctggttgcctccctcgtggggggacctccccgccccgtgtgtttcctctacggccccggcgggtgtcttttgccccccccgggaatgtgtgttctgttgttgggacaacatgaggccgttgtgccgctgcaagatattttgttcttgcgcgcttcgcccccaaatggtttccgggtagagctgtgcacccactggttgcctccccccttactgtcccccccgctggggaccccctctcatcggggcttcttctaaaggcccaggggggtataatagacaccccgctttcggccccacacacacgggggggaaacgttcaccatttggctttattactacgcccggaattactacacccgtggtttctgaccatgtaagggggtgcccggaaaaaccaccaaccactttctccacgacggcctgctggccccccgaatttcgccgctgcacccccgtggggaggagcaaagcggcgccgcgcgagctgcgggagccacgcggccctcaccagaacctccacacagggggcgcacgcacaagacacggaaaacaggtgggcacctccagagcatcttcaaaagaacaggctccggtgcccgatgggccgccaccaccgagtgtcccccccccgtgggcgaggcgcacacaaacctggggtggcttcaccgagactccggggaggcaccacacgcaccccccgcccgccaacatggtcaggaccccgcgtgtctgtcaggagggagccgacacgacgaccaatcgcgcccggtggtcactcgtgagccgaaaacagaccccccgtggaggtgcaaccctgctgatgacacaccttatgacctcccgagcatcagcttaaaaaaccaccaggaggggacaagggaggagcaccctgagacgacacggaggaagagcccacccctcccacacaaacgccccgggggccccagccaaccaccccccggccaaaaataaca

SEQ ID NO: 499074 - DNA, 679 bp, Homo sapiens
tttattctatatatagttctttcttttttttgagacagtttcactctttttgcccaggctggagtgcaatggtgcgatctcggctcaccgcaacctccacctcccgggttgaagcgattctcctgcctcagcctcccaagtagctgggattacaggcatgtgccaccacacccggctaattttatatttttagtagagacagggtttctccatgttggtcaggctggtcttgaactcctgacctcagctgatctgcctgccttggcctctcaaagtgctgggattacaggcgtgagccaccgcgcccaggctctatttataatttcttaagttacctaaaatggtacagccaggtattttcccgtgtttctgatgatgagttttgggtactaaaaaagtttgcaggtaataattttgttctgctcttaatgaaaagaaggggaacttttattaacattctaaatctgatggggaagcatctttatatctttttctacttatattccttacattttttcctgtttcatcttttcatttggcttttctttaaatcgtaactagcttgctttaatgcgcctgaccttcctctagaaacaagcaagctacaatctaccagactgtagcatctacatgacttgattcattactccaaatatttttcagaactcatctatcctac

SEQ ID NO: 499075 - DNA, 143 bp, Homo sapiens
tcaacgcagatggtgagcggttatgtgtccaatattacaaaaggagaggtcaagtgccaagagggtagaaggacgggtcttactccgtagtccatgtgagacttcttacttgacagtccatgctctattacaccaaacgatct

SEQ ID NO: 499076 - DNA, 191 bp, Homo sapiens
gccctacccggtaaggctgcagtgcagtgatgttggttcgctgtacctctgcctcctgagtagctgggactacatggcgtgtgccaccgcacctggctaatttttcgtatttttagtagagatgatgtttgactgtgttcggccagtgatggtctcgcaactcctgtacctcaacgtgatccaccgtgcct

SEQ ID NO: 499077 - DNA, 142 bp, Homo sapiens
gaaagaagctagagggaagacaggagaagggtaacagggaggatgcaaagcagacatctaccctggtcaccccaggatcaggaaatgggtccttgtttgcatgtatggattcaaaattgggtctccattagggtttggaggt

SEQ ID NO: 499078 - DNA, 853 bp, Homo sapiens
gtgattgttttaatgctgaaatgactggctatccaaagcttctagtctagaggtctgtcggtgaaggcagacatttccaagtttgttgaaagtaatacgaagctgactagctctacgtgaatgatgtagccctcatttgtattaggcatgaggacctcatttactgcagtactattagatactcttcaacccaaaatgcttaaaacttagtactggacataaaactggctgatattaagacgggttccaaaatatattattcatgatatagaaaaacacattctgagataaaacattttataaattcacaacaaaagactaaaggatggacaagtggttggtatgaaccgaaatgtaaattttataaacattgaatgctatacgggtaaagccttacgaattgtctgccaaatttaatgtataaagagaagtacggaagtaccgtaaagaacgttaacattggataggaaattactgaggaggaaagaaaatggtaatatggcactggggaaagaaaagtaagaagattaacaggaagaaacctgcgcgagcaaaacgacgacacagcatataccccaacaagtaaaaacacaacagagcaaaatacaagcaacaagtgcaaaacagagacaagacaaagacacagaccagaaacgaacagggacaaaagaaaagcgagaagagagaacgaacactgagccacaaacagggcgacatccgcaccaaaataaaggaagcagcaacggattcacacgcgtgcgaccaaacagcggagtgcagtgagaacagacacggaccctaggaccacaacacgctgcgagagcagagaagaagacgaagacagagagacagg

SEQ ID NO: 499079 - DNA, 395 bp, Homo sapiens
  misc_feature (352)..(352): n is a, c, g, or t
ggtaatagactgacacgtcctgcgtgcagtgctattttgtcattaggctccgacagagggctcagggagtttggctcgcctcgactcaaattactctatatttgactgagtgctacatgtggcttccgcccacacttacctgagtggggatcttgacggacagcctatactctgcaggattgcggaactcttatgaccaagtgcatacactatatacccttgactgacccaaatctattatattcagtcccaatgtgttcatccaagcgtgagagacctgctgatgctgaccagaccacgctgtcagtatcatagtcagcgtggacgaacctgtagatgaggactatgacgncagtgaccatggtgagctctagatgtggttagctggtctgtac

SEQ ID NO: 499080 - DNA, 1072 bp, Homo sapiens
ggtgtagatggcttggttccagaggtgagggggcctggctgctgccatcctggcctggtgcgaggttggaggagactgtagtgagagctagtgatgtcgtagacttagaagaactgtgggccacatacgcagcagagcgactggtgtagagtgtgagcgcaggagtgctccgggatcacgcaccgctagacccaatctcctttcgcgtcatgctggcgcctgcgaggtgaatgcacgctttgcgatggtgttaatttagcccacagattgtgatagctaatacgggtaccggcaggctgcgtagctggcgttttgatccatccctcgcagttagggttgatttggagtagaagcgcgagtgtgcgcgtcagaagtgccccgtgatgttcactcgcttacacagcatcgcgttccaatttttagcgcccttgacctccttgtcgggagtcgtctcgggaggaggcgcatagcttacaggaaaagcatatagggtttgctgaccgataccccactggcagtgtgccttgcactgctgtgtccttttacttactgaaacaaaccgggcaccaggcggctatgcgggcatctctagtggtgatcaggaccgcatcttggtggccgcatggcaagaagcgccctggcgccattgattggcagagtcaagagctgcgacaggaactggagtaggcatccccgtggagtcgggcgctgactcatcgggtgcttccggctgtgttctcgtgccaccgtgccgccctgttagggccggtatgtcacttcggtccctcgctgttgaggccctgccgacgctgagggcttgcgttccagtgcttgtagcgcccgcgtggcgtcggcacgccgctcatgcctcgcatccacccagtccgcacttggggcggcacgcggcgattattcctcgaacaccggtggaggggttcctctcccgggcactccgttcccctgcgtgtccctggtggaccgggcccagagctgtgccctggcgccttgttgttgtggcagcctcacctagaccgcaggggcatatcgccccttctccgtcgtctttccattg

SEQ ID NO: 499081 - DNA, 160 bp, Homo sapiens
ccctccgactagccgacagcaagcccttttggctctgcgctggggtagcctgctgtgtactgctgctggagggagctcacggcgcgttgccagcttaccaccagcctctactttgcctgttgtcattggcccgcctccaacatcctgtcggctagtcggg

SEQ ID NO: 499082 - DNA, 101 bp, Homo sapiens
aagctccaccagaggtctatacttttaatgaattgactttcataaatttggtatgttggtgggcagttcctttagctggaattgtaattcctcctgaaatg

SEQ ID NO: 499083 - DNA, 362 bp, Homo sapiens
caccattgggattcatatctcatatacgcaacctatggtcacagacactggatcctgaagtaccgagtgcaaccaagccataaagctctcagtagcaaattcgtgtctcacagaaagacattttcaacttgtgctccagctgttgataaaccaattcatgtgttatagcttgactccagacaagcacaacttgttccttcatacctctctagagaaaaaaagaagttgttagtagatcctaaaaaaagtgtatgaataatgtgagatatttttcctaaaaagatcccttgacacactttaggaatatggagggccatatgctcagtatgctagtaagagtacagtgtgctgcactcgtgccg

SEQ ID NO: 499084 - DNA, 494 bp, Homo sapiens
cttttctgaggctcattcaggtctggtcccaccctggagtttctcctcacagaactcataagaggagaccagagatttgggaggtggcttctgctgcctctccagagcttatgctcacaatattctgaaacccaaaagcagataaattagagcaataagctatatattttgaggtcttaacttctttctttttaattaaaaccagtgcttgtagagacattccatcccagtagttactccacaagtcacaagaaagtaaaagaaacacaataaaaaatccctttaaactgcacttaaccctttcctttctgtatccctcccatctgtctacatttatcacttatgctatacatttttaaaaaaaatcagtgagaggccgggctatgtggctcatgcctgtaatactagcattttgggaggcaaggtgtgcggatcacttgaggtcgggagttcgagacagcgtgacaacatggagaaccctgtctctactaaaa

SEQ ID NO: 499085 - DNA, 346 bp, Homo sapiens
aggaggattagtgaaagaggaaggcctctttgcagttgagtataagaggaaggcttctgtctccggctcatccctggaaatggaatgtctcggtgtaaaacccgttcgtatgttctatttactgcgataggagaaacccgccttatgcctgaaggtgacacatgctggcgccaatactgctctttaatgcactgagatgtttgtgtaaagtcaaccttaattctggcctatgtgcacctcaaggcctgctgaccctctccccacctttcccatatagtcctgccacatccctctctccgagatggtagatatagtgctctatatatgcagagagacccgcgcgcct

SEQ ID NO: 499086 - DNA, 1011 bp, Homo sapiens
caaatacaaaaattagctgggcatagtggcacatgcctgtaatcctagctacttgggaggctgaagcagaagaattgcttaaagccgggaggcagaggttgcagtgagccaagattgcactactacactccaggctgggcaacagagcgagactccgtctcaaaaaaaaaaaaaaaaaaaaaaggggcgggggccgcaggttgacttcacacctggttaatctcccaagcactttggggagggccaagggcgggggggattccaccaagggttcagggaagattcaaggaccatctccggggcttaacacaggcgaaacggccactcccttatcttaaaaaattaccaaagaaaaaaaaaaataaaaaatatttttcgcccaggggtgtgtgggggggggcgcgcgcgctctgtgtagtgcgcccacgaggccagttcggggggagagcgagctatgcgagcgccgcagagagacagaatggttggtgtgggtgagaccgcgccgggggagagggcgagagagaccagtttgcgagcaagtgtgaggcgcgccagagaaaagttgtggttgcgccaattggggatactccccagaaccgcgtggggggggcggcgaagacaaataaaggaccgggagaaaagtattctccccctcttcctacaaaaaaaaagacatacaatacaaaagtactactacaacaatcacaagcacaagagcgtggttgttgctctctgggggggggcggcaaaacagagggagcggcacacctcttttatatctctctcgcgcgaggtggggattctctatctaactaggctatgtctgatacttctttacagagcgggcgacgcgccctctaattaagaacccgatcttgtgtgctaacaaaccagcggggggggggggcgcacaaccccacggagcggagacacgtttttttttttttttttctcccccaccgcgatagtttttttccacgcccgtgtggtggttttgcggcccccctcttg

SEQ ID NO: 499087 - DNA, 185 bp, Homo sapiens
ctacaggatccttagaggagagagaactgggtgtggtggtgcattgttaggaattgaagaagcagttctgccaggaaactggccccagccagaagactcaggggcaggccaagaacacaggcctccccctttctttaaggctctctgaagtttccattgttcattgctctttggctggctgatag

SEQ ID NO: 499088 - DNA, 359 bp, Homo sapiens
  misc_feature (294)..(294): n is a, c, g, or t
tcgagtcgtgacccccgctggccaatggatcagtgtaggtactgccctttctttgctattctttgtttttttttataaaaatggggtctcactccatcactttggaaatggagtcgcccaggctgaagtgcaggggtgccatctaggctcacggaaacctctgcctctaagatccaagcgatgctctggcctcgagcctcttgagaagctggaatggcgggtaccggccaccacacccggtgaaattgtggtatttcaaggaagagaggggtttcaccatgtgggccaggtggntctacaactcttgccctcaggtgatcctctaacctaagcttcccaaagtgctaggatcccggggg

SEQ ID NO: 499089 - DNA, 101 bp, Homo sapiens
catggatttgctggtgcagtacaactaggctctcgaattcgagctcgaattcgaggctcgaattcgagctcgaattcgagctcgaattcgagcttctaacg

SEQ ID NO: 499090 - DNA, 209 bp, Homo sapiens
gccaaagccctttggtgactccctgagtaccatggttttgttttcctttggagattttgcacggatctgttttcctcccccatgaactaaaaaaccccttactcccagaattcaggtcgggcttgttagtactatatccccaagtccattcatttaatgatccaaaactgtaatgttgccctgtattccaaataaagggtaaaaacaga

SEQ ID NO: 499091 - DNA, 206 bp, Homo sapiens
aggctgagttcagtcgagacatggaacggtcaagtgctatcagcacagcaatgaacatccagctgtgttcatgtgacccttagctcaatgtcaccagttaacggccttgtgactactgtgacatctactggggcttgttgcagtgcacaaatattaacctttacgctggttaaagagccaggtttgccagtgcaaaaccttggacg

SEQ ID NO: 499092 - DNA, 495 bp, Homo sapiens
tctttcagccaccctatcatcctaccgccagggccgcccaggcccgcgccgaggccgtgtcggccccggctcttggccctgcagtctggcccgggccgccggcccggaggggagggaggtgacggctctcccggggcggaggcagttgaggactccggagctccaggcagccctagctctccggagcgcggggccggggacagcgatggggcgccggggcggcgagggcttcggccgggtggcgggggatgggtcgcctccgccccggccttgtctggcgagggcggcccggcggctgctgcctgcccctcctggggcggcggttcctccgccccggctccggccggtccggccgcttctggggctttggggtcccccggggcttctggtcttcccccccccccccccgctccgccctgctcccccgccggccttcccctttcttccctcgcccctgcttctctccccgcctcgcccttccctctctcctccgcg

SEQ ID NO: 499093 - DNA, 858 bp, Homo sapiens
  misc_feature (529)..(530): n is a, c, g, or t
  misc_feature (642)..(643): n is a, c, g, or t
  misc_feature (647)..(647): n is a, c, g, or t
  misc_feature (649)..(649): n is a, c, g, or t
  misc_feature (659)..(660): n is a, c, g, or t
  misc_feature (735)..(736): n is a, c, g, or t
  misc_feature (750)..(750): n is a, c, g, or t
  misc_feature (755)..(755): n is a, c, g, or t
  misc_feature (763)..(764): n is a, c, g, or t
  misc_feature (775)..(775): n is a, c, g, or t
  misc_feature (781)..(781): n is a, c, g, or t
  misc_feature (791)..(791): n is a, c, g, or t
  misc_feature (796)..(796): n is a, c, g, or t
  misc_feature (799)..(799): n is a, c, g, or t
gagggaagcctgcaaccggaagtgaaggcagatttccctccttcgtcgctgttgctgccgccatacgcgctctccctgtttagttatggcagagaacgatgtggacaatgagctcttggactatgaagatgatgaggtggagacagcagctgggggagatggggctgaggcccctgccaagaaggatgtcaagggctcctatgtctccatccacagctctggctttcgtgacttcctgctcaagccagagttgctccgggccattgtcgactgtggctttgagcatccgtcagaagtccagcatgagtgcaatccctcaggccattctgggaatggatgtcctgtgccaggccaagtcgggcatgggaaagacagcagtgtttgtcttggccacactgcaacagctggagccagttactgggcaggtgtctgtgctggtgatgtgtcacactcgggagttggcttttcagatcagcaaggaatatgagcgcttctctaaatacatgcccaatgtcaaggttgctgtttnnttggtggtctgtctatcaagaaggatgaagaggtgctgaagaagaactgcccgcatatcgtcgtggggactccaggccgtatcctagccctggctcgaaataagagcctcannctcnanacacattaanncacttcattttggactgaagtgtgatacacgatgcttgacacaggtcgacatgcgtcggggatgtcccaggaaanntcttcgaatgaccnccaangagaagcnngtcatgatgtncagggntaccttgagncaagnganaatccgtccagtctgccgagattcatgcagatccatggagatacttcgtggttgcacag

SEQ ID NO: 499094 - DNA, 1372 bp, Homo sapiens
  misc_feature (1043)..(1044): n is a, c, g, or t
  misc_feature (1156)..(1157): n is a, c, g, or t
  misc_feature (1161)..(1161): n is a, c, g, or t
  misc_feature (1163)..(1163): n is a, c, g, or t
  misc_feature (1173)..(1174): n is a, c, g, or t
  misc_feature (1249)..(1250): n is a, c, g, or t
  misc_feature (1264)..(1264): n is a, c, g, or t
  misc_feature (1269)..(1269): n is a, c, g, or t
  misc_feature (1277)..(1278): n is a, c, g, or t
  misc_feature (1289)..(1289): n is a, c, g, or t
  misc_feature (1295)..(1295): n is a, c, g, or t
  misc_feature (1305)..(1305): n is a, c, g, or t
  misc_feature (1310)..(1310): n is a, c, g, or t
  misc_feature (1313)..(1313): n is a, c, g, or t
tgaccctcatctatcacccttgactgatggctgctgagttaggcatccataacggtgggattataatagggaaagcggagtcttcctttgaggacttttcaggactctacttgtcatctccattttccactttactaagttattagtcatattttaccttttattatctattctatttcctcactgttactttcagatcaagaatttataagttggtcttccccttccaacttttctggtttctgctactgtgattgctaatcttgttgggaacctctgtcctaaccactttccctggtactgctttttctgttctgttatatttgcttttcgtttttatgttttgtatctgtttttctttccaggtaaaagtttcctggtttagggaaagtgggaactggggatggaaaagaggtggtgaaggctgtgctcgtgattaagtcctgctttttttttcccccctccagctcttctgttagaaatagtatctttgttttcctttgctgttcctcaatcccctactcttcaccccttgttttcacctattttgcgagaacccatccagatcccccttcccttcttcccctgccggcccagttatggcagagaacgatgtggacaatgagctcttggactatgaagatgatgaggtggagacagcagctgggggagatggggctgaggcccctgccaagaaggatgtcaagggctcctatgtctccatccacagctctggctttcgtgacttcctgctcaagccagagttgctccgggccattgtcgactgtggctttgagcatccgtcagaagtccagcatgagtgcaatccctcaggccattctgggaatggatgtcctgtgccaggccaagtcgggcatgggaaagacagcagtgtttgtcttggccacactgcaacagctggagccagttactgggcaggtgtctgtgctggtgatgtgtcacactcgggagttggcttttcagatcagcaaggaatatgagcgcttctctaaatacatgcccaatgtcaaggttgctgtttnnttggtggtctgtctatcaagaaggatgaagaggtgctgaagaagaactgcccgcatatcgtcgtggggactccaggccgtatcctagccctggctcgaaataagagcctcannctcnanacacattaanncacttcattttggactgaagtgtgatacacgatgcttgacacaggtcgacatgcgtcggggatgtcccaggaaanntcttcgaatgaccnccaangagaagcnngtcatgatgtncagggntaccttgagncaagnganaatccgtccagtctgccgagattcatgcagatccatggagatacttcgtggttgcacag

SEQ ID NO: 499095 - DNA, 669 bp, Homo sapiens
tgaccctcatctatcacccttgactgatggctgctgagttaggcatccataacggtgggattataatagggaaagcggagtcttcctttgaggacttttcaggactctacttgtcatctccattttccactttactaagttattagtcatattttaccttttattatctattctatttcctcactgttactttcagatcaagaatttataagttggtcttccccttccaacttttctggtttctgctactgtgattgctaatcttgttgggaacctctgtcctaaccactttccctggtactgctttttctgttctgttatatttgcttttcgtttttatgttttgtatctgtttttctttccaggtaaaagtttcctggtttagggaaagtgggaactggggatggaaaagaggtggtgaaggctgtgctcgtgattaagtcctgctttttttttcccccctccagctcttctgttagaaatagtatctttgttttcctttgctgttcctcaatcccctactcttcaccccttgttttcacctattttgcgagaacccatccagatcccccttcccttcttcccctgccggcccagttatggcagagaacgatgtggtctaataaccttttgactgtggggatctctctacatcgtgcctggagcgtt

SEQ ID NO: 499096 - DNA, 289 bp, Homo sapiens
gtgaaagcgccacctaatgcataggtctataaacgtaccagcgacatgctgtttaagtatcagaggctacatagtatgtataaatattaggctaagactaggccctgctcagaactcttctttccctgtgtattcctagctatatgcgtgtagtatttatccataaagaactttagcgtcaacttatctggtaccatcgaaaagcatatgtagggtgttaatagggtgaacaataaacctctttctctcgtctcaggtagaagtgatctctttgctggctgtctagtct

SEQ ID NO: 499097 - DNA, 241 bp, Homo sapiens
ccgctgccgacagtatgattgagatgggggctagtttttgtcatgtgagaagaagcaggccggatgtcagaggggtgccttgggtaacctctgggactcagaagtgaaagggggctattcctagttttattgctatagccagtatgattgtatgattggaagtatgggttatggttcatggtccggagagtatatggtagaagaggatagctatgagaaggattatggatgcggttgctgg

SEQ ID NO: 499098 - DNA, 413 bp, Homo sapiens
ggggacaaccttagccaaaccatttacccagataaagtataggcgatagaaattgaaaaaaaaaaaaaaaaaaaaaaaaaaaaaaaaaaaaaaaaaaaaaaaaaaaaaaaaaaaaaccttttggcccgggattttaaaaatacttccgggccaaaattttatggagaaactccccctttgaaaaaaaaaaccatcccggggtaccttggcttttggacccatttgggaaccctaaaaggtttcgggaatattggcttttcaaaatttaacccttgggggagaaaatcctggtttggtgcccagggaacccagcttacaaagccaataaaatccattgccccttaatacccaagggggtttccaacttctacccgaattttattaggggatcccctgtttgtttatgtggccct

SEQ ID NO: 499099 - DNA, 151 bp, Homo sapiens
agacagagtcttactctgtcacccagacttcagttcattggcgaagtgtttgctcactgcaacctacacctccaaggttaaggtaatgctaatgcctaaacctccaaagtagctggagtcaagcatcacacacgcaaggctagtgttgtgt

SEQ ID NO: 499100 - DNA, 501 bp, Homo sapiens
aatgctttaagatgtatatttttatctggcttctcccatgtgcagcaggattgtaaatgtcctgcaatccaatctgaaaagcgtaagtttgttttcagagatattctaaaaatagttcactatagctaagtaagtcaaaaattcctcacaatgctattttactttctttttcctgccttaggatcttgttttggtctagcagatcgaggcaaactgaaccaccatgggtttgccaaaaagcggatttccattagcttccgctaagggctggttgctgctgcttaatcattaggaagtccaatgaaagcttgtcctttcatacgatcttctttcatcaaacgtatatcaaacatgatccgctgtgtgtctgatgaaaagtcgacctatcttccaaaaatatattttaggtccttttcttgagcatgtttagctaaattctttacatgaattctacagtagggttcacccggttcataacttctgaaaactggaagtgtttcc

SEQ ID NO: 499101 - DNA, 622 bp, Homo sapiens
tgcgagctgagttgcatacgcagagcgagctgagttgcatacgcagagcgagctgagttgcatacgcagagcgagctgagttgcatacgcagagcgagctgagttgcatacgcagtgcgagctgagttgcatacgcagagcgagctgagttgcatacgcagagcgagctgagttgcatacgcagagcgagctgagttgcatacgcagtgcgagctgagttgcatacgcagagcgagctgagttgcatacgcagtgcgacttgagttgcatacgcagagcgagctgggttgcatacgcagagcgagctgagttgcatacgcagagcgagctgagttgcataggcagtgagtggattcgcatacgcagtgcgagttgagttgcatacgcagtgcgagttgagttgcatacgctgtgcgagttgatttgcatacacggtgtgagttgagttgcatatacggtgtgaattgagttgcatatgcagtgagttgatttgcatatgcagtgagttgatttgtatatgcagtgcatgtttccagcaagttgtttaccatctttaggaatgatctagcctgagagggacggtctagcccccacagcaagaccccaggatgaaaatgtaccc

SEQ ID NO: 499102 - DNA, 144 bp, Homo sapiens
aaaggtcttggtaggtgccgccatttatctgtcctcattctctgcgcctttcgcagagcttccagcagcggtatgttgggcagagcatccggagttcacacctctgtggtcgtagagccactatgaggaggcctgggaagaatt

SEQ ID NO: 499103 - DNA, 345 bp, Homo sapiens
tgagccgtagatcccgtcgaaaatggtaaagggagactcgaagtactctaaggcttgtagaagggtaaaatagactattagactatggtgagctcaggtgattgatactcctaatgcgagtaatacgaatgtgtttagaagtgggacttctaggggattaagcggggtaatgcctgttgggggccagtgcccccctagttggggggtaggggctaggctgaagtggtaaaaggctcagaaaaatcctgcgaagaaaaaaccttctgaggtaataaataggattatcccgtgtcgaaggcctttttgcacaggtggtgtgtggtgcccgtggtatgtgctctcgtg

SEQ ID NO: 499104 - DNA, 335 bp, Homo sapiens
tatctcttctaacgcaggtttattcctagatgtcgaatagagctgtgcctcttttggactaactgttaattttacaaggggatttacagggttctgtgcgcaattttatagttgatctaagattctatcttggacaaccagctatcaccgaggctcggtaggtttgtcgcctctacctataaatcttcccactattttgctacatatacgggtgtgctcttttagctgttctgaggtcgctcgtctggttccgggcgtcatagcttcctcctttctagcaaagttatttctagttaattcattatgcagaaggtataggggttagtccttgctat

SEQ ID NO: 499105 - DNA, 1247 bp, Homo sapiens
gctccctgaaccccgacgcaaagcagcgccctggccgggccaagcacggatgcctggcatcatggattccttcaagagctagtgctggaggggccagcaccttggggacttccggtctgcaacggcgggcaacggacttcaagtgtgcccctcatccatttccctggctcactcctgggggcaaagcggcgcaggccggagctggcctgtgcggtgactgtgggctggctgaggcgagtcggatgcgcgagacatgcgcggatagccgtcagcgacacgatcgcacatgctcagaacaagatccgggcctgcggggagcgcctcaggcctgggccgtcagcagtggcccaagccggttcagagcaaacgcggtataatggccgtccgccccacgcactgtggatctccttccgcgtgtacgaccttttgcacccaagcagtctccctcaatcaagatcgggccggtccctcttggggcgcccaccgaccggttgacaggggcccgacaggcagagatggacagtcgcatccgatgcgcgtggatcccagatgccaagcaagcaggaggactgagtggcagaaccaacacgaggaccttggcgagactgcggccgggagacaggtgcaatgtcgcagtacacattcctgacatccattggcccatccatcacagtgcacactgaagttcagtgcacagacccggattgacggaagcaacctcgaacgaaacatcaatgccatgggtgccccaggggcaggaaagcccccgagggaccaagactcaattcgaacgagccacaaggaagccctggggcctggcccataaccgggccgaaagacctaaccaggacgcacacggaccatgggggccaggggacaccagagggaataatgcccggggcacagaaagaatccccggggagaaaaaacgaagcaacaaggtggaatgaaccgggaagaaaacaggccgggggcaagggctaaagcaggttgtaagtaaggtgagacctacgatatgttagaatagtaaacatacatgaaagaggagtacaaacactgtggggagacgagaatctgtagaaaaatccagggtgaggcaccaaagagaaaaaggagaacaagaggaacaaacaatcgatgaaagtagggcaagaagacaacacggaagagatgttctaaactaggagagatgaacaaaagagagatgtagcgactgaaagggaagaatgcggtataacaaagaacgg

SEQ ID NO: 499106 - DNA, 150 bp, Homo sapiens
atctgtgaggcgggcctcacctgtcagcgacgttagcgttcatccgtgtaaccgctcatcactggatgaggttctcctgtcctaaatgtccaaatcaagctagtggcttcaaaatagagaatcccactttctatagcagtttggtaaaat

SEQ ID NO: 499107 - DNA, 323 bp, Homo sapiens
gtgcgctccagccctctatgagtacatccaagagcagagatctcaataccgcccttaaacaatccacatccgcggggcaagcctcaaaggacgtcttctttttatcggctggatcaaggtcgatggcgatactgtctaccaagccaaaccgaaagattctgctgagcccgctctcctgcccacggatcgtgctgctgtagatgactcggatgacaacggccaaggacagccagatcctgaacaacgtcaatcagcatgattgaaatcagtggcgccccctgggcgcctttcaatattcatatcgaagggaacgcctcccttcg

SEQ ID NO: 499108 - DNA, 421 bp, Homo sapiens
ggtattctgacccccatgaagaacgagtcaagtgtaaaaaacacagatctcaggtttcctcccaagcgtgtcagcgagcgctgctgccgggtctagatagccatgtaccaacaacagcaaagccaccctccctcctgcttcttccaggattgctctttaaagggaccagagtgacatactgatgcctactgaggcatctgagatgcactgtgttggaggttagcctcaatgccagcctctggttgtctaggtgagtgacatcaccataaaatcacattgtgtaccattctggactcaggatcacaaaggcagaggcaaccaactctttttttttttgtttttttttaaaagcctccttaaagagattcttggaggctgggctctatcaggggtaaaccgggtcttttcccccccagttttc

SEQ ID NO: 499109 - DNA, 169 bp, Homo sapiens
cacatggtgctggcatctgggggagcggaccgactcccgtcacattccgacaggcccgatggactcactttggtaagcaaactcctaccgaacacgggccaataaaaaaaaggtgggtttttttttttttttttttttttttttttttttttttttttttttttttttt

SEQ ID NO: 499110 - DNA, 164 bp, Homo sapiens
ggcgcctagcacttcacaaactgataagggctctatgaaaagctcacgttgacatcacacctggtgggcaaaagactgaaaccttctcttaagatcagagcaagacaaagatgtccactttcaatactttcattccacattgtactggaggttctagccagggg

SEQ ID NO: 499111 - DNA, 415 bp, Homo sapiens
  misc_feature (246)..(246): n is a, c, g, or t
  misc_feature (367)..(367): n is a, c, g, or t
  misc_feature (385)..(385): n is a, c, g, or t
  misc_feature (401)..(401): n is a, c, g, or t
tgagggcggctccccacataagagttcaatagatctttgattgatggctcatgagaattgggctgccgactgtaagtcatcaataaattcctttactatctagagactatccataagttctgtgactctagagaaccctgactaatacaactagttaataatcttagggagaaaatatttttaaaatctatagaatattgttgtgtctggccagcagatcacaacctgggttctagcctggaaagnaattttggaaacctggaagagaagaggggctaggcggtgagagaaagaaatgcagctaagacaggcattctggatccaaagctccaattttacctgttcctgcacgcaattattaaaccgnggggaagggggccccganttcccgccaattaatncttggggtcccatt

SEQ ID NO: 499112 - DNA, 1063 bp, Homo sapiens
gcaagataccccatggactccctgtacgtgggcgactgtgattcggacgtcagcgatgccgagcagtccgaaaagttcaaccccgcggaagtctgctgctgtgccatccgggtctggcagctgatgtgatcaccccgcgcgactccctgggctatgcctacgtcaactgtccaggagacgggcgacggctgagccgcagcttggacagccatgaacttctgactgtgtattaaggggactggccagatgccgtcactgatgtgggtctcagatgggatcccgtcttggagaagaactctggatgtgggaaacgttcttcatcataggaaccctggatacatctataagatacacacggcgccttatatagatactagatgtgcttccggacccatactgtcctggaaggtggtgtgtgatgagaacggtctacgggttgatgcctcgtgtccgcgcagccgagcacccgtgacgggctgtcggatgaggaccatcgacgagcggactcacatgggcgagtgctccgtcaatgacccgggaagccaattcgaggcgcaggagtcaacgtctgtcgtgcacatggcgggaatagctgatgcttggtacccctaagggcattggatattccgcccaactgctcaatactcgagaacgtcttggccgaccgaggtgactgctgaccagtgtggcgcatgtacatccgcgggcaagtcgggaaacacaccggtggctttggcgtcggactgggggaagcctaatcgggaccaactaacaggggaacggatatgctgagatccgcgacagtggcggctggcacagtccggtgtcaaagctgcggccacaacagcaaggtcgaacgtatggtaggagtggccctaacggactgcaatgcacgattaacgctctcgcaaacgacgagacacacaacaaatctatctattgagcggaccaacttcttccaaatttctcccttgtccgagactgccataactctatacatgctacaactatactcgactcctgtctgcaccactcctataactttccccctcgcttcccctcg

SEQ ID NO: 499113 - DNA, 242 bp, Homo sapiens
ggcgaaaactgtgagaatacagtaagcaaaaaatagcaaatcagcctcccgagtagctgggactacaggtgcccgccaccacgcccggctaattttttgtatttttagtagagacggtttcaccgtgttagccaagatagtctcgatctcctgaccttgtgatcctcctgcctccgcctcccaaagtgctgggattacagacgtgagccaccaagcccagccagccagaccctatttctgat

SEQ ID NO: 499114 - DNA, 783 bp, Homo sapiens
gaaaaagcccaaggagccccgagtgaggatggagagtgcagcagatggtgactcctccgccccggtctggtcgtgggcacgtacgacagcagcaacgccagcgacagcgagttcagcgacttcgagacctccagagacaagagccgtcagggcccgcggcggggcaagaaggtgcgcaaagatgcccgtcagctacctgggcatgcaagttcctgggaagcgacctggagagtgaggatgatgaggaactggtcgaggccttcctccggcgacgaggagaatgtagcccatgcagcgcctgtctgcaccgccgacgcgtcgacctgccagtgcccatgtttgaggacaacctggggcctcagtctgtccaaagcggacaggtggcagggagtatgtcagccaggtgtcctgggggaatgcttgaagcgcgagggtgaagggtagggacgccgaaggcgagtgcccggggtgggcgaggcccggctggctccagcgcgagtggagagcgcaggggtatcatcggcgaccagagggcaccagcccgggggatcgcgtagggaaacgcgggagatgtaagtgtgcgccaggcattccactaggcgatggaggcccaagatcaacatgggctcctttcggcagccgcagcgaaggagcagacagaacccacaggtcagggggcagacatcgaggctgatcaggagggagaggtagcaacatatcaaagggagaggccatagctgaccaggggaaagggctgcaggtaaatcaaagggcaggggccaa

SEQ ID NO: 499115 - DNA, 104 bp, Homo sapiens
tcagccaccattaagatagcgttcaagctcaacacccactacctaaaaaatcccaaacatatatactgaactcctcaccaagtaccctgggaccagcacaacct

SEQ ID NO: 499116 - DNA, 290 bp, Homo sapiens
  misc_feature (238)..(238): n is a, c, g, or t
ttttaaatgtttgataggattcaacagtgtagccatcaggtctgggattttctttgatgggagaccttttattagagctttaatcttattacttgttattggtttattaagttttctatttcttcaaggttcaatattggtaggttgtacgtgtccaggaatttatcagtttcttctagattttctaacttgttggcatatagttgctcataataggctttaatgatccctttacttntgggatcccagttgttatggcccctttttttggttccgaatttaattaattg

SEQ ID NO: 499117 - DNA, 1182 bp, Homo sapiens
cggacgcatgaggtctgatgcaacgcgttcgtgcagtcgtccgctaaggtattagctaatataatgtgccggcctagaaataaaaggctgattcacaaaggtggattggtgagtaccacagaggcgaagcgatacataaaaagtgtgtttgccatacctttcaggtaattgtattagccacacaattcgagtactcataatcccatcagagagaaggtctactacgaagaggtaatgatacgctctggttctgggcgctacctagggcagggaaccctacgcgcaaacgcaagggtaaacgaatcggcatccccattttattgtgatctaatgttaaacggtttaacaactgatgatttaacaagatatactactaaaaaccaattaaggaaatcaactttacttactaacgaggcacttaaagtgtgtttcgggacgttagttggtcactggcttttggcctagtaaagtcagacaactgaaaggcgaagtggaactttacgcaaccgtattaatataaggaagtcttacttgtaaccagtacatttgggaaaaactcttacagtggtgggcatgataatttgggtccaagaccagttcgtattggaccttatgatgtagaacgacaactttttaaaaggataactagatacatgttggcatttcaagcaattcgtacttaagatatgcgaaggtagtgcactggttaacgaacaatttttcaggatagcaaaacttatcaacaatcaaacccggtttagcgcaatagggtcgggtacaaatatggttcccacaagaggagttaaaattatcaaaacgttaggcacttaagccaaattaaagaagaaaagtttactgtgtgaggtatagcaaaatcgggggagcaaaattgcggggcaacttacatttaagcccacgtatccacacataccccttaaatttttgggacatcaagttaacttaaaaaccggtttccaacgttcagcagtcgaccacttacagcgttcatatcacatagcgggtatcacaaggggcccaaccgatacaagggttctaagacagcttggcaactacagcatcgcacaacgcgtcgaaaccaaaaacaggcaaacacgcgcacggaagtcaaccgaacacaagtatcattacccgaatgccttccctgtcacaacaacacgaagc

SEQ ID NO: 499118 - DNA, 149 bp, Homo sapiens
agttatacagcagatccccatctctacaaaaaaaataaacaattagccaggcatattggaatatgcccattgtcccatctactctggaggctgaggcgggaggatcgaagttcacagaacccccataacccatccagctcgccaggtag

SEQ ID NO: 499119 - DNA, 126 bp, Homo sapiens
aacactacttgcgttggtctctattacctaacctggtcttcctctgctgctgcttggtttcctcctaatgctcgtgctctcgcgtgtccttcgtgaagttgctccattgatcggtcgcgcattggt

SEQ ID NO: 499120 - DNA, 388 bp, Homo sapiens
aggattaacactggcctgtgtaatgcctgcggtgcccttccgcaccaccatatctcccgtgtatcagcacaagtctctgtcagggccatatccaggccccttacctctccaggtcccctcacccatctctctcctaacactgtaacacttaacagtgtgtccgaggctcacaagtacccactccccacacaaccgcccacatagggtcggtcatccaaagcttgacactcaaggcactgaaagtggaagaaggaatctgattgctaacaagattgtgtggagttttactgtattgggattttggctgctctttccccagagttagggtattctcaggggggacagcatctgaagagctccaaaagcaaacagaagagctcagggcccg

SEQ ID NO: 499121 - DNA, 996 bp, Homo sapiens
taccggaaaaaaaaacaaaaaattttttttttcccttttaatttttttaaaaaacttttctttttttaaagaaaaaatttgttaactttattgaccaggcatcttaacaaatatatttaaaaatgcttccatcaatttcaactatttgtctatttgaacacacatccaccgacatataaaaagacacgcgtgttatttgaataaagtgggagtgtcaacatctcctcttaccacagaaatcttcatcaaccttttatatgtgtgttaaaggggtgcaccacactcacccttctagtggtagctagcgtggaaaacaaatttacagacacactggttgatttgtgctaccccccatacaaacacttccaccttcttaaaaaaatctttttacaacaccagtatattcgctataaagagagaagcccacttcaatcattctaaaatcaccaatctattatacaacaaaacaatctcttataattatacaacagaggaaacaactctgtctacacatctgtaagaaaacctctataaaaaaaaataacctttttcagcgttggtcaacctcttcttataaaaaagaatataccgagagagaaaacacccgctaattaaatacagtgccgatgtctccccccgagtattttattatgtgcttataagacaaaaacacttcttcttttacaatgtgggggcccgagagaagaccacaagagtctatattcacattgacaagaaaggacggctctctccggtcgtgccaacccacctcagagctctaaaaaagaggggcctgcacgcgggcctatttctcacccaattaagaaataacgtgtagtcttttccaagccgccatatttacccgaagaaaaggggggggaaactttcccatcaattggcaccaagggggccccaccacttatgggacagacaacttgtttatacacgcttcccttcaacaactgctgtgcgcttttgcgacaataccagtctccc

SEQ ID NO: 499122 - DNA, 224 bp, Homo sapiens
gtaacagtgaagtgttctcagcatcataaaggcagaagctgtggtttcctgtggggcctgccaaccgtccctgatgctgaactctgcttgggagttttttccatgggactttaaaaaatgttgcccttaggttgggccagacctctgttaacttcagtagggatggcaccaggttcaagaggccaaagaagagacctggagctagtgaaggaaacatagggttt

SEQ ID NO: 499123 - DNA, 445 bp, Homo sapiens
ctgatgggccatgcggttgacagaaagatagactacgaaagtggcttatatctgaacacacaatagctaagacccaaactgggattagataccccactatgcttagcccgtaaacctcaagcagttaaatcaacaaaagctgctcgccaggaacactacgagtccacagacttaaaagctcaaacggacctggtcggtgctctcactatccctctaggaggagcctgcttctgtaatgcgataaaccacctacattttctgaccccacgaaaactacgagtagcccattatgaaactgtaagggtcgacaggtggatttagcacgtaaacatgagagtagagtgcttagttgaacagggccctgaagcgcgtacacaccgcccgtcaccctcctcaagtatacttcaaaggacatttaactaaaacccctacgcatttatataga

SEQ ID NO: 499124 - DNA, 306 bp, Homo sapiens
aacccctagtggagaagttcaatagcacatgcgactggggtttgaatagttagctctcattctggttttttttggtgtgttttttttttagctcaaaaaagaagttccaggatatggctatacggacaaactcatctgggcattaatggttacgggaatactaacgatttggattatacttttctgcctcatgggggtagggacaataattaattcaggttttcagaatgcagtcctgtcttggggtggattcagagctcacaaacggaaaaccaaagccactttcccacctgcggctatggaaag

SEQ ID NO: 499125 - DNA, 261 bp, Homo sapiens
atgtataaatcatgctattggcaaaaaacatccaacctacttttgaagtgcgctcgcagcaccaattcataaaactggttttgccccgggatgcagactttttgatgaatatcttagctgaacttgaattggtgggcctaattttagggggcttttagctactgtgttatcagtttatctcctgtggtgctgatgggcttagctaccacggatcggtgtgtactctctgatgatccattatcctctgcagaggaagccacg

SEQ ID NO: 499126 - DNA, 1090 bp, Homo sapiens
gaataaaaaaaaaaaaaaaagtagattttaaaaagccacatgggagctcccttctacccactaagaaaataaccaatttttacatttttggagggggagtgagtttttaggaaaggggaattaacgattccaggcgagagctctggggcatagaacagggcgcaggattccatctctccccaagccccttttaagtgactatgtcaaggccccaactcccttcaccaccaacctacgcttacccttattcgagttaatccgtactaaataatccctcctgcggcatatcctaattgtcagactagcattaatggccacacccagcataagtccaagtgaataccattccacctcgtgcaattgctccgaacaaaaggtaccaacaacaacgatcaaatcgccccacagatggaccgatccacgcgccactgcgtagaatatttggcgatggagaaaaaaccgctaaatacacacagcgaggcacataccacctgagagcagaataacggcatcaaccaagcggagaacccagaaacaagacgagacaaacgcgggcgtgggcaggcctgcatcacaacgccatctcactctcacccacgtgcgagcatcgctccatccacgtgagacacctcccgagcgaaacgaggaacaaaaacaaaatgagggcacgacctattacaatcacagaagcatctcgagtcgtcccgacttattaccaagcgccattgaaagcactgaggatatagatacctatatctgcaacatacacaacacgcaccaacgtcttgccaatacactcctcatgtgactttctggcattgagtagctacaaaccccctgtctctgccccatccccctttcaacatacattccacctatcccaaaagtgaacctcatatgcagacaccacactctcaccgcaatttcattacgcaatatgcgtgaatcatatcaccacatatacaaatagatgtcgtaatacctactggtgaactttatttgtaacacaccccacattctgatctctaaatgcgtgtagctcccaatacacatgtgtgttttgtttccacacatacccaatttcttactt

SEQ ID NO: 499127 - DNA, 215 bp, Homo sapiens
atgtgcgtctggctatgtagccatggaaagcataggttcttgccaatttataactgcagtaactgtaatgaattcaaataatggtttacgatcggcaacgacttgatcatcaaagcatttcctaatttctataattcagtggtccacctgtcacgtcacatgttgctgcagttccagcaatttacgctgatgctgaaacttcaatcacaacagta

SEQ ID NO: 499128 - DNA, 119 bp, Homo sapiens
  misc_feature (39)..(39): n is a, c, g, or t
gcctcttctcctaggagctggtaataaggacggggcgcntttaccctgaaggctagtgccagagccgggactgggaacctaccacaccccgctgcctcagtgaggccttgaagtgagca

SEQ ID NO: 499129 - DNA, 171 bp, Homo sapiens
tcggtaagtggagtctcagagcaggagcctctctcccttgcccagtgaaactcaaactcacctcatctgtttatctctccagagtccagtggcgaggctaggacagtggcgaggctaggacagtggcgaggctaggactgtggcgaggctaggacagtggcgaggctagga

SEQ ID NO: 499130 - DNA, 159 bp, Homo sapiens
aactttgcctaaatactttcttcaccaagtctcatgaggagagggaacatgctcgagaaactgatcaagctgccgaaacctatgaggtggccgaatcttccttcaggatatcaatgaaaccagactgtgatgactgggagatcggacacgaatgtacag

SEQ ID NO: 499131 - DNA, 613 bp, Homo sapiens
  misc_feature (11)..(11): n is a, c, g, or t
  misc_feature (68)..(68): n is a, c, g, or t
  misc_feature (79)..(79): n is a, c, g, or t
  misc_feature (148)..(148): n is a, c, g, or t
  misc_feature (306)..(306): n is a, c, g, or t
  misc_feature (319)..(319): n is a, c, g, or t
  misc_feature (321)..(321): n is a, c, g, or t
  misc_feature (323)..(323): n is a, c, g, or t
  misc_feature (339)..(339): n is a, c, g, or t
  misc_feature (350)..(350): n is a, c, g, or t
  misc_feature (355)..(355): n is a, c, g, or t
  misc_feature (447)..(447): n is a, c, g, or t
  misc_feature (455)..(455): n is a, c, g, or t
  misc_feature (457)..(457): n is a, c, g, or t
  misc_feature (473)..(473): n is a, c, g, or t
  misc_feature (506)..(506): n is a, c, g, or t
  misc_feature (512)..(512): n is a, c, g, or t
  misc_feature (514)..(514): n is a, c, g, or t
  misc_feature (522)..(522): n is a, c, g, or t
  misc_feature (542)..(542): n is a, c, g, or t
  misc_feature (560)..(560): n is a, c, g, or t
actcaagatanaaggcaagcggtttacctagaaaggtttacatattttatctatattttttcatttanccatttttttnaaatgtcattcttttcattcatgcttcttttatcctctttctttagaagttcacagtgttatataagtnaaaaacaagacagatagaaaccaccctaaacatatggctttatgtacataaaaaattcaataatgttgccataacccctaatacagtgtgatccttatttatttattatccagaataaacttctgttcatattaaattcttcaagtatatctagagcngtgcttgtcaaantnangccccactgctaagtnaatccccatcnctttnacgatcacttctaccttcaacataattatggtacagttctaatagttttttttatttttcatgtttcatacattctcaaattttcctttatnctcatttntnccaaacatatactttnattttcatcttgtttaatattcccttttttctnctcctnangttaaaantggatctgtgttaccaaatnttctctttcctttttttnttagagtttatcatcatttatttctattacatttaacccaaattgaagatgaa

SEQ ID NO: 499132 - DNA, 1215 bp, Homo sapiens
gggtgagagctggggagggagccacgtcttgaggtcgccatgcgcttcctgtatgagtgcccctggcggcggctgcaggagctccgggatctcattcccaagatccctttccggatacagctgcggggggccaatgatgtgggctacaccaactaccccagacaaactgtgcgtcttccaagttctcgtgaattggcaccaaacgagcaatggccatggatgtactaccggagtgtaccgactccactcgaactcacttgcccaactatgctgctgcggcatggcaagcgggatggaagtgcgcggaggccgtcggtcgagaagtgctgccaatctcggatacacctcgggcggaccgttgggcctgagccacacagtcgggacctaatgtagcattcatcatgcaagtgagcgtaacactgcggctttagggcccggaaaggaagcgtgggtgactggacgccattggcaatccgtcggactagtcgcttgtggccactctactggcatcattggcccagggcgccgtgacgtagaaaggtccgccactggggaccccttgcgaacacaatggcgatggggctcatacagcatccccattccggagagaaaccccggccatgttcgcccccggtaatccgtcacacatatctgggatcgattcacaagggaactcacaacatgaaccaccggtctcaaaggggtggccagggtgctgctgggctagatccaatgacttggcgcgctgcttggccacaaaaggggctagggcaccccttggacatgttcgcggctgtcgacatggttgggcgccaatgcttgtgaacattacccgcaaatggtacctgagggcgaagatttaacgtatacacaccatgagccccaaaccatagttggaggggtggtccccatagagacggtgtggcccctaggaatagccgagcacagggggacaacatgcgccccattgggtatagccaaccccacgcagggggtggaacaccgattgggtaatgtccgcggactgggtacaatgacaccatacccgggtggcaagcacacgggacggacacgggggggactcccggcgggaacaccgtgatacgtgccaggtggcgcaatctggaacagaggcgcaacgggtgaccacgccaagcgcgacatggaccgaggggccacaacacagcgcggagggctgcacagttacacaacaac

SEQ ID NO: 499133 - DNA, 377 bp, Homo sapiens
  misc_feature (172)..(172): n is a, c, g, or t
ttgtgtgatttcaggccagcacgcgggccaagttgatgagaagctggtctcactgaagtatttatcaagtctcagactggtatagttggaaagggagaacaagaaccacggttctcacctctgccagctaaaacttgcagcggatgcagatacgagttcgccatcatcgaanctagcaagaccaggacgcagactgggtgttcacagaaagttgaaggtcccacttgagaaaggactaagaatggtgagcccacgctgggggaggggtggggatgatgtgtgttccagaactcaaatccagctgattgagccctctcagtgcagtgggatatacaatacccctttcagcatctccccaccccatgaggaataatgaa

SEQ ID NO: 499134 - DNA, 396 bp, Homo sapiens
tttcatcatcctcctcctcctcaccagtcacgatctcctcattcatcttcctcctcctcatccttcgtcctcctcgtcttccactacctatagcatcttcatcatactcctcctcatcctcctcctcctcctcatcatccatggcctccacgtagccctcagcatccgagtcacggggcctccttttctgtcccgtgtcctatgctcgttgcctgatgtgagttgcgggaggatgcttgaacacattctctgcggtagtcgttcacgtaggtaaactcgcaattgaaaaggtctaaactcttgaggttaactaactatttcagtggctctattgtactgaggtctataattttgtagccacttaaatttagatgcgtgaggttcggacacttttct

SEQ ID NO: 499135 - DNA, 151 bp, Homo sapiens
acagaaatgacccagtcccgaacgtgacgactttaggcgcccatctccaacgtaactcggcgccggtgacgtccactcccggctgggtcaccactccgagcaccagcaaacctggtgaagagtcgaacacagctgcgatttcctggtttta

SEQ ID NO: 499136 - DNA, 436 bp, Homo sapiens
  misc_feature (1)..(1): n is a, c, g, or t
  misc_feature (13)..(13): n is a, c, g, or t
ntcgatcattcgngggtatttttccactgaaagtggagacggacaaggtacatccttttgcttcctgacccaaaacgagagcatggacccaaggatccttcagggcccacaaatctccttcccaacacccccaacacccaagggtgctcctgtctgcagagtgctgtctgctttatccccaagggtgattcctagaaacttcgacatcagatctgcccctttaatttactcttggctttcaaggcaaattgatattcacatccaaagcgggcaagcgatcaactgcttggcggggttggactgagctgggacccaggatgtgaaatagaatttattgtggctctgattatgtacactagatgtgcctgacctgctgaccaggcttcacatggtttgtacaataaatacatccgccgggcctgctcaaaaaaaaaaa

SEQ ID NO: 499137 - DNA, 116 bp, Homo sapiens
cgggatcgggcagagaggctgagtacggatgggaaactatgtgcacaagtctttccagaggagtttcttaatgagatattgtatttatttccagaccaataaatttgtaactttgc

SEQ ID NO: 499138 - DNA, 180 bp, Homo sapiens
atggctcctaaaggcagctccaaacagcagtctgaggaggacctgctcctgcagattttcagccgcaattctctcggccaagttcctccgcgttctcttcgggaacggcgttcatcgtttcttccattcccaatctggtattacttggcgatatatggatatatggacctattcaggtct

SEQ ID NO: 499139 - DNA, 111 bp, Homo sapiens
agatgatgttagaaacagtgtggattgtgtaataacgccaagcccagttgtagttgtttgagtgcagtaatgaaatctgcatctaaagtaaaaacaagattgtttgtgtca

SEQ ID NO: 499140 - DNA, 136 bp, Homo sapiens
ttcacaagatgcacaggtaaccgaggaccgagtctgtaaacatatagatcggtcataactatcgtggtcgcgtattgtctgtgagtgatctagggaaatttcatgtcacttccctctcattcactgcagtcacaag

SEQ ID NO: 499141 - DNA, 223 bp, Homo sapiens
ttttaaaaaaaaaaggaaaaaaggtttttaattttttaatttttttaaaaacagggtctccccctgtcacccaggttggagtgcagtggtggaatcatagctcactttaactgcggccgtgggatttttgggctcaggtgatcctcccaggtaattataggtattagctattatgcccaccctaaatgtatttattttgttgtatttcaactccaagaaccca

SEQ ID NO: 499142 - DNA, 121 bp, Homo sapiens
ccccgggcccccaattaacccccctttttttttttggggtaacccccccccgggggttttttggacccccccccctggaaacctccccctttttggtttttaaaaggggggggccccccca

SEQ ID NO: 499143 - DNA, 635 bp, Homo sapiens
gggagaagcggcgtcggggctggagcagaggcagcagccggacgagcagcggaggcggcgggagtcaggcgatggtggaatttgactcagttcaaagtgcccagcgggccaaggcctctctcaatggggctgatatctattcgtggctgtttgcactctgaagatcgaatacgcaaagccttacacgctttgattgtgttcacagaatgatcaggatactgtgggattacacaaaccccaaatctcagtggaccaagggtgaccctggcagcaaacccccaagaaagtgccagaggaagggcccccttcttccgtgggaagaatcaccccgcgcaggaatatgggaggggccccaaacggtgtgggtaaccaccaagccatttaccaatgatgaggggctacgggggccgccacacaaaattcaatacaggaagggggacgaagcgatgttggtccacccagttggtggggttcaaccggttcggggggcccaatgtcggttaaaggggcacgcaaggttatggggcaacccgcgaacgcatatttccgcacacaaaccaggagatatgagcactccagtcggacaggccttgtggaaatggtctaatgggatacagatcaactctaaaggattg

SEQ ID NO: 499144 - DNA, 137 bp, Homo sapiens
tctccttttcaatgaagaaaagctttgcttaagggttgcaaacttttattggagtaaatttgaatgatcccactcctttggagtaaaactagtgctaaccagtttccaaaagaatttagcttctggttggaatttga

SEQ ID NO: 499145 - DNA, 151 bp, Homo sapiens
gagtagcatgaggcaggccagataaccggttactcacatgcggggataggatgcgcttcatcatggagtaaccagtaatccagctatagagagcaggacactggcccgattattaccaatgcgaggctgctattgaattcatgcagtgcat

SEQ ID NO: 499146 - DNA, 522 bp, Homo sapiens
aacggttacgaaccacttaagaagagacgagaggcatttagaattcattgaaaacacgctggctggacaaaatattggtaggcgctctgcgttcccctgaacgatcgtactggggaatactttttcattcttaagttgcattttgctagataagtgtaagtattacatcgtcatttcataggatccaaaattcttcagaattaccacagcttcctttcacaattatcaaggcctggggcaaccattaggcaactttccgttgggcttatagaccaagttaacaccttatcatagtgaggggaacgaccttaaagagccgttggacacgctaacacttcgccaacgttgggacaagttaaacttggccgatcatctgtgcgccccgtttatttaccttttaaccagaacaaccccaaggatatcatataccccccccattccattattgcacacatgaaaacataacttctcccccatacaccttcaaaacccagacacattacaacatcttgaacactttcc

SEQ ID NO: 499147 - DNA, 117 bp, Homo sapiens
ctggattgagctcatgctcttcgttcatagtaatacccatcataatcggaggcttatggcaactgactagttcccctccctcaatgattgttggtggggggatcctctatgcgtcga

SEQ ID NO: 499148 - DNA, 407 bp, Homo sapiens
ctcctctaaggatcctcctagttgagtatctgctcaccccaacagagaaaaaacaaagttttctacaacatgtactactctttagaaactgcttgcctctcagtgactttacactgtcatttaaggacaacttataatttccaacaggtctatgaaagttaaaacaaagaagattatgtaaaagaggttataaaatgatttagaggtaaaaactgtcaggagtaacctggttctgcgtaaattagatagctatctgcaagggtctataaaggcatataggcttttaaataatgcttctaatttaatcaagcattaatgaacttagaaaacaatataatatgtagaactgcactgagattatatagaaattatttaaacagagtttttacagaaaggaagggaaaagg

SEQ ID NO: 499149 - DNA, 126 bp, Homo sapiens
gagggctttgagcccgctagacaacaagtgtctgttcaagggctaccgatgggaagaagaagatcagcactgtggtgagctcccaggaagtgagtaaggtttcagcatggtcttattcaacacctg

SEQ ID NO: 499150 - DNA, 1069 bp, Homo sapiens
  misc_feature (736)..(736): n is a, c, g, or t
  misc_feature (868)..(868): n is a, c, g, or t
ccacgcgtacgccacgcgtctgatggcggcaggaggcagtggcgttggtgggaagcgcagctcgaaaagcgatgccgattctggtttcctggggctgcggcccacttcggtggacccagcgctgaggcggcggcggcgaggcccaagaaataagaagcggggctggcggcggcttgctcaggagccgctggggctggaggttgaccagttcctggaagacgtgcggctacaggagcgcacgagcggtggcttgttgtcagaggccccaaatgaaaaactcttcttctgtggacacttggctccaaggaaaaagggctgacaaagaagagaaccaaagtccagaagaagtcactgcttctcaagaaaccccttcgggttgacctcatcctcgagaacacatccaaagtccctgcccccaaagacgtcctcgcccaccaggtccccaactgccaagaagctcaggcggaaggagcagctatgggagaagctggccaagcagggcgatgctgccctgggaggtgcgcagggcccaggcccggctcctcaacccttctgcaacaagggccaagcccgggccccaggacaccgtagagcggccttctacgacctctgggcctcagacaaccccctggacaggccgttggttggccaggatgagtttttcctggagcagaccaagaagaaaggagtgaagcggccagcacgcctgcacaccaagccgtcccaggcgcccgcngtggaggtggcgcctgccggagcttcctacaatccatcctttgaagaccaccagaacctgctctcagcggccacgaggtggagttgcagcggcagaaggaggcggagaagctggagcggcagctggcccgcncgccacggagcagccgccacccaggaggtccacattccaggagctgtgcgaggggctgctggaggagtcggatggtgagggtgagccaggcagggcgagggccgagctgaggatgccgagtctgtcccagccacgccgcctggacacacagagaaagacggacagcacgggggaaaggcgtgcacaggtgcggtacaaaga

SEQ ID NO: 499151 - DNA, 1125 bp, Homo sapiens
  misc_feature (792)..(792): n is a, c, g, or t
  misc_feature (924)..(924): n is a, c, g, or t
ccacgcgtacgccacgcgtctgatggcggcaggaggcagtggcgttggtgggaagcgcagctcgaaaagcgatgccgattctggtttcctggggctgcggcccacttcggtggacccagcgctgaggcggcggcggcgaggcccaagaaataagaagcggggctggcggcggcttgctcaggagccgctggggctggaggttgaccagttcctggaagacgtgcggctacaggagcgcacgagcggtggcttgttgtcagaggccccaaatgaaaaactcttcttctgtggacacttggctccaaggaaaaagggctgacaaagaagagaaccaaagtccagaagaagtcactgcttctcaagaaaccccttcgggttgacctcatcctcgagaacacatccaaagtccctgcccccaaagacgtcctcgcccaccaggtccccaactgccaagaagctcaggcggaaggagcagctatgggagaagctggccagcacgcctgcacaccaagccgtcccaggcgcccgccgtggaggtggccgcctgccgagcagggcgatgctgccctgggaggtgcgcagggcccaggcccggctcctcaacccttctgcaacaagggccaagcccgggccccaggacaccgtagagcggccttctacgacctctgggcctcagacaaccccctggacaggccgttggttggccaggatgagtttttcctggagcagaccaagaagaaaggagtgaagcggccagcacgcctgcacaccaagccgtcccaggcgcccgcngtggaggtggcgcctgccggagcttcctacaatccatcctttgaagaccaccagaacctgctctcagcggccacgaggtggagttgcagcggcagaaggaggcggagaagctggagcggcagctggcccgcncgccacggagcagccgccacccaggaggtccacattccaggagctgtgcgaggggctgctggaggagtcggatggtgagggtgagccaggcagggcgagggccgagctgaggatgccgagtctgtcccagccacgccgcctggacacacagagaaagacggacagcacgggggaaaggcgtgcacaggtgcggtacaaaga

SEQ ID NO: 499152 - DNA, 561 bp, Homo sapiens
gggtctaagtctacactgtcccggtcgctggagctgcaagccagtgactttgataggtgcttctatcctcagtgcaatcccgagtgccgtggcccttgccccagatgcatatagcacgggttccagcagtgcttcatagtacccttaatgcgaactaaaaaaccgaggccgccttccttaggaggaagaaacacgaccaccaagaaacccacagagacaccccgccagtgaagtgagacgcaacaggatgccagactgaatgagagccttgtccccagtggggagaatactagcatctgagacgaaaaccggaatctgccaagacgtgaaggtcctaagacccacgccattcaattggacggcagactgcacaccttgatgcccggcctagtggaggcccaaacgctgcctgacctctgtgactcagagagtgcagaaggggtagtccccccggcttctggaggtggcaggagtgcagaactcagcccctgatcgggcaggacacacgctgtctctctaccacaggacccggaggcaggggaggtaaaccccatcggataa

SEQ ID NO: 499153 - DNA, 746 bp, Homo sapiens
ccacgcgtacgccacgcgtctgatggcggcaggaggcagtggcgttggtgggaagcgcagctcgaaaagcgatgccgattctggtttcctggggctgcggcccacttcggtggacccagcgctgaggcggcggcggcgaggcccaagaaataagaagcggggctggcggcggcttgctcaggagccgctggggctggaggttgaccagttcctggaagacgtgcggctacaggagcgcacgagcggtggctttgtttgtccagagggccccaaattgaaaaacactacttccttcgttgggacaacttgtgcttccatatgtgtaaaaacgggcttgaccaaaaggaaggaggaacccaaaagtccagaaagaagtccacttgcttctcaaaggaaaaccccgttcgggggtttgaacccttctatcccttcgcagaaccacaatcccataatggttcccctttgtccccgcccaatatgacgttcccttcgacccgccaccaaggtttccgcccaaactggccccaaatgaaagggcttcaatgtggctgggaacacgctgaaagccatggctttaattgggggacaggacatggcttgggcgctcaatggccatgggggggccagatgcctttgaccccctgtgggcaaggtgtttagcggccaagggtgcccccattgggccccctgggctttccacttccaaaacccacttttctttgccaaacaatatgggggccaacacg

SEQ ID NO: 499154 - DNA, 1285 bp, Homo sapiens
  misc_feature (16)..(16): n is a, c, g, or t
  misc_feature (175)..(175): n is a, c, g, or t
  misc_feature (216)..(216): n is a, c, g, or t
  misc_feature (236)..(236): n is a, c, g, or t
  misc_feature (245)..(245): n is a, c, g, or t
  misc_feature (368)..(368): n is a, c, g, or t
  misc_feature (419)..(419): n is a, c, g, or t
  misc_feature (464)..(464): n is a, c, g, or t
  misc_feature (467)..(467): n is a, c, g, or t
  misc_feature (489)..(490): n is a, c, g, or t
  misc_feature (493)..(493): n is a, c, g, or t
  misc_feature (552)..(552): n is a, c, g, or t
  misc_feature (571)..(571): n is a, c, g, or t
  misc_feature (676)..(676): n is a, c, g, or t
  misc_feature (933)..(933): n is a, c, g, or t
tcttttttttttttantattttattatttaatattagtggtgtgttttctatactgtgtatattacttctattgttgcgatggttgggtggtgtggttttttttcttttttgttgtttgttatctatctcctctcccgtacctacccacgtgtttctttgtcgtctcaccttatnttattatcttcgcgcccgctcggcgccggggcttctccgtntctcttgcctacgttcgatncgtcggtanctaacactccgtagctttccaaacacaatctgctgtgattcagacactacatcgcaacggacgtgaacaggcgagaaaattcatatatgctatgatttgagtatgtatagttattaaatttanagttaaaatgataacgcaccgctcgtggagaaggagaggaagatcagtggngaagggcgggtgatggtaggagtgtggaggcgctgagagggtggnganttgggagtgtggtgtggtgtgnnaantgaagtgtgtgatgatgcgacaatgtgtatggagagatggtgagacgagaggtctactnaatccgtcgggtggactgntcagtagttaagcgttgcgcgtatatagttggtatagtgcactccgccgctcttttatattttattcactcgtcacgcagacaggtagctatcctcacacgcccnacgtcgcgcagacggaagtagagtagatacataagctatgacgttctcgtgttatcctcattctcctcatcttccttcgttcgtatttcgtactatcgtggtggttgcgatgtgttacggtctgcggatatgcatggcaaagtacggtagcgtggcgatagtagtgagaagagagtacgacgctaaccgctctgtccaactacttcatataatgagatctgcgatgtgcacaatctgacgtggctacggcacgatanagaggcgtccgtcgtagcgtagaggaatataagcgattaacacaaggtcgttccgctccgagtaccccgcgaggagaatagaccgagagacggacagtgtagtactgcagttatggtgtaatgagagcgtcaggtcgtgatgacacgtccgatagagagtctcacgggtgcgttacgctaccgaatctgacatacacagagtcatatgactcagtgcgtgttcgttgaagctggttagggcgcggggggaatatacaacatcgccagagacgtagttaagttcccgcataggatatataatgtctttggaatggagacagatgatggcgtcgagagtatgctacccgactcg

SEQ ID NO: 499155 - DNA, 745 bp, Homo sapiens
  misc_feature (733)..(733): n is a, c, g, or t
  misc_feature (741)..(741): n is a, c, g, or t
gggactgcccaagaactatcaagggccggagcggacaacttaatatgactagcttacacaatagctgttatgacaaaaatacctcatagaataaagaaacacctagaaaaaacttatgcaaggagagccaaagctaaaacccccggaaccagacaagctacctaagaacaccttaaagagcacaccgggggggggaaccaaatcgaagggaagatttataggaaaaggcaataaccttggcgggcctgttgacccatgggtgttcaaaattgaaaactttttgagctggagagccgatttcagaaccctttggatcctttggcctataagggggtgagttcaaagaggggcggccctttttacactacggagagacgtggaaaccccgagggaatacccaattaacccttgttgggacaaaaccccttttcccagggggggggattaaggaaaaagcccccccccggtcccttttccaaaagttggccaaacctttggggagggggaaattggaacgcgtataatttcttaaaaaacccgggttaaatctgtggaaaaaaacccttttttttaccaaaaggggcgaaagggggggaaattccctttttaattaaaaaaaaattccccacaaaggggtcgctgttttcccccgtgggaaacacaaatcctcttttaaaaagagggccccccaacccaaaggggggaccctttttacgggggggggccccccttnggagcctnccct

SEQ ID NO: 499156 - DNA, 456 bp, Homo sapiens
cttttagaagtttgagaccagcctgggcaacgtggcaaaagcttgtttctataaaaaaatataaaaacttagccagccttggtggcaccacctgcagtcccaactattcaggaggctgaggcgagaggatggcttgagctcaggaagtcaaggctgcagtgagctgtggtagtgccactgcactccctcatggttgacagagcaagaccctgtctcaaaagattctaatatagatactctttttatgcatatgtaatttatatatattatacaaaatattatttgcatttaacatattctgaaccaatagtcttttctacaagcagaacattagtattcttgtcactctgaatgtaggcacagatttttgtcattctttatcttttttgtgtgtgtgtgacagggtctcactgtcaccaggcgagattgcgcccctgcactccagcctgggccaca

SEQ ID NO: 499157 - DNA, 150 bp, Homo sapiens
acggggcgttgccctgatatcgcataccgtgacttggttttatgttgatcacagcctcaatggagacttgtataagaattttattacttttttattaaaggcttctaagctaactttacctcacggtatatcagatcacagcttaccttt

SEQ ID NO: 499158 - DNA, 1140 bp, Homo sapiens
actagttctagatcgcgagcggcgcccttttgtttttttttttaaaaatttttacatgtgttttattatccgtggtccccagaggggggtttatccagaaaccaagaaaaaaaaatcaactcagaattaaacttcaaaaaaaaaaagggagggggggagccaaacgcgcattcacccacgcagggcggaccagggcgatgtaggccgcacctctcacacccttctgggaggggtcccctagaagaccacagccgccgagacccaagaccccgggagggagacgcatctcaggacacggggggcgccaacggggagagagagaaaatctcggggaaatatgtgctcttcacattatattagagagaccgccggagaagacagcacgcgcgcgaaagagagatatattcggtcgcgcataggggcgagacatatatctatctatctcgatctattatcgatcataaaaaacctccgcggaaaagaagctatcaaacatcaacgacgcgtcttacacacagctgaggcacacatgtctcctctcggtgaaaacagacgctgtttctacaaaaaatttcgctatatagcactctctcctacgaaaagatgcggcttctactctcatagagggggcttcagtggggggggagcgaaactttataagcatataatatgtacctctagcgggagcaatcctgaagcgcagtcagcaaacgagagggctcgcataacaatcaacacccacactatgtgatgtaaatatacacacagggcagggcaacctagacaacgagaaacaactcacgcaagaaacaaaacagatatagaaaagacagagacagcaaacaaaaagaaccaaagaggcaggccgcagggaaatacaaagggacggcagaaacgagagagtaggtgacaaaggacaaaacaacaaaccggaggcgcgcagcagcaacagcatgcgacgacgagaaagcaccccaacaagatacgaccgaaggaggaaaccaaacaaagtgcaggaaccccaacatatgaaagaggagcgcgacgcaaaaattaatacaaacaacagcacgacgcgcgcgggggcgagcgcgccgataaaaacaacaaaaccaacgcgcaaccacgcagaggaaacaa

SEQ ID NO: 499159 - DNA, 272 bp, Homo sapiens
gttattgagagtgccacgggtcagaagcaggggcatcatgagaccagaatgcctgaatcatccacttgcatagctggactctctgagcctcgggttcatcaaatcataaatggcgatatatcatagggcttgttgtgaccgatgaagtgagataatccacaatcagggttaagaaagtgcacttgtacatgcagtaaatattcacgacattagctcctattacaggtaaatcaatcttttatcccaacaaccacaagggataatacagcttt

SEQ ID NO: 499160 - DNA, 245 bp, Homo sapiens
gggggtctgtaaagccagcccgcagttataggtcggcttagcagagtaacgaattaaatcaggtggttcgcttccagccaatcacccagcatacgatgccggcggcatcatccaggcgggaaacacctcgatttgccccagcagcaacagcgtaccgcttactaacagtgtagcgccaacgccgaacaaataacgtgactgcccctgacgaacccgctgagcctgcatttggttggtcagcttat

SEQ ID NO: 499161 - DNA, 330 bp, Homo sapiens
agaccacttgacattgacttagccagaaataaaccacctgattcgagatcaacacaacacccaggagctaattattagcatcatccctctactatagctaaccaaatcaacaaccacctatttagctgttccccaaccttttcctccgaccccctcacaacccccctcctgatactaactacctgactcctacccctcacaatcatggtaagccaacgcccacttatcccgtgaaccactatcacgaaaaaaaactctacctctctatactaatctccctccaaatctccttcattctgacattcaacaccattgcaacacggtctctca

SEQ ID NO: 499162 - DNA, 967 bp, Homo sapiens
  misc_feature (294)..(294): n is a, c, g, or t
cttggccccttctggggacccctcatataaggtgctgcctttatatttggcgtgtccccaggggtccggtccccgaaagtactttggctgcgtggaagatgagcccgttaattagggagtattttaaaatgagctgatgtagatgctttgctttgtaggtatccttaagaaatgccccctctgcgagaatttttcttcgtgggtcttctctcctcgtgagctgtgcccagctgcccctatcgagctggggagtgccgtgctaccgccttctgctctccccctggtctcgatggnccggcatgctctcctcctgcagcctcgggattaggttggttgaagccccccaggagcctcactttgtttcttgaagaaaaaaaccttcttaccgccgtatggctgccgccccggtgtttgggcacacaagaggggggtctcctgctccccagagggggaatccccaatcttcgcttaaccattaatcttgaagagtttctcctccgagtgtgtcgcgctacccacagagaggcgttttttcatgatatcatcctcggccccttggggaggggaagtcttttttaaaagaaaaattgggttaccccacattgtgtgtgaaaaaagcttgtccgcgtcatatctagcttgttctgggtccaccgctgaaaacattcctggcgccctccttcttatctaatccgagtagagtgagttgtctgcttcccgttcttgcaaaaaaagtgtcgcccaggtgattaatctccaaaaatcgtgttagcccaacaagcccgcttatagtatgtttttaaagaacgggagccccccccttgtgtccatgttgtttatacgaaattactttgcggacgggtttgagtacagcacatcttatggtaggcgacggagacaacaacggagataggggggcgaccccaaaaaaaaacgggacaaacccctttttttaaaacaccccaca

SEQ ID NO: 499163 - DNA, 213 bp, Homo sapiens
ggtgcggacacgcatgtgcggctctagtgggttttctgggccccgatctttgcatgtggctgagcaatgcggaatcgaccaaagctcactgggtggtgtgaccaggtgtctgcggtgggaactgagtgggccaggacatgctgcatgtatgtggacaaatgtctgtaatagagactgtgagtgtccgaacatgaatatgcggccagatgttta

SEQ ID NO: 499164 - DNA, 975 bp, Homo sapiens
gaaggagctgtctgacgtcgctcaccgcatcgtggcgcctggcaaggggatcctggctgcagatgagtccagtgggagcattgccaagccgggtgcagtccattggcagcgagaacaccgaggagaaccggtgcttctaccgccagctgctgctgacagctgacgaccgcgtgaacccctgctattgggggtgtcatcctcttcacacttgagacgactctaccagaaggcggatgatgggcgtccctttcccccaagttatcaaatccaagggcggtgttgtggtggcatcataggtacgacaagggcgtggttccccctggcagggacaaatgggagactacatccaatggttggatgggcttgtctgagcgctgtgcccagtacaagaaggacggagctgacattcgcaagtggccgttgtgtgcgtgaagatatggggaacacactcccctcagccctcgctcatcatgggggacatctgcccaatgttctggcccgtttatgccagtatctgaacagcatcaatgtgcattgtgccatcgtggagtctgagatcctccctgatggggaccatgaattgaagcgctgcagtatgtgacgagaaggtggtgggtgtgtctacaaggtctgagtgaccaccacatataccgggatgcaccttggtgaagtcacatggtcacccaggcatgtttgactacagaagttctctcatgaggagattgcctgggacgtcatagggctgtgccgccagtgccccccgatgtacttggtccctctgtctgagcaacgtgaggggggttcatcagctcagcgatacagaggcctgtgacccgggctgactcccaagcagagcgaggttgcggagtgggaaggatcagggcgggataaaacggcaaggcgaaaacggcgggggtgaccacataacgaagtggccacagcccaaaggagggcaggggtgccacaaagtagaac

SEQ ID NO: 499165 - DNA, 451 bp, Homo sapiens
gggaggaatactatttgcgctaaaatatgaaaatactgatggtaattgttttttttgtttggtgtttttttttttgggagatggagtctcgctctgtcaccgggcaatgggcgccatctccactcactgcaacctccgcctcctgagttcaagcaattcttgtgcctcagcctgccaagtcagacctctaaaatatctaagtcctttactgtgtatgacccatttaaattatttaaagtcccttaagtaaagatccacaaaattgtatagaaatatattgtataaatttatcactgaaataaaacaggaagtaggttggtgacactgttatctattcattcatcttacctagcacaattgagtttatatataaggatgaaagctctttaataataaataggtgagctggtgccagtcttcaggccaatagttagataacactgacaaagca

SEQ ID NO: 499166 - DNA, 223 bp, Homo sapiens
ttagcttaaactccaatacagatacctaacttacaatggggttacatcctgatgaatccttcataaatttaaaatatcctgagtcaaaaatgcatttaatacacataaacctactgaatatcacagcttagcctagcctaccttaaatatgctcagaacacttacattagcctacagttgggcaacatctaacacaaagcctatcttatagcacagtgttaaa

SEQ ID NO: 499167 - DNA, 176 bp, Homo sapiens
tgaacagataggagacaatgctgggtaaccagctcttatgaactcgttgacgctgaggctatccttccggccctcctgcctatgacaaaggtgaagaaggtggtgaccacggtctcaatggactcctactagctctgtcagatggttctgctgcatttttcaggggggaacagggc

SEQ ID NO: 499168 - DNA, 105 bp, Homo sapiens
gaccaggctaattatacaagctcatctgcctacgacaaacagacctaaaatcgctcattgccatactcttcaatcagccacatagccctcgcggttataatgctt

SEQ ID NO: 499169 - DNA, 318 bp, Homo sapiens
aatgcaattcagctctgggggcttagtggctagctctagagtgctggaggggacttcacccctgtctaaatccttctagcacagcactttggcgtgtgccaagattccagcctgactgcaaggtgactgtggttgctaacacggcgaactcccggaagagtaccttggtccagccagtgagggctgctcccagagctgacttccctttcctccctatcgtgggtttaccccactcgggctttgtgtccctgaggagcgcatcttccccaatgtgcatgcgcatcaaagcgtacctactctagactcaatccagctata

SEQ ID NO: 499170 - DNA, 700 bp, Homo sapiens
tgtggtggctcaccaccacgccccggtaatataattgtattctaagtagagacggggttatcaccatgttagccaggatggtctcgatatcctgaccttgtgatccacccgcctcgtgctcccaaagtgctgggattacaggcgtgagccaccacacccggtcggatcttaatagaatctttaaaaaaaatgtattcatttatttttagagacaaggtctcactgcatcacccaggctggagtgcagtggtgtgatcatagctcactgcaacctcaaaattcctgggctcaagcaattctcctacttcagcctcttgggtaggtaggactacgggtacacaaccaccatgcccggctaattgtttaattttagagatgggggtctcactgtgttggccaggcatggtctcaaactcttggtctcagatgatcctcctgtactcagcctcccaaagtactgtgattacaggcgtaagccaatgtacgcaagccttaatagtattattaatatcctttaatgtagtcctcaagaattaaagtgcattagttagtcaatattgccttaaaaatacattaaggtgattatgcagttcttgcatctgatagccctagagctgaacgtagccagatggtggcaatccttggcatacacatagcaacactcattgaatacattgggattcaaggcaattcttcacca

SEQ ID NO: 499171 - DNA, 1050 bp, Homo sapiens
gcacatatttccaaattatatggtggtcctcagaagtaggtgataggaagaaatacttctcaagggtgcaaacaatgcagagtaatacaacttttaacttggaggaagcacaaccatactccaagaaagcatcatcaacatcaccaccagcagcagacaccaccagcagcaacagcagcagccgacgaccaccgccaatacctgcaaatgggcaacgaggcctagcagccaatgatgaaggcttgcactgattggacctgacagcaatcttgcagcaaacacccaggagagcacgaccttccaccccaacgaagccgtctctctcctgtcgggaaatcttcctcccgacattcactgagcgcaaagaacatggaggaacctcatcctcgagccatatggcaacaggccagggcgaccccgttccacttcataagtgataaaaggatttggcttcatccagctcgggacaagccgaacctctagcggcgcatcgccacaagcgggagctggacaaatatgccactccgtggcaacagcatactggcgtgtgcgctttgcctgccatagtgcacacccttacagttcgaacaccttcctcacgtcatgcgtccccacagaactgactggaagaacgcacctctgtgtcaaggccacagtagagaccggccggacccacgtgcgggactgaagccgcgcgaacgcccaccaggccacggccactcgagaccgtgctaagcgtaagcccagctgccaaggaacgcctctgcacggcatggaggagaaaagcgccttaccggcgcacagcaatccatgccctgaggaaatggacgacaacggacagagctcatgagaagaaggactcgtccgaagcggatcctgcaaacccgcactccaagcgacgcgacaccacgcaaacgccgaccgtccgatcgagctctcatctcccggcacgcactgagctaaccaaccacacgctcacccatgcgtccacacacaataacaccgcccgccacacacacagagcaacgtaactagacacaacaataagac

SEQ ID NO: 499172 - DNA, 861 bp, Homo sapiens
  misc_feature (311)..(311): n is a, c, g, or t
  misc_feature (655)..(655): n is a, c, g, or t
gacttttgaaacgcttggggggaagtgctgtggagccgctgtggttgctgtccgcggagtggaagcgcgtgcttttgtttgtgtccctggccatggcgctgcagctctcccgggagcagggaatcaccctgcgcgggagcgccggaaatcgtggccgagttcttctcattcggcatcaacagcattttatatcagcgtggcatatatccatctgaaacctttactcgagtgcagaaatacggactcacctttgctttgtaactactgatcttgagctcataaaatacctaaataatgtggtggaaccaacntgaaaggatgggttatacaagtgttcagttcagaaagtggttgtagttatctcaaatattgaacagtggtgaggtcctggaaagatggcagtttgatatggagtgtgacaagactgcaaaagatgaccagtgcacccagagaaaagtctcagaaagctatccaggatgaaatcggttcagtgatcagaacagatcacagctacggtgacatttctgccactgtgtggaagtttctgtgtcatttgatctgttgatttatacagacaaagattttggttgtacctgaaaaatgggaacgagtcgggcaccacagtttattaccaatttctgaggcaagtccggcnttcgttcatttactactacaatccacaaagtaaataggcgtggtgcctaaaaaatttctgtcaatgactggggcgcactgtggaaccacttcgtctggcatagcaaagtgtgtccgacaaccgcatcaatacgcggaggcgtaccctgcgcttcttgggcaccccagtgttttggcgggtgatgcccatatgccaatactacggcc

SEQ ID NO: 499173 - DNA, 334 bp, Homo sapiens
  misc_feature (44)..(44): n is a, c, g, or t
  misc_feature (96)..(96): n is a, c, g, or t
cgcgtgctttgttgtgtcccctttgggccccaaattggcctgcnttgccagtcatccttccccggggtatgcagggggcaaaatcaaaccccctgnccgccggtggagcgccggaaatcgtggccgagttcttctcattcggcatcaacagcattttatatcagcgtggcatatatccatctgaaacctttactcgaaggttgccaaggaacacattaacctggggaaccttcaaacccctttggccttttggtaaaaccttaacctgggaatctttggaagacctcccaattaaaaaattaacccttaaaataaatgttagggtgggaaaaca

SEQ ID NO: 499174 - DNA, 180 bp, Homo sapiens
  misc_feature (26)..(26): n is a, c, g, or t
agttattttattgttcaagagctcgnatggcaagcattaaaccaagcatgggcttggattctgtgagcccaaattcacatatggaagaagatcaaagcaaacgggtgatccagtgtacatggatgacaaactaaaggcttcgagttaactcacgatgtgtgagtttcttaaagttctctc

SEQ ID NO: 499175 - DNA, 274 bp, Homo sapiens
cgttgagatacaggccatggccggtgctcatctgtacatgtccgtcagctaggtcaatagcattcacaacattgtgccagccatcatgactgtcaagtattcctacctcagttagagtatatcctggatcattcaagattgcatccttataagcagccttagtccccaaggcgatcatcgctgaagatgtagcagtgcacgcagtcgacactgagatacaggatcagaatgtatagtgtaccagccgcttgtatggtattacggccaatttatc

SEQ ID NO: 499176 - DNA, 617 bp, Homo sapiens
  misc_feature (3)..(3): n is a, c, g, or t
  misc_feature (99)..(99): n is a, c, g, or t
  misc_feature (303)..(303): n is a, c, g, or t
  misc_feature (409)..(409): n is a, c, g, or t
  misc_feature (413)..(413): n is a, c, g, or t
  misc_feature (417)..(417): n is a, c, g, or t
  misc_feature (592)..(592): n is a, c, g, or t
  misc_feature (613)..(613): n is a, c, g, or t
  misc_feature (616)..(616): n is a, c, g, or t
aanaggaaacccagatccctgcccctcctctggaagagggggcctgggccaggaagccccttccataggtcccagcagggaggagagtggacccctctntgcccagagagcaaggttccaggctccaacaacagaaagaacatgcagggaggagcgggagcagaggcctgtggctatgggggaggaaaagtgggaggaaagggcactgcctgaggagtccgggagtttgggcatcccggggatgcacgcaggagcttccgggcataaggggcctgcccctggctggttagcgcttggacagcncgtgggaaagcaagttcagaccatcgtacagacctgttctttgggtggaaaaggtggcctggacaaaccaagtgcggttgcgtaagtcctgttgccccagcttgtnagtnagcncgctcacgggcatggggtggggcatgtcctgcttgttggcaaaaaccagcggccctccatcccgcagctcgtcctcctgcagcatcttctggagttcatcagcagattcttggacccgctcccggtcataactgttcaccacaaagatgaggccctgagtgttctggaagttgtnccgccacaaaggccgaatctngtnc

SEQ ID NO: 499177 - DNA, 958 bp, Homo sapiens
agtaccggctgtagtggcctggggccgtggcgggagagtcatgtcatgagccgcagccgtggggcgcagagcgcggatctctaccgggacacgtgggtgcgatacctgggctatgccaatgagggtgcgcgaggtttccgctctcttgtgccagcggcggtggtgtggtgagctatgggcgtggcgagctcctacgtgctggcgggatgcattgacaatgggcaagacgggctggagaagggtcggtggatttcctccgtgactccagcctgcgcaatctctacccaacaggtggggggaagcccagctcctcttgatcatagctcttggtacctggcctgtgcaattcggcctccttgttacatgtcaagctcatacttcttgcaaagtgattgtggaacacctggctccgtgtgttgtccaaaggacccttgtgcaccgtgcgtgggtgtgagctggacagaagctaagagaccaacgtgctcaaggacgcaggtggctgcagggagtcacagagggcaggacctgagcgctgtgtgctccctggaattccaagatgctgacgtgaaaggtgaccccttgtgtgggcccggaccgtgtctttcagggaaaatgtaacattccctccccattggaggcttgagaggacttgctgggctcagggggagggcaacggtaattagggcccaaatggattcagtttggcaacgttggtcacccagtggacccccaggtgtgtttgaaggatttctcccccctttgttgttttggcgtactcgtgggccgggggacactcacgtgcaacccccgcaggtgggtcacagggaccccttggaaaaatttttggcggggccttccggagcaaaaatcgtccggtcaaagaaaaaagggggcgcaaaatctcagggcagatatgcacgcttttagaggccggagcataacagggggcaaggtgacg

SEQ ID NO: 499178 - DNA, 434 bp, Homo sapiens
  misc_feature (1)..(1): n is a, c, g, or t
  misc_feature (30)..(30): n is a, c, g, or t
  misc_feature (32)..(32): n is a, c, g, or t
  misc_feature (56)..(56): n is a, c, g, or t
  misc_feature (58)..(58): n is a, c, g, or t
  misc_feature (60)..(60): n is a, c, g, or t
  misc_feature (62)..(62): n is a, c, g, or t
  misc_feature (152)..(152): n is a, c, g, or t
  misc_feature (175)..(175): n is a, c, g, or t
  misc_feature (181)..(183): n is a, c, g, or t
  misc_feature (214)..(215): n is a, c, g, or t
  misc_feature (218)..(218): n is a, c, g, or t
  misc_feature (220)..(220): n is a, c, g, or t
  misc_feature (238)..(238): n is a, c, g, or t
  misc_feature (272)..(272): n is a, c, g, or t
  misc_feature (290)..(290): n is a, c, g, or t
  misc_feature (295)..(295): n is a, c, g, or t
  misc_feature (309)..(309): n is a, c, g, or t
  misc_feature (312)..(312): n is a, c, g, or t
  misc_feature (316)..(316): n is a, c, g, or t
  misc_feature (320)..(320): n is a, c, g, or t
  misc_feature (323)..(323): n is a, c, g, or t
  misc_feature (353)..(353): n is a, c, g, or t
  misc_feature (355)..(355): n is a, c, g, or t
  misc_feature (370)..(370): n is a, c, g, or t
  misc_feature (376)..(376): n is a, c, g, or t
nggagcggccaagtgtacttgcggaactgntntggatgatgagcagcccctgcgcngncntncctggcagggccagtgacaaggccctgagctttgtcctgaaggaaaatgactctggggaggtgaactgggacgccttcagcatgcctganctacataacttcctacgtatccngcagcnnnaggaggaggagcacctccgccagatcctgcnnaantnctcctattgccgccagangatccaagaggccctgcacgcctgcccccttggngacctcttgtacccccangtggnaggcagacagcagncancgcnaagngcntgccgtgtgagtgtgacagggccagtgggncntgtggaatgagtgtncatggnggccctcctgtgctggggggaatgaacccagagaacagcgaagtaagcttgctccctg

SEQ ID NO: 499179 - DNA, 815 bp, Homo sapiens
  misc_feature (553)..(553): n is a, c, g, or t
tttgcccaccggaccataccctgccgccaacccggtcccgggtccgggacagggcagtccccaccgggaggggagcccctaaaggagccaggagccccggacgcagaatgcgtgaatggaagagaactttccgttgaactgcgtaactaccaagaacactattgcgcgcccgcaggatgagattccagaatatgaaggaggaaatggctcgtccacctcgggataacccacgacccgctcacaagttaagatggccctgacctgagattgccacctacagggagctgctggaaggcgaggagagcacggatttctctgcctcttcccaacgtttcctcctggacctgaggggaactaatctggattcactccctctgggtgatacccactccaaaaggacacttctgattatagagcggttgaaaactagagaatggacacggttatccacgagaacttctcagcatcacgatgaccctggataaaaattgcacaccactccagtgcagccatatattacccgccaggattaaaaaggaatcccatatcttanagaaaccagctttcaagtgcccttctgccagtttttcaggagcgccagatagatttgggatagggataagctctagtttttaccaaccggcactcctaccagatttaggaaaaagtttaccacataatttaggttaccaggaaaatcttgttgctaggatacttttttaaaggtattttggatacccttaaactgcttttttttttcccgccagtatcccacccacttgtttctgcttccataaatctttgggaaaactcca

SEQ ID NO: 499180 - DNA, 891 bp, Homo sapiens
  misc_feature (534)..(534): n is a, c, g, or t
tttgcccaccggaccataccctgccgccaacccggtcccgggtccgggacagggcagtccccaccgggaggggagcccctaaaggagccaggagccccggacgcagaatgcgtgaatggaagagaactttccgttgaactgcgtaactaccaagaacactattgcgcgcccgcaggatgagattccagaatatgaaggaggaaatggctcgtccacctcgggataacccacgacccgctcacaagttaagatggccctgacctgagattgccacctacagggagctgctggaaggcgaggagagcacggatttctctgcctcttcccaacgtttcctcctggacctgaggggaactaatctggattcactccctctgggtgatacccactccaaaaggacacttctgattatagagcggttgaaaactagagaatggacacggttatccacgagaacttctcagcatcacgatgaccctggataaaaattgcacaccagacgccgtggcacggcgcacatagagttctgcgccnggcacacagagagatatatagaaaaagaggaaagtccgcctattttcttaagaacaccagctgttccaagggccctttctgcacaggttttcacaggaggcggccacggaatatagatttcgggaataaggaaataaaagctctaagtttctttaccaccccggagcacctccttagccacagaagttttatggggaaaaaagggttatccaccacaaaaatctatggttaccaggaaaatcttgttgctaggatacttttttaaaggtattttggatacccttaaactgcttttttttttcccgccagtatcccacccacttgtttctgcttccataaatctttgggaaaactcca

SEQ ID NO: 499181 - DNA, 443 bp, Homo sapiens
caggagcttgtaattctgcaccacttggaccagcccattgggagttacttcagccgaagccgggctgtggataatcaggtgatattgtggccacatgctctctccttgtcccggggatgactaaaggcctcactatgttgcactggtgggacagcagcaccggtggtgaaccctttggggggacggttctagccaaaggctggcgcagaatgaagcaagcgtgtattcagacatagacctgaagaagctggctgaaatgcgccgagcaaatccccgtatattaagacagaatgctgatcagacctctagtgctgtggagatgaagaaagccctaaagtttatgtatctaatgtgtcactagaagtaggaccgactatgattctacaagcataatcaactccctattaagttctttagatgaatgaaaagacaataaaaattcg

SEQ ID NO: 499182 - DNA, 528 bp, Homo sapiens
ttacgattactgccagcctttcctttttcttttttggtctttgtccgtatagggctgaacccacggcatatggaagttcccaggcgaggggtcgaatcagagctatagccaccagcctacgccacagccacagcaacccgggatccgagcctcatctacaacctacaccacagctcacggcaaagctggatccttaccctactgagcgaggccagggatcaaacctgcaacctcatggtttctagtcggattcatttccgctgcgccacgacgggaactcccttttcttttttctttacctactttactttatacagtacatgacttacacataatgtaatatacctttctctctctctctttttttatatattaggggcctttcaggggctgcacccacagcatatgggggttccccaggcagggggtcaaatcagagctgtagccacgggcctacacaacagccacagcattcgagattcggagccatatcctcgacctacaccacagctcagggcaatccgggat

SEQ ID NO: 499183 - DNA, 363 bp, Homo sapiens
  misc_feature (26)..(26): n is a, c, g, or t
gggagaccgagccttgctctgttgcncaggctggagtgcagtggtgtgatcttcgctcactgcaacctccgcctcgtcggttcaagggagtctcctatctcagcctcctgagtagctgggattacagtcgcctgccaagagatggggtttcgccatgttgaccaggctggtcttgaacacctggcctcaaatgatccactcgccttggtctcccaaagtggtaggatgacaggcgtgagccaccgcgcccagcctcttctattcttttagagacagggtctcactccgttgcccaggctggagtgcattgatgtgatgtgtgatcatagctcattgcagccctgaccatccgagctcaagcaa

SEQ ID NO: 499184 - DNA, 1095 bp, Homo sapiens
  misc_feature (279)..(279): n is a, c, g, or t
  misc_feature (403)..(403): n is a, c, g, or t
atcgacgaaaagaaccattgtacaagaatttggagaagtgaggctgctgacgatgggaaagggctccttcaagtatgcctgggtcttggataaactgaaagctgagcgtgaacgtggtatcaccactgtgatatctccgtgatggaaaatttgattaaccatgcaagatacttatggtgtacgtatcatttgagtgccccaggagcacagagactgttatcaaaaacactgtattacagggacatcctcacggctgtactgtgcgtgtcctggagttgntcgcgtggcgtggctgcttgggtgacatgttgcatagactggttatcgtccacagaaactggtgcatgcacccgacgtagcatgtccctttctgcgtcttacacactggcgttgtgcaaacaanctaattgtcggtgttcaacaataactggcattgccacgtgtagctcatcgccttactaggccatgaagaagcatatcgagggataacttcgcttaagggatatgtcaatgtcacgtatacgaattataggacataattggtggcgtagctaacccccagaacacgaaagtactcactccatgattgccacacatatcttctagcgtttgtggcaacttgtggtggaacaataacaatgtcataggaaaagacccaaaagattggcctaattagccaattgctcattatgtcgtggacaaaggggcgaattgcggcaaaatgttgccaacccccggttaaaacggggattggggcaaaattggcgccaatgttcgggaaaacccagctggtcataggctttagaaagcagttccctaggtaatcctttaggcaattacccttatcacaactccataaacttgccgattccctagagggttagtaacaaaaggtccgcacttttggcacggcctctgtagccactttctttaccccaaagggaattagggtcttaaaccaaaaatatcttcgggttggacggtcacatttggggcttaaacctgggttgtgccccctagatatcggcgccccagaaggttggggcaaccaactttggcgtagagtttcatttcaaaaaaagcccccggggcaag

SEQ ID NO: 499185 - DNA, 311 bp, Homo sapiens
accaggcggaagaggagcgtccagtaagggggcaccttggcggactcctggagccccgttgaccaccgagattgtgattagcttcttgaattcacaacagcacggagcccaaagctccaacagcgccagggccgccaagcgggccggcacaagcataaaagaaggaaaaggagaaggcccagttgcagcagagcttaaagcaggcaaactggttttttgaagccggagccaagccttcaggagagcctttgagttgccgaccggaacttgactggatacagcatcctagcagcgcttcagagactaaacac

SEQ ID NO: 499186 - DNA, 224 bp, Homo sapiens
gatcccaatgccatcttcctgagcttccaacacctgctccgaggaaaggggcttctggattgttggagacaaacttcactgcctcagccagaacaactgtctaaacttctgaagtggcagcagggattcagagccaagattcctgggctgctgaaccaaacctccaaaaccctgaccaaaaatacccggatacctgaacagatacacgaactcttgaatagaac

SEQ ID NO: 499187 - DNA, 307 bp, Homo sapiens
aagactcctagtgcgcacactgtcggcggctgaacagggagcccaaggccagcaggatgccgggtgtagaccgaggccttggcgaaggtggtgtacggaatgacatactctgggtagacctggtgtttctcaaagatcacaaagatggagggatcggacacattgttcacgcagcttatcatagaaggcgttgtccagccctccttgggcggcggacggacaataggaggcattggccccgtaaggaattcgcccaccagcacccgggccaggaacattcgtgtggagtctgcgtgtcggattggca

SEQ ID NO: 499188 - DNA, 698 bp, Homo sapiens
  misc_feature (1)..(1): n is a, c, g, or t
  misc_feature (47)..(47): n is a, c, g, or t
ncaaccccatggaccaagtagaaagctagatcagttcaggcgacttntactagcaataaggtctcaaacagtccatgccaaagttcatgaattaataccccaagagtctaaatttactgaaaaatgacgtgtcataccagaaccagtagcacctctacctgaattagcaatgcagtcaagcatggcttcgtggctcattcctgtaatctcagcactttggtaggctcaggtgtccggtaggtcaggagttcaatcccagcctgggcaacatgatcaaactggctctctaatcaaacttgacagcattccgtatgagctgtctgtagtgcctggcacctgtagtcacagctactcaagaggctgaggcaggagaatcgcttgaatccagcagtcagaggttgcagtgagcccagatagcaccattgcactgcagcctgggtgacagagtaagcctctgtctaaaaacatagattgcaggttcatgagtcagactctctgggttcgaatctcagctctgtctttaacttgcccgataaccatgggcaacttccttaaggaattttctcagatgtaaaatgcggatgagtacagtaactacttcctcaggctgtcaggagtacatgagataatgtttgttaaatgcctctcgcaatgtctggtcaatagttaatttataaaagcagttacctccaccacca

SEQ ID NO: 499189 - DNA, 155 bp, Homo sapiens
gccagtacggatgtgcgggccagtacggatggctatggggaagggaatgtattagtaatgcatgggggagaggatgccagcaggcacctcagaggtgacatggacaggctgtaactccccatgcttactaatacattcacatccgtagcggctcg

SEQ ID NO: 499190 - DNA, 188 bp, Homo sapiens
gagctggcccgcggttatgtttacgggggacaggcatgccgtcagcatgggggtctgccgggtgcatccgctgaccagcctgcgtggacgtgcgcctgcatgcgtgtcatgcggcatgtgtttgtgtgtcagtgtgtgtgccggcaggcgcacacgtgtgtgtgcttgtgcgtaagacataaccgcgg

SEQ ID NO: 499191 - DNA, 471 bp, Homo sapiens
  misc_feature (8)..(8): n is a, c, g, or t
  misc_feature (425)..(425): n is a, c, g, or t
aacggggngacaattcgcgcagccgatcgcacaacgcttggaatcggcgctcgtcttgttcgacgagttgtcccagcgcgctgtagtgcgccatgcgcggcagccgcccggcgagcgcggcgccccacctgatgctcaggtcgtaaacccgttcgtcatcgacgtcctcgcgccccccgagtcgttcgagcgcctcgatctgctcaccgacgaacgcaaggtcgtcagtgatgtcgatccgttcccggccgggggatgccacgctgcggcggataccctgccgcggcctcggttacacgccgcgccgcggcaggggcgcgagatcaggccgagacgggcttcttggcggccggcgcggacaccttcatcagcttcatcaggttgccgcccatgatcttcgccttgtcctcgtcgctgaaatcggncagctcgtcgacgaagctgatcgggtccttcaaaccctcggggtgc

SEQ ID NO: 499192 - DNA, 842 bp, Homo sapiens
  misc_feature (686)..(686): n is a, c, g, or t
  misc_feature (750)..(750): n is a, c, g, or t
  misc_feature (754)..(754): n is a, c, g, or t
  misc_feature (770)..(770): n is a, c, g, or t
  misc_feature (777)..(777): n is a, c, g, or t
  misc_feature (780)..(780): n is a, c, g, or t
  misc_feature (789)..(790): n is a, c, g, or t
  misc_feature (794)..(794): n is a, c, g, or t
  misc_feature (798)..(798): n is a, c, g, or t
gcacggtggcttggcctgctgtttgggcctcttgctccccgggatgccagccgccatgttgtgaggacactcaagcagctgcagggtgagaaaccgacacctaacaaccacggcctggtccacaggatcccggggaagccgtttctgaattcctgaactacagacaccgtgaagtcatgaatttgtttagtttttggtttttgaggcagggtctcgctctgttgcccaggctggagtacaacggtgcgatcacggctcactgcagcctcaacccctgggcccaagccatcttcccgcctcagcctcccaagtagctgagactataggcacgcaccaccacgcctggctaactttgtaattttttgtagaaatgaggtctgtgttgcccaggctggactcaacctcctgagctcaaatgatctcctgcctcggcctcccaaagtgctgggatcacaggcgtgggccatggtgcctgtcatgaggtcttcactgttgggttgagactctgcatttggaggtggtttattaggcagcaatagagaaccatggcagcaaatgttatcatttctgggatactgagggtaagcgtggctgtcatccaggaacaggctagaaggagactctggaccccgggccgtcagggctgagtgaccctcatccgtggtacctcaaggctctctggaatnctggggtctctgttggacactctgcgtgacaccctgtggttcctggagaaccctcctgctgggntcancacacggctcgccggnggcagangancacaatggnntganaagnagagcgagggggaagacatacaagagacacaccaggaacaggga

SEQ ID NO: 499193 - DNA, 256 bp, Homo sapiens
ggagtcagcggaggctccgtggccacccacctccgttcccaagcagaccatggcctgaaatctctcgttcacaggcactctaacagcccacactggtagtccagaagctgaaactcactagaagcagctaagttgatatctacatgagtacagaaaagtcacttggcctctctgaatctcagtttgctcatctatcaaatggaaccagcaggaagtagggcagtaaatcattattcacacaagctccatttctctg

SEQ ID NO: 499194 - DNA, 1248 bp, Homo sapiens
gacgtcgtttgagtcgtactgctgcctgctgacgctgccactgccactgccacctcgtggatcatggagccagcgttgttcgcccgacgcctcgctgccgtgtggtgatgggaacgctgagcatggtgaatgccgcttgcggggttttgtcgcctgcttgctcgctccagcctgactggtatgtgccgagccccgtgtccagtctggtacgctttgccacctgatctgtagcctgttacccgactgtggtctgtcgacttgtctgccggccgcgggacgaggcttctgctgccattggctctctggcagcccgaattcgaaaacggtgactgcacctatccaacgaggccagttctcaatgacagacaggaacgcgtcccaattcgcgttaactctggttgatgaaggcccatcaagtgagtgacaatcagtcgtggttgtcctttgtacccaggtccgcaaagatggcatgcaactttgcacgattcgttgccgacgggtgaccacacggttgtttggctgaatacggaaaacgcacagacgaccccactgaagccttgtattgcagtccggcctatctcgtggatgaatacctcgcttcctgactgcagacacgaatatcgggaatggcaataggacgtgtgtatccgcggaattataccgtttctgatggtatacaggccatatgggggacttgctcaaatcaaggccattcccatgtctccatttgcccctgaattgctgataagcttaccgtgggcaaaagatccgttagttccccagtcgcttgcgcataggcgctcaaatattcgatttgacccaacgaccgctgggaaacaggcggcctactttaccgctcgcggttacaactccattcattatccaggaagtggaaatattaaccccgttataaacggccccggttcaaccagtttccccttgggtcaaaacgcacggataagtttcggagagccaccctatgttccccgcaggcatcaacagtgcgcatcggcacgattatttgtagtatccattgtgggctccccctggctgtggtgcatatgcagggagacagttcgcacaggctttgaacattcggtcggcgcgaaactgttcctcgcatcagaagcgcttggagctgctcgcggccaacaaacgcgcccgtacagtccccattaacgggccccgcgtgctaagcttagtgcacgattttgtggatatagtgtcccccaactgagactcaatcag

SEQ ID NO: 499195 - DNA, 177 bp, Homo sapiens
acacagtatggtagcttacgcacaccattggatacctcagccaagcacatacaccagaatgacatagaaccatagcggtatcctctacgtactagagcaggattaccatggcaacaacacatcatcagatagggtaaaacataacctgtctcacgacggactaacccagctcacgtt

SEQ ID NO: 499196 - DNA, 343 bp, Homo sapiens
aaggtcggggtatttttccgtctcaccaattatctttttacacacacatccagcgtacgccctcatttcttgtccatcgcccagaagctgattctcttgctttttctttcttgaatggcagcagccacgtccaagggctcccactgcatttcacgccccagctgacaaccaactggcgcgagtgaggcaaagagagaaaaggagagaacacaaacttgtggctggagagtagaggctgccacctgctccctatggacatttgcacatgctggtgaatgactggaccctccaggaatagtgccctgatccatagccccaaaaatgtatccaagtggagaacatg

SEQ ID NO: 499197 - DNA, 149 bp, Homo sapiens
ggtttgcttaggcgcagacggggaagcggaccaaacatgccagtggcccggaggctgggtttgtcgcaaaacttatgttgaaccccggggagacccttcgaagaaatctcgtttcggaccaagagctgaagctgtatcggcgagtatgg

SEQ ID NO: 499198 - DNA, 214 bp, Homo sapiens
cggcgggctgagtgttgtcatgtattccatattcccgttcctcctacacaccccagttcaaaggtggaacccaagggtgatgggattggtcccacccgaccagccccctagtcagtgcttgggctaccccaaatatcagaagtcgttgcctcctacgtttccagcgagcagcagcgaggagcagctcctgatagcagcagcatgcagcacctag

SEQ ID NO: 499199 - DNA, 260 bp, Homo sapiens
tttcgtatccagcgctggacgtaatacgggcctgttgtccctgaggccacacgatcactgtgtctctatgatgccaagaaggggtcctctgggaagacgtagaatggccggagacagagaagcccacggagttcccaggtgtggctgtgtagggaatgtcctctgagtgggggatgtgcaggaagcccaccgtaacccaggccaccaggtcctcattttcaatgttctcgttgtagtgaaagaaacttgctcaaagaaca

SEQ ID NO: 499200 - DNA, 415 bp, Homo sapiens
ctctagagtatccccgtgtgctctggacacctttgctcaaatattacctttccgttagctacctccctgtcctccctggctagagtcttcttatccttttctagctcattgcactgtctctttccttgttattttcttgttcattcataggtgggtgtgtctgtggtctgcctccccagtgtcaaagacaagctccacgaaaacagggagctttttcgacttcaccatttcatccttagtaactggataatgcatggcatatagtgggctcttattaaatattttaggaaataagcacataaggaatgagtgaattggtgagttatgttgtcccagagaggttgcctgcaccatatataactagtcatgcatgtgacctttgaaaccatagctagtaatggctattttttgcact

SEQ ID NO: 499201 - DNA, 134 bp, Homo sapiens
catgaagagtttgtgttgttatgttgttagtatcacaatcctcaaacctcctgccgcccaatatcgagtcaaaaagaaatacactaaggccaaggccaccttacatacaacgatcaatcctggttgatgcgctc

SEQ ID NO: 499202 - DNA, 362 bp, Homo sapiens
cgtgaaagatgcgacaccggcagtcccacactctgtggacgatggtcgaactcccgcccagcatgattccgactcgcgcctcggaccggttggcgagcgccaaccgcggtcaaccgtcgttcgaaggtcgtcgacgcgccgattgaggaaggtctctctcatgccgccccagcccacggtgaggccccggaaggtgttggccaacacttacactcccgtcgtccaccacgtccggaccaagcagacattgcatatccaccggctcgacaactagcggtaggtgacgctcctcccgatcctcccgtggatgcagaatcatttggccaattggacgtcacgcggcgtgcgtaggattagacttc

SEQ ID NO: 499203 - DNA, 356 bp, Homo sapiens
aggactttgggttcctgctttgttttggggtccaaaccttggtttccctttggtcctggtgggagctccccctgcctttttcccctatttagctccttagcaaaaagaccctggcctcccctttgccctttgggtccaaaaaaggaataaaaaattccgtggccttgggggcaggaaaaagcccctctccatgaacacttttccagccccctcatacccccttcccagggtaagggcccccgaaagcccagtccccttttcgcctcggtaaaacctgtttgatgccccagattttatttattttcccctaacccagggcaatgtcagcttttggcagtaaaggggcgctccaacca

SEQ ID NO: 499204 - DNA, 465 bp, Homo sapiens
agcgggcggcgatcgaggagctctgcggacgccaagctgcgcgggcagaagcggtccggggcctccggggcctccgcggccccgcaatctccgcgaggacgcatgcgttgaggtacccagcagcagccgggacacggagcacctggtagccagagcacgggagcgagagagaaaggcggtggtagaagcacagtcgatcggaggaagtcgcaggactgaggcgcatcgagaggcagcgtgtcccgaggaggatggtgcccggggggaaaaccgtcagtccggcccgtagaggcctggagggtcgtatctcccgaattaccgtgcgggcagagcgtagcggagaagagtatccgaatgacgtcgcgagacgagtcgcttcggaggatatgaattcatggagagcgatggttctaagcaagagtggatagagacttgttgacaagtgacaatagactataattagat

SEQ ID NO: 499205 - DNA, 249 bp, Homo sapiens
gcaatcctcaaattctgtccacatgtaagaaagggagcatctcaaaaccatgaggaagggcagtgtgtgcatgtgcaaggatatgtcttctggatcagcaaacactccagtatgcatatctatcagagtgagtgtgtgtgctgaatggactgtcagccccaagctgtctgtcctgaatatccgtatgtcctcatgaatgtctctgtcccttaaatgccctaactcacctatggctgcgtctgagtgatc

SEQ ID NO: 499206 - DNA, 369 bp, Homo sapiens
tggcatgtgatgaggcatggatgtttgcacagacgtcactattcctgatgggagacaggagctggatctgggatcagcagtctggacgttacagctcatggcacaactggcagaaggcgctggaatccaactgccaagcactgctgctgctgctgccgacgacgacgcccaggctgctgccttgcaactgaatggagcagttcccttgggtggcctgactccagcagctctgactgctctgagtccagccctgaaactttcctcccaagtgtagcagctctccagactctataccccccagaccatgtaaatcagtggcacagtatactgactccttgtgcctctggatcctgacaataaaaatctact

SEQ ID NO: 499207 - DNA, 210 bp, Homo sapiens
  misc_feature (31)..(31): n is a, c, g, or t
  misc_feature (66)..(66): n is a, c, g, or t
  misc_feature (70)..(70): n is a, c, g, or t
  misc_feature (183)..(183): n is a, c, g, or t
caggagggctggttccaccacctggcccggnatgccgtggcctgcttcctgacccgcggggacctntggntcagctgggagagcggggtccgggtatttaatgagctgctcctggatgcagatttaagcgtgaacgcaggcagctggatgtggctgtcctgcagtgcttttttccagcagttnttccactgctactgccctgtgggtttt

SEQ ID NO: 499208 - DNA, 104 bp, Homo sapiens
cgctccatcttacgattatacggtgctcacgtgtcgagcggaacttgtacagggaggcatgcaccgcagtggtgaatacacgtcgacctggatccatgtttgcg

SEQ ID NO: 499209 - DNA, 127 bp, Homo sapiens
gatagaggatacctaatacagtgtcgtgaagacacagcaggacggctgggagggagcacctggcacacgtaagtgctccatcagcatcagctgctggaaggattcattcaatttctgcagggtgcag

SEQ ID NO: 499210 - DNA, 390 bp, Homo sapiens
gttttgtatgatgcaacctagagccgactgcctcaagggaggctgtctagggtctgaccccgacattctctcccccatgcagcctctccctggggcgccctaagcagttcaggcacctgcaccctgacccttcccacacagtcctgtggagacatgcacttaaccacagtttccaggaaagaaggcatcacccaagagggcaccccgggctgcagaattagggcaggaaagagtgcccttcactcaatacccggaacagagcacggggtccaaggatcaagggaaatgggcacgagacatcagttctgaagagaccagagctggaaatagtcctagatgaggcccctcgggtggcccggagaccaccgggtttcccttttgactctaatt

SEQ ID NO: 499211 - DNA, 139 bp, Homo sapiens
cagtcgcaagtgtggaaccataagtacagaacgaagggaaaacaaaatctgacgcattttctcagagttaggattgttcttttgaaaatcttgggccaatctgggatgaccgagatttgtatcctcttaccagtttttt

SEQ ID NO: 499212 - DNA, 103 bp, Homo sapiens
cagatcatagctaatcgacactcttctatatcatatgcctttacaatatatctatcttagtaagcagtataacaaggctgttcttggtatgaacaacagtgca

SEQ ID NO: 499213 - DNA, 1258 bp, Homo sapiens
gagagaactagtctcggttatattgatttttatttaaaaacctgaagcgcgaccatttctttattaacattatacacaaaagggaggggagggggcgcagctgtggaggctcggccaaaacccggctcccaacccggcactggcgctgctcttgaaaagaggggatctgacgggaaatccagggatcaaggcaggataggagatgcggcagcgacatgaggctggggagatcgcagaggttcaggtggcgaaagcgctcaccgcgagacaaaaatgagcctgctcaccgcggccggaacaaaacaagagcaaaaagcagcagacgacgccaagccactaatgaaggcgcacaaactacggcaaccacatccaaacatggggaccaaagacacaacgaaagggcggaaaaaaacgacaaaccaaacgacgaccatgaacaccggcccaccagaatccgaccaaaagccataaaaccacacaccacagagttgacaagaaaaaaggaaaccagaaaaagaaacgaaatataaaccgaccgagaacacaaaagaaaatagaacaaacgaggatgacaaacgacggcacgaacaaaaagaaaataaaaacagataaaaacgaaagaataaaaaaaccacaagcacaagcaaccaaaacacaggacactaaaacagaaaaacacaacataaaataaacacaccaaaaaaagaaaaaaataaccgaaaacaaccacacagttaaacaaatataaaaaacaattacaaaaaaccatcacaatactcaaaccaaacaaaataaacaataacactaataactcaaacacacaatacacaaccaacccaaccaactacaaacagaactccataccaatgaataacaccacacactcaacccacaaaaagcacagaagaccagagaaccgacatacaaggcacgtacaaaaactgaacagaaagacgagacgagagaaggacagaagccgaatcacaagacaaacacataccaaagtgacaacgctaaatatacaatacagacaagaaaaaaagggagcgaccccgacacgcgcaacaaacaacccgaatcgtggcacacaagcagcgcaccaggagagcgcaagacgcgaagaacgcgccaggcgcagcacatccgcgtggtcacgtacaaccgacgacggtagaacaagaccatgcaggaccatggcgaccgcgagcgagcgaggggaaggaacaccggagagcagagaacagcccgccaaatacga

SEQ ID NO: 499214 - DNA, 122 bp, Homo sapiens
agtaggcgacgtacaggcgtgcgcgcgacctagctaatcgatgtgtgtggtcggtagagataggatttcactatgttgcccagggctggatcttgaactcctaacctcaagtgatccaccca

SEQ ID NO: 499215 - DNA, 302 bp, Homo sapiens
aaaatacaatgatgagacagttataggatagacgttcccatcacaaaagggaaaaatcggaaggaatgaaggggtgatggatccgaacaagtcaaacttagcaaggcaaatttccattcaatcttaaggttggagaataattgtctttcgcttgaataatcctctttgccttgaataatcctcgttgactttccaggcctggggttggcagcatcactgccacagctcttcagggtggccccccttgtggtctctgaggcagctccactttttgaaccaagcaggaagagcctcaccacctt

SEQ ID NO: 499216 - DNA, 445 bp, Homo sapiens
ctggctaaaagggatcagcacagggagagaaacaggataggaaagcataatggcgagcagcctatggcccacggcctgtaatcccttcccaagactagctgctcagggtggtgcagggacaggaccataccctgcgcctatttcctgccttctttcccctatagggaactctgtaggctgagccactgtcctgctcttatgacattatatcttgggcctttttcttaaccagtgagcagggggcctcctcctggcccaggccttaggggaaatggatcagcctttgaggttcttatttggggaggggagtccttaaaaaaaatctaaaaaacccttccttatggcccattccccattttaagggatctcctaaattattaaaccttctcaaaggctggcggcctttttagttccccccccctaggaaaatgcccggccggggagg

SEQ ID NO: 499217 - DNA, 748 bp, Homo sapiens
  misc_feature (48)..(48): n is a, c, g, or t
  misc_feature (50)..(50): n is a, c, g, or t
  misc_feature (74)..(74): n is a, c, g, or t
tgacgccggtgcagcgggggggcccgtgtgtgtggcccccctttgtgnantgtgccctggtgctggggaaccgncgggtgtgggcatttattcccccccagggaccccggggagggcaaaagggggggcgaactttaatacatccccctgtgggatttgcgccaaaaccgcgggggtttgtgtgggatgcgggggccccaaaagatgttttctccacccgcccgaaatgtgggtggggagagcgggcgcactgcgtgcggatgggaggggaacccacaccgcaccacatgtgggccggacgcgcagggaagagcgggggctgtgggggaaaatatttccccacgtagtgggcgccccatatggggggggctctgtggggtgccccagcccccacataggaggaggatgttaggggctggggaaaaaaccccgtgtgtgtgcgtgtggcgccccctttgtgggcgggtggtgtggccaccttgtggaactggggtgtggggccccgaccccctagagagctggtgagaaactcgggcgccccccattttctcacccacggggggcgccggcggtgtcgcgcaaaacagcgctgcgggcccccaaaaaaacagaggtggggggaccccgcgcggggagaacgggggcggcgcaacctttataacaaacgggcgcgggcaaccgaggactttgggcggcggaaaccttgtggcgcccccccctaggagtttccaaaaccgccaaaaaaagg

SEQ ID NO: 499218 - DNA, 254 bp, Homo sapiens
ggatggtgtgtgaggctcatggaggaaatacagctgctggcaaagaggagaaaagcagctcccagtcagacaagccagccgagaagaaggaagatgaaagccaaatggaagatcctagtacctcctaaaaatacaaaattagctgggtgagttgcacatgcctgtaatcccagctacttgggagcctgaggcaggataattgcttgaacctgggaggtggaggttgcagtgagcctagatcacaccacccatca

SEQ ID NO: 499219 - DNA, 112 bp, Homo sapiens
tagtaaccctatccccctttttaaatagacacttcctctttttctgactgtttcctggtacttgaattgaagttctggctgggtgcggtggctcacatctgtgatctcagca

SEQ ID NO: 499220 - DNA, 128 bp, Homo sapiens
aggaatggaacagaatgttgccttatttgtctagttctgtattacatacccatagtacagttttatagtatgcatcagataaaagtgctatatgaacagttaactacagtagtctgcaagtacagttt

SEQ ID NO: 499221 - DNA, 109 bp, Homo sapiens
agaatctgactctgtagaccaacatccagtgtgattttgtgtctgagaccacaccccagtagcaggttacgccatgtacaccagagccccatgtgactcccacgagggt

SEQ ID NO: 499222 - DNA, 237 bp, Homo sapiens
gtgccagcctcttcaccactccgcctcgatctcacatgactttcagacacaagtaccatgtcattggtttggagggaaagagtagataagataggttggtaagataacaggtttcaacattacttgctgtttctttaaacaaacagtgatgtcactgcctaaaagaacaaaggtgccttctaatagcatcatttaacttttaggcagtgacatcactgtttgtttaaagaaacagca

SEQ ID NO: 499223 - DNA, 129 bp, Homo sapiens
cctacagcccacactccacaccggtggcaacgcctgatgaaggcaacgttcccgccacagcatccacacttaaccatctccaaactgccactgcatgtgaagaaggagccatctgcagatctgccatgg

SEQ ID NO: 499224 - DNA, 266 bp, Homo sapiens
ttggcaacttcactgcacctggcaaaggagaagggtcagtttgaggtgtgacccagtttgctccagaacgtataaggggtctgaatctcatctccatggacatcttcaacagcttcacctgacaacgactgttcctatgaagaagccacttgtgtataacgcagaggcaacctctctcttctcctctgtttcgtgaaggcaggggacacagatgggagagcattgacccacgccagccaatctgtatgctaaatcatggtcatcaa

SEQ ID NO: 499225 - DNA, 336 bp, Homo sapiens
  misc_feature (130)..(130): n is a, c, g, or t
  misc_feature (179)..(179): n is a, c, g, or t
  misc_feature (243)..(243): n is a, c, g, or t
aaaatttatgcaaaattactttgacagacactgctcagtgggtgctgtgggttaacccgaatgcctcctgtccttccaggttcctgctaggccttctgaaagcaaagtgttcctcatttctaagtctttnaggaacatgactttcttgatctgctgtctttatgtagctatgaggcttncgattggttatagaaactaggtgaataattcttggaaacattcaaggttaatctttaaaaaacnaaaaccaaactaatatttaacagcccattaaaaacatccacatgaaccaaaggaaaatactcaatttcaatacaagcagaaggaaaagcgatc

SEQ ID NO: 499226 - DNA, 350 bp, Homo sapiens
  misc_feature (97)..(97): n is a, c, g, or t
  misc_feature (100)..(100): n is a, c, g, or t
aaactttttttaatcgttgtaataattgtataaaaaaaatcgctctgtatagttccaacttgtaagcatgtccgggtataaatcccttaaagccaanctnaccaaaggaagtaagaaaaagaaataaaaccagtcctcctcagccctccccaagtcggttttgtggccccccgcattcgctgtgaggtttgtttgtccggttgattttggggggtggagtttcagtgaaaataaacgggtctgcctttgggtgtgggtatatatacaaagaaatgtacatatgtgtgaacccaattgtccgagaaagtatctatttttgggtaaataaatgagctgctgcccctttgcca

SEQ ID NO: 499227 - DNA, 635 bp, Homo sapiens
atgtgcgcatgtgtaccagaatgagaatgaggtgggggtgtgccattcatgagaagctcagtggtagcaggtgggtgaagcggtgaggagctctttatcgtctgcaatctgtggtgctcgtaccatgagaagggcctggtgaacggagcctgccgagtaaggacagctcagcgaccattgaagctggactatctggagcctctatcttattccactggggcgactggttttacagcctgggaaggaattttcccattgatgagtcgggcaatgtggttcccagtgacaccaaattctggaacgtgggcggcatggaagagctggtggatgaagggctggtgaaagctatttggcatctccaacttcaaccatctccaggtggagatgatcttaaacaaacctggcttgaaagtataagcctgcagttaaccagatatgagtgccacccatatctcactcaggagaagttaatccagtactggcagtccaaaggcatcgtggtgaccgctacagcgccctcggtctcctgacaggcctgggccaagccccgaggaccctttctctcctggaggatccaggatcagggatcgcagcaagcaccaataaactacagccaggtctgattcggtcccatg

SEQ ID NO: 499228 - DNA, 101 bp, Homo sapiens
cttttggggtctttgctgaaactggattttacgatgtctctctaagatggacctaggggaaggctcagaagcctgactaaagtttgactaagcaaagaagc

SEQ ID NO: 499229 - DNA, 640 bp, Homo sapiens
gtggcgctgcggagacccggctccagacgcctggcggccgccggcacacaacggcgctttctagctccctcccccgcagcgcacagcccgcctccttccgcggcgcctgcagctggcagcgcttgctctgccctaccgtgacgcgctccgcgagacgctctgcgggctcctggcacaccgggtccgcggcgtggcggacgcaccgcacggagcgcgcacacgccactcggctagcccggctcccgcgagcccatcgcttcggcggcgcacgtccctctccccgcgctggccctcctttctccgcgcggcattcgccaccgcttccctgcggctgcacgcacgaccgcgcttcgtcgcctccttgccccgctgaccgctcgcctagcaactcaccttgctgcgcttcgcggcccagtccccacctgcctgaactgccaaccacacaatgctcaccctcacctgctcactcaccaacccgcacacctccaccgcccccagcacccgcgcctccacttcaacactctactcctgctctccacaacctccctccctaccgctgcacaccgccctcactcaccctcaatcctcttcacccccaccagcgctctctccactgacctccttctccatcccccaaccc

SEQ ID NO: 499230 - DNA, 225 bp, Homo sapiens
cgtatccagcagtcgtatgtcatccagaaaatcggcgaccttttggttcagcagttttcaggtgaaaatggggagagattgaaagaaaagtacggtgtgttttgtagtggccacaatgaaactggtagtcattacaaggtggtggttcagcaaaacaagaaatttcaaaacttgatcaagaaaattggcaacttctccatcgtgcgactgcttggattacaagga

SEQ ID NO: 499231 - DNA, 311 bp, Homo sapiens
cacgaggcatcctatacaggtaaagagctagttaacatttagaaaaggttcatatttaaataaatttcaagaaaccaagttaaatatttttccaggtaacaccaactaacatccggtgaaatctcggggaaacagtatctcatggctaattagatagccatccggtcttactaaggtccaacttttttttttttttaaaggaccggggtctggttctatcacccagggcggggagtgcagggatggcaatctcaactcagggcaacctctacctccggggttcaaggtgattctcgggtctcgggggtacc

SEQ ID NO: 499232 - DNA, 204 bp, Homo sapiens
  misc_feature (7)..(7): n is a, c, g, or t
tgagganacccaaccctgccacccacagccagagtagcaacaaagatgatgtggatgtgtttgtgagacagctaagacagacagaagaggggggaattacttaaaggagagactcaacccaagttcgagcaatgtggaacaatatcaagcaatggtttctagtttagaagaatccctgaacaaggaaaaacaggtggcagaatt

SEQ ID NO: 499233 - DNA, 251 bp, Homo sapiens
atgaactcagccctgtactggacaaccagacgctgagcatcatggacttacactggcgtagttgctgctaacaccggattgaccattcatccagacgagctacccatcggagcgcctataactcgtgcactttttgacggacgctcacagtgttgattctataccccttgacactgactataagagtaagaacatctttgtatgccctgttgacccataccatgtctgttggcacagtcactgaggctttg

SEQ ID NO: 499234 - DNA, 288 bp, Homo sapiens
taaggctacattccagtagagaaatatattatatacactccacatagaatctcatttgaacacctagagcaatgtccagagtcctcactatcttacttaaaataaaactacagatacagtaaagatcaaggatcataccgtaagaacacaggccaaagttcggtagtacaggggaagagatcggaaccagcaaggatggcaggggcaaagggctcaagggtgaagaggacagtgggaccacacagagttggggagataaaaggaacattggatgctttggtggcaccg

SEQ ID NO: 499235 - DNA, 92 bp, Homo sapiens
gtcgccgcgccgggggatgtagccggcgccctgctctagccgcgccgctttgagtaccagccgcgctgcagccgcgcgccgctagccgtgcg

SEQ ID NO: 499236 - DNA, 153 bp, Homo sapiens
ctgtcgagcatcgaacgacatgtgtggactaggaggaggatataccatctggcaaaccacgcataggttaatacactgtgtgtctggggaatgacgcacagatctgattgacttgtataaaatagggctaaccacctaccattaacagtgtac

SEQ ID NO: 499237 - DNA, 141 bp, Homo sapiens
gtgcgtgaggatccccagtgcagtagcctcatcgggcaggctgactcaggggctcacgggcagtcaccaataacagcagaacagcctcgggcagaaggctggctgggagaccgggagatgccccagtccagagactgggat

SEQ ID NO: 499238 - DNA, 139 bp, Homo sapiens
tgtggttgtggtgcttgagtacgtctcttcgtgtgggtgccaagtgcttgtgtcgccactgtgttctgagcccccttttctggaccccactgtgtcctgtgactatatcgctactgtgagctgttcccgccctacccgg

SEQ ID NO: 499239 - DNA, 196 bp, Homo sapiens
cgatgcttggccttgcctcgggcctagtctcggagccttacctcggagccttatcctcggagccttatcctcggagcaggaggtcgcttcatatgtgctaggcacgaggatgtgcagggcgatggtagacaccaggcctgttgatagtgcccgagagaagtctggacgaggctgaccgcgcaggttaaggtctccg

SEQ ID NO: 499240 - DNA, 596 bp, Homo sapiens
cccataaaatgatactctagagtggaactatgacaactaccgatatctgttaacatcttagaactcacagtgtcatattggaacctttgcgaaagtctgagtagtggtacaacattaactcgaatagtaaacgtcaagaccgcaaaattgatctgttaatcagaattttgtctttcgtgttgatgctcacacttactccctgtgtgtcttggttatccgtgatcaattgacactcagagactagttagataagaaattaaatttccagaaaaagtcacttaagtatgtaaagtagaatttcctaattatgtggtctggaaattgctgatgtctacagaatctttctcaagtttgaagtacaaatacttgtaactgatgttgggtggtaaggtgaaagatggttctagctcagtgagtttttcttattttttttgcacaaaggagttgaacattgaaataaagaggtgtgagactggaaaataatgcggagagatcatggattatttagattagtgcctttctagagaagaggaaagtgaagtaagtgacagcataaaggatcctttatggtctaaccccagatcctttctctagct

SEQ ID NO: 499241 - DNA, 375 bp, Homo sapiens
taagaccgcacagctgcatcatatacaggatatccaatgaaggctatgggatgtaccttcctccccgagtagaatcaagtataaacggcaaagtagcctataccaaagtgcagattttaatatttcaaattcacttccttcccacataagaagaatgtgaagaggagaaaattattcacatgctcaaagttttagcaggtttgagaaatggttttggggtgattattttaaattataggctatatttgttctgcttaaaatgtttcaatcaaagtgacttgaaaggcagagacaactgcattaagatacaattaaaaacttatttgtgactcagcctatgttaaatactacaacttggaaaataaagcagttttc

SEQ ID NO: 499242 - DNA, 264 bp, Homo sapiens
aggcaatatataagatctgagtagctgggcatggtgtcgcatgcctgtaatcccagctacttgggaggctgaggcatgagaaccgctagaacctgggaggcagagggttgcagcgagccggagatcacgtcacttgcacttccaagcctggattgaacaggagcccagaaccccgtcttcaaaaaaaattctaaagaacaacttgactcagtttttgcagtaagagctcaatctccttcaaggaagaatgtcaaggttctcttt

SEQ ID NO: 499243 - DNA, 410 bp, Homo sapiens
  misc_feature (278)..(278): n is a, c, g, or t
  misc_feature (286)..(286): n is a, c, g, or t
  misc_feature (293)..(293): n is a, c, g, or t
  misc_feature (329)..(330): n is a, c, g, or t
gtaaaacagagggtggaggaaagcttttcctctctcaaatgagctttgcgaggtatacttcttgaaggataggaagttgaagtgttaggacttttatgtctattctactttggcttagtttacatgattcttagtttattagcctataaatggccaagaaaacttaaggttcaataattagttataaatatgaaatatccccaatttttaagataaaaacaacttataaatgtatttgtctgtaaaaattgtgtatatttttacagaacatctatttntttttttnttttttnatttttttattatactttaaattctagggtacacannacaatgtgcacatgtaccctaaaacttaaagtataataataataaaaataataatcatagaaaaataaaataaaattaca

SEQ ID NO: 499244 - DNA, 681 bp, Homo sapiens
tcctcctgaggagcacaatacttgggaccctgataaaaaacttggattgccctgagctaattcctgaatttatgaaaaacttttaagaagatgaaggagggtgaaaattattaaacccagggagaagctcagaaagtaacaagaggaaatccaattttctcaaacagtgccgatgacttcaaattctaaaaaaaacgagagagcagacgcaagtgatatcgctcggggctttgacgagacggactggacccagaaaagactcatgggggcaacagatccctgtggtgattaaatgtccctaagtgaacatggaaacgacacagattgaacgctgacctggtctcttgcaaaagaagctaattgtgaaattgtccacaaatttgtgaatagcatttttattgaacgagacgactgaccttggcatgcttatcctgaggatgcggaaaacacaagagaaagaaacagcaaagagctaaaggaggggatggctctcgtgtaatttctcttgtgtacataatacattcacctccctgcctcctctcctttctacccaaccccttttctatcctaaacactatccataaaaaatgtgctttatcactgtgctccacaggagaaacaaatcgaaatagtaatatactaaaaaccccgaataacagaatttgtcacaaaacaaagggg

SEQ ID NO: 499245 - DNA, 144 bp, Homo sapiens
tccacgttacaacctttacaggtgggccttcagctggttcgctacaacaatgtcttccacaactcaaacttccaccgcgctcacacaaccggttcacttcttgcttttcacttacacagcttccgacttcttcttgcagaggct

SEQ ID NO: 499246 - DNA, 404 bp, Homo sapiens
taatgcctcattaaccttactaagggcataagcccaaaaaaggcctttgagtagccatggtgaatgttacagactctgtgcataagagcataagctctttactcacagtagagttctccagatccttgctcagagcttatgaatccctattttaaacagagttgtatcaccttgttatctgattttttaggtctgcaaaaacacagggtagaagtgagtgggtgaaattctcccgagggtgcccacgtgcctggctttgttaagtttgggaattattctggatatatctgggtacgaatgtgtgtatgcaagcatatgtgtcgggcttctgggtatactcatgtgttggttataatgactttgtgtgcgagagtgtgtgcattagcatttccggcatctggcgg

SEQ ID NO: 499247 - DNA, 543 bp, Homo sapiens
  misc_feature (25)..(25): n is a, c, g, or t
  misc_feature (65)..(66): n is a, c, g, or t
  misc_feature (109)..(109): n is a, c, g, or t
  misc_feature (116)..(116): n is a, c, g, or t
  misc_feature (124)..(124): n is a, c, g, or t
  misc_feature (126)..(127): n is a, c, g, or t
  misc_feature (138)..(138): n is a, c, g, or t
  misc_feature (147)..(147): n is a, c, g, or t
  misc_feature (150)..(150): n is a, c, g, or t
  misc_feature (153)..(153): n is a, c, g, or t
  misc_feature (159)..(159): n is a, c, g, or t
  misc_feature (165)..(165): n is a, c, g, or t
  misc_feature (182)..(182): n is a, c, g, or t
  misc_feature (192)..(192): n is a, c, g, or t
  misc_feature (218)..(218): n is a, c, g, or t
  misc_feature (233)..(233): n is a, c, g, or t
  misc_feature (247)..(247): n is a, c, g, or t
  misc_feature (250)..(250): n is a, c, g, or t
  misc_feature (283)..(283): n is a, c, g, or t
  misc_feature (298)..(298): n is a, c, g, or t
  misc_feature (302)..(302): n is a, c, g, or t
  misc_feature (315)..(316): n is a, c, g, or t
  misc_feature (333)..(333): n is a, c, g, or t
  misc_feature (345)..(345): n is a, c, g, or t
  misc_feature (348)..(348): n is a, c, g, or t
  misc_feature (350)..(350): n is a, c, g, or t
  misc_feature (354)..(354): n is a, c, g, or t
  misc_feature (397)..(397): n is a, c, g, or t
  misc_feature (399)..(399): n is a, c, g, or t
  misc_feature (404)..(404): n is a, c, g, or t
  misc_feature (409)..(409): n is a, c, g, or t
  misc_feature (416)..(417): n is a, c, g, or t
  misc_feature (423)..(424): n is a, c, g, or t
  misc_feature (426)..(427): n is a, c, g, or t
  misc_feature (440)..(440): n is a, c, g, or t
  misc_feature (463)..(464): n is a, c, g, or t
  misc_feature (471)..(471): n is a, c, g, or t
  misc_feature (478)..(478): n is a, c, g, or t
  misc_feature (517)..(517): n is a, c, g, or t
ttttagaccaaaatcaatcgccggnaacaaacatacaatttttttcaacatctgtaaaccagtannattagtattatggtttttttcagataaaatatattttgtgaanaacttgnaatggcananntcattctggcntttcaaacngcnatntacggnatcacnaacatccctttatatantcaaatattnaagagaaaaaccgggcaaaacatttnaaaacagactaatantacaatcaagtatnggncttagggggagacatttaaaaagagtccgggangggcattaccagagngggntacaaaaccagtnnttattgggctgcatttntacagcattccnaangngggnaagggtgcatttttccaatgcactagcttcaaagttggggggnanggggnaaggntaatagnngctttnngnngaaagcagcgggncatttcacaggattgtttcgggnnggggggntattagnaacaatgctttgtttaatgcttctagtttagcggcaaanacaaaactaaaatagcagcaaattca

SEQ ID NO: 499248 - DNA, 184 bp, Homo sapiens
  misc_feature (112)..(113): n is a, c, g, or t
agaaggtaagggagtgggaggcaggtgggtgttctggagggggtatccttgtgctctaagggtgctatgttcgatgctggtgtttcggggatggtgaatgcccttctttaannttagagggaaatccaaaccaataggccccaaggttgccagtgggataggggtgtaaaaaagtaaattgggc

SEQ ID NO: 499249 - DNA, 657 bp, Homo sapiens
gggagatcctggctaaggtggttaattgtcctagacgctgtagagcaggcgtccccagcctggctgcccatgagaatgccctgggcagctttaaaaatcctgatgcccaggctgcacccagaccaattaaactaggatcgctggggtggcgcccaggcatgggaatgttttgaacttcctgggggtttctgaagtgcacgtagcgttgagaacccctgctgtgaaggggctgagagagagagagagagagagaaagaaagagagaaagagagcgagagagcgagagagagcgagagcgctcctggtgctctggggtggggaggggtgtcagggccgaggaccccagatgactggcatcccgccaggcaggggtgttggtgaggactcgggtgcacccatcgccactctgagcggtggggcgtctattaataattaacccggagttgagtccccccggagggcagagcaggtaggctggctcgagggtcccctctagtggtggatctgaagaactgcatgtgcaggctgcgtgtctggctgagattggcaggagggacaactcccccaccacacccgggggcctagggtcccccaggtatatggttattggcaagtagttcacagaagagctaggggttagaaagtggcagtatcccg

SEQ ID NO: 499250 - DNA, 350 bp, Homo sapiens
  misc_feature (236)..(236): n is a, c, g, or t
tcacacgcacttggaaaagcaggagctagagagagagttgagagagaggtaccatacttttaaacaaccagatctcatgagaacttactcactatcatgaggacactaccaagccattgaggggtctgcccacatgacctaaacacctcccgccaggccccaccttcaatacgggggattactgttcaacatgagatttgatggggacattcaaactatatttttctgcccctggncctgctaacctcatgtccttctcacattgcaaaatatagtcatgcctttccaacagtccctcaaagtcttaacttattctagaatcaactcaatcaaaaatcccaagttgcgtg

SEQ ID NO: 499251 - DNA, 624 bp, Homo sapiens
  misc_feature (21)..(21): n is a, c, g, or t
ttggcggctccattcaggggnggctcgctactctacgcttcctagcaaggtttgatggtccccacaaccctacatcagggcaggtggggctggtgtgggaggggctctggaggcctctgaggccagatgtgtaaacagggctgaggttcagtaataggatgagtcttcaggtgtggagcagcccacctgggctcttcccatgtctcggtgttacttctcatattcgtgtgtcctttcaaacttcagggacagtattaatttatactagtatttcttcctcagtttggtgactggaatgcagggagtgccttagaggatccagggatgacggaaggcgggtggggggtcctctctttcagaaggggaacttcccaagaggggggtggcgtctcgcctctcagtaggttccctacctcggggtcttccacccttcaaagtcgggtacagaattaagcaggggctggagggaatgaccctcagggaccagtttcacccagagggggtagatgatgaggtatacctagaagtagctcagggctccagagtcgggcctttcaggtggtgtcttactcccctttgagaccttcagcgtgttgtcttccagtggctgcatacttctctgat

SEQ ID NO: 499252 - DNA, 1229 bp, Homo sapiens
  misc_feature (343)..(343): n is a, c, g, or t
gctcttcagcctggcgtcatgtctaagtcagagtctcctagagagcccgaacagactgaggaagctcttcattggagggttgagctttgagacaacctggatgagcgagcgctgcaggaagccatctattgaggcacaagtggcgtgatagccgctccacggaacttggtgtggtgacatagcagagatccgaaactacctaagcgctccaggggctttgggtttgtcacatatgccactgtggtaggacggtggtactgcatgctatggatatgcgaagggcacaacaacggttggatcgagaaagagtttgtggagaaccagacgagatgctgtactccangaagaaagattctcgaagaggacgcgaggtgcgcgcacattaactcgttgaaaagaagaagattatttagtacgtgtggcattatacaggataggacactcgaacgaacatcaccataagagacttaatctgttgaagctagttcagtggtaaaagacattggaaggtgatccgaatagtccattgacatggagcactgacgggcatgtggtcggactgagagacacggggcctattgccgtttcgtaaacctgttgatgcgatgcatggacgtccggtgtgatgatgcacttggtcaattcaggaagatagacgatgagctgggaatttggtccataacctcgtgaagtgtagaaaatagtactgtcggaatgcgggaagagagtggcttagtgcattcattccatgtgcgaaaatgaaggtcgaaagttgggtatctagtggaaggactctttggtaggttggttggtggaatggctgggtttacagtgtgtggaaactcgcacaaatctttctggaacgaagcgaccggagaaacggttgcacttgggttccggctgggtgggactttatgggctcgggtagtacgatgggttgggctgggttgggatgaatggtgtgcgctaggtgcgacgattgggctagtatatagcgcatgggtgtgttacatcggatggggaagcgcatttgtgtagggaagagttggttagcggaaggcatagcgacgtggagtccaggagagaatcgatgtgaatacgtgcagtctttggcacaattttttgtgcgggcttggaaggaaggacaatgtttggcaagcggcgtaaacagtggggcccctatggggggtgttggccacaagttgcgcagaacaggaataacaggttgg

SEQ ID NO: 499253 - DNA, 352 bp, Homo sapiens
ctagctctgtcacctgttgggtatgcatcaatacaggaacggtccccagcgttggggacgagccccacagttgataactagtatagtgaaccacattgttgtactgaaccacttattcgatgactcgctgatcataaacaacctgtgtgtaatatgttttcctctaaaaacgtagcacccttcagcaggaccctataaaactttcctccagcccttgcctctttgcaggtagccccttctctgctgagctgcccactgcaacatattttcacaatttctctaataaatctgcccttctttacctacaactatcttggtaaatggctttaccacctgcaaaactgaccctagg

SEQ ID NO: 499254 - DNA, 680 bp, Homo sapiens
tcacaggttctttcacaggtgaaggatcagctggatctgctctctgtgagtggtcagaagcagttgcaggctttgggtctggagaggctgaagaagcagctgatgtagagaggtatgaagtgtgcaggaacactgcaggaacgagctgcgcgtctgttttctgttaaaggactgacccctgatcagattgatccttcactcttggccaaacccagcaagggcaagaagaaatagcagtccaaattcactgctgtgacgaaaaattgtttgaggaatttattagtcatcaattctgagattttaaaaatgtatcgctgtttgatttgaggttagtttttaacacagatggcgctgtgtgctttacaaacactactcgaagctaagtttgggaagttttttcctagtttgggaagggttaatgtgaatttcaagagtgtcaatagttggctgtatttacgttaatcttgtgacaagagccgacttgcattacatgctgaacactcaagggctcaaaagtttttgagtgtatagataaactagcctagagcactgtctgctgtttttaaaactagcctagagtgctgtctgctaataaaaactagcctagagcaccgtctgctaatataactagcctagaatgccgtctgttaataaaaactagcccatacaacaacttgtta

SEQ ID NO: 499255 - DNA, 1050 bp, Homo sapiens
  misc_feature (911)..(911): n is a, c, g, or t
gggtaaagtagccgccctccaagtacgcgggagaaggggaggaagtagtgggggccgctgcctccggcgtggaggaagaggcgcgggggtgctggtgaggaggacacacacgccggcggcggcgccactacgaaagaagacccccctcctccgcgacgaggtgtgcgacggaggccgacaccgcgtggtgaggagaaaagaaataaaacttgcggccggggagacgccgctcggcggctactaggtgtgaccccgcgcacgcgggaggccgccacactgctctgctgagttgtcgaagtgtactcttcttcacactgctggggagacgccccccacacacaggcggggggggccaccacagcaaagggcagtgtgcgtgtgttttctctcctggagaagagacacgactctctgcgggctttaagtatgggcgtcttatatgtagacatctgtcgagactcgggagaacactctcttgggtgtctctccctcagatgtcgagcgtgtgtctctgctctataagcgagagagagtagacacacactcgcacggcgaaaatttggggtgtcacttgtggcccacactgcttcacacgaccccacaaaattcgcagagaattcacaggcacacaggtgtaaagaagtatccgcgccagaacactgtctgtatactcgagaagcgctctagactcttcacacagagaagagaagagagagactcttcggtgagatagactccacgagacaccgcacgcgagaaggctggagagagttctctttcgagacaccaccggaaaatagagagagagaatatatgagagagatgtatctcggagagcacaggcgcacacagagatgtgagtcaccggagaacctggtggagagtctcccaaattggttgtccgcacaaantctcagaaggtatattctcctcagcgtccacagggcgtaaccctcggaaatttgggtttggctttgacggaagggaattatcctccccaaattgggggtttataaagtttttaggaccctatttaaaaaccggattcca

SEQ ID NO: 499256 - DNA, 414 bp, Homo sapiens
cccgtcacggatactcaaatctatctaaacatggacatctttttgaaggaatatttattacacctcctaatattaagatttctcagcaaagttggaaaatactgccatactgccataagcgttaactgagattactatgtgagccagaatatagtaaaatcacgcttattttaaaacttgcactacatttcacaacaaatgatctactttcataatctttacgtggaaaagtaatcttgctgagatcgtaaagtttttttctttcccatttacttcttctcctcccatgtatgctaggaatgttgctcagtagataggaaggggtggttaaggggaagtaaccaagaggtagatgaggttgaacacaaccaccactctccataatcctaaaaataatcctgcatcccacaaatt

SEQ ID NO: 499257 - DNA, 136 bp, Homo sapiens
ctctagacgatcccgtatagcttatagttcatccctacccctcatgcctgcgtgagtctgtacagggatatgtgtgtgtgtgtgtgtgtgtgtgtgtgtgtgttagagaggaagaggaagagcaaatgtctgtata

SEQ ID NO: 499258 - DNA, 1029 bp, Homo sapiens
ctggctctgcgcccagcccggctctgctgcagcgtgcagtgaggatagatgcctgcgcagcgcggactcgggagccccggtgccagcagcctggcctccggagccagccacaggcctccccgggcggcgcccacgctcctaccgcccggatcgcgcggatctccgccggctaccgatgccgcctgctcccggcccagaggcgacgacacgatgcgctgcgcgctggcgctctcggcgctgctgctactgttgtcaacgccgccgctgctgccgtcgtcgccgtcgccggtcgccgtcgccgtcgcccttcccagaatgcaacccagactagctacggactcgatctaacaaaaagcagcaccgagctccaggcattccagtgtcaaccgatcatggcttaccagattcagcccaagcagagcacaaggtccccaacttccacaggtcccaacggaagatccttgggccttcgggttcacacgggcgaagcgaaccattgggtggtatttcccggtggacttcgacggcgggacacctcacaagcctgggctttacacacaaggtctcttcaagggcccacaagtctcagcagactctacgcgtgtgcttagcaggcaggacagcctcagggcaaaccccgttatgttacccgacccgacttcggaagaagccccccaagaagaggcatacatagcatccggttgcagcgcaccaccccgagttaccggtttgggccaaacccttcacaacgatggcgcgaccgagggagttaaagaagccggtttaaacgaagcccaccatagagccagcggccccaggaagtttgggacgcacacagacgtcatttacccacgcgagaaacgttccttgggcggcggggacacaaaacgccacggccccacacagtgctgggttgtaccccaccaaggagacctttacgcatttccaactcttaaaggtggaaggaaaaacgtttcttgaacggaccccctttaaggccgttacaagttcccacattttagacgcccg

SEQ ID NO: 499259 - DNA, 122 bp, Homo sapiens
gttttgattctcttagttacataccatggggtggaattgctgggtcatatgtactctatgtttaacttcttgaggaactaccaaattgttttctgcagtaggagcatcatcttccatcccca

SEQ ID NO: 499260 - DNA, 287 bp, Homo sapiens
tactaggtataatatgcacaaccaactactccagctgacacaggatgccatcaaccattataatctatcgagcatactagatattctaaggctgatcaacagatagcaaagatggaacccttatagggaaaaaataaaatcccttctaccccagttttgacacatgttcagaagttataaaggaatgttaaattatttaagatatttcaaaaaagaattaagaatggaagagtaagttctgctggaaaagatagggcagctttacagtctgcaaagtagatcatcta

SEQ ID NO: 499261 - DNA, 179 bp, Homo sapiens
gctgctgacagtgccagatacttagggataaacatcaaaatgcaattatagttgctataacgttagatactcggaattcaaaactttactttggcaagctgaccttgataaacctaaattgaacccaattaacaattgtgtagaaatgtgctattccgtgaacatacattattatacca

SEQ ID NO: 499262 - DNA, 231 bp, Homo sapiens
aagtactgacagataacgatgagtaagatcccgtccactcatggaaggcttacgactaggggtagaaatgaagttattaatagctagacacatatcaattcatttaggtaggtctcagatataaactaacgtaccatcagataacccacattcaagagtccaaggatcacatcacttcctacagaggctgtactcctgaagctctacacctagcctgcctttcagcaggtg

SEQ ID NO: 499263 - DNA, 183 bp, Homo sapiens
cttgtcgggatgcatgtggtcacgttttttctgtgaacatgaactcatggcttcctgtgaaaataccaataccggccgtggtgcaattctcaataaaaaacagattccaccaggggcagctttatttggctttagccatctatatggtggtataccgggtggtcaagctgaatatgtgcggat

SEQ ID NO: 499264 - DNA, 160 bp, Homo sapiens
tcaatctcatgctcctgcactccgctcccggttcgacgcgattcttccgtctcagcctcccttcgtagctgggacccgaggcacgcaccatctcacctggccaatttgttgtattttcagtagagacagggtttcaccattgccggccaaagcaggtctc

SEQ ID NO: 499265 - DNA, 235 bp, Homo sapiens
gcttttgggtctgttacccaaagaatgataaagttggttttatttcaagaagtcggatcaaaaagaaagccccaacaatctagaagctcagctgcacgggaaagggggtccgaacctcgaagttttagagacctcacccgggagctcccaagacagggggtgggtttcccagctcgcccgcacgccccgacctttccatcgtaggagttgggggactcttccccagccagacacc

SEQ ID NO: 499266 - DNA, 244 bp, Homo sapiens
aggaggcggagtgagtgagctgagattgagccactgcactccagcccaggcaacagtgtaagactctgtctccaaaaaaaaaaatcagtcgggcacaggggtacctatagtcccagctactagggaagctaaggcaggaagattacttgagcccagaaggttgaagctgcagcgagccgcgatggtatcactgcactccagccggggtgacacagaccttgtctctttaaaaaaagaaagaaag

SEQ ID NO: 499267 - DNA, 1366 bp, Homo sapiens
aacacctctgttgttctctcaattaacagctcgggtcgcactcctcacgcttagtttatacttgccccggtcggatcaactcttttcaccacgcaagcgaccagatagtcatcatcagtagccacgcttgtttttggtggcacaccacattaaacaacatttttcgctcaacaataacaacgctcgttcgtccttcttccgtccataatattcccgcgcgtaagtttgttttttctcacaccacactttgttcgcctcacactcgggtggtcgtgcccagcggcccttgttgtgttgtggtgggggaatccacccttgtgtgttgtgtgtgtagtaggttgttcctcgctgtggtgtggcgggtggttccgtgccctatcgtgttcgttgtccccgccccacccttggtgggggcggtgggtcgcccgtcctcttttttcttgttgattgttgtcgtttctgttctgctgttctttcctcctcatcgtggtgtggccgcgtttgcatccgtcattctctcccacccggctcctgccgtgttgatgtggggtggggtgtctggtttttcctctccgccccctcgcgaggtttttcccggcacgtttattttgttttttggtttgccacgcgtgtgaggcgaggtgtttgggggggcgcgcgctctccctcccctctcttctctcttgttttgaattcctctctcttctccgctcccctcctctccaccttcccatccgtctttcttttcactcccctcccgcgcttttctcttcccgcccccctgttttttttgttctctcctcgccgttgtctccttcttcttctctctctcctgtggctcgcgcacacacacaaaggcacgcccccgccgcagagagggagcggccgcgcccctcgctcagagggaggtgcgcctttgtctttgtgtttctctctctcccccccactcccccctcactctccaaaataatatatattttttttatataaaaaaagaaaaaaaatcaaatctcaaccatcctcacctcaccctccccactgggcgccccccttcttttattgtctgcgcgcactctctcttttcttccccctatctctctcacacaacattctctctcttatataaattaaaagagagaagagagcccaccacaaaaataataaaaacacacaccaccacccctaatttcaccactctctctctttttatatatataaggagccgccgcgagcgagagagagagaagtatcattctttttttttttgcccccccctccccctctccccccttttttactcacccccccccccctcgcctctttctttttctatataatataaaaaccccccccccccccccccaca

SEQ ID NO: 499268 - DNA, 283 bp, Homo sapiens
tgtgggcactagaggatccccccgagcacagcggccacgcagtttatcgtaagcgatatagaggtctggggcgaacgatctaactatttaaatttaatgggttaggagccggtcgtgcgttgagccggcgtggattgcgagtgctaggtggggcactttttggtaagcagaactggcgctgcgggatgaaccgaacgccggggtttatggcgcccgatgccgacgctcatcagaccccagaaaaggtgttggttgatataggcgggcggcgctggctgggcgg

SEQ ID NO: 499269 - DNA, 116 bp, Homo sapiens
caccaccactacggtgaccaaccccaacacccaccggacacagaccccaacccgacacccatcaccagcaccaccacggtgaccccaaccccaacacccaccggctccgcgctgcg

SEQ ID NO: 499270 - DNA, 1090 bp, Homo sapiens
  misc_feature (285)..(285): n is a, c, g, or t
  misc_feature (387)..(387): n is a, c, g, or t
  misc_feature (421)..(421): n is a, c, g, or t
  misc_feature (440)..(440): n is a, c, g, or t
  misc_feature (485)..(485): n is a, c, g, or t
  misc_feature (506)..(506): n is a, c, g, or t
  misc_feature (525)..(525): n is a, c, g, or t
  misc_feature (566)..(566): n is a, c, g, or t
  misc_feature (703)..(704): n is a, c, g, or t
  misc_feature (711)..(713): n is a, c, g, or t
  misc_feature (802)..(803): n is a, c, g, or t
aattaggctaggtacgaggctgggtggttaatggccgagggcggcgccattaaagcgaggaggaggcgagagcggccgccgctggtgcttattcttttttagtgcagcgggagagagcgggagtgtgcgccgcgcgagagtgggaggcgaagggggcaggccagggagaggcgcaggagcctttgcagccacgcgcgcgccttccctgtcttgtgtgcttcgcgaggtagagcgggcgcgcggcagcggcggggattactttgctgctagttatcggttcgcggnagcgggcgggtgtagtctcggcggcagcggcggagacactagcactatgtcggaggagcagttctggctgggggactggggcggcggcagcggcaaacggcnggctggtaaggcggctcggcggggcgagcaggangggagccatggtggcggcngacacagggtgggcagctggcgtgcgggcgtggaaggcggagccngggacctggcgggcggaaccngtcgtctgggaggcaccgnaagggggcagctgccgagtcgcgaggggggccgaagattgnacgccagtaagaaccgagggagggatgaaggcctattcaaaactcctccccaacgaacactctggaaagcagcgaacggcacacgcgggaaagaatggaaacatgtgtttcataggaggccttagctgggacactannaaagaannnatctgaatggactaacttttccaaatttggtgaagttgtagactgcactctgaatgttagatcctattcacagggcgatcaagggcgtnnggctttgcgctatttcaagaatcgcacagtgtacataaggtcaggtgtccaaggacctaattgatggcaacgggatgagcctaacgggcaagcctacacaaaggccggttaaaaacctttggtgggggcctctcctataacctgaagaaacagcagaacgggggactgaagagggcgcccaagcccaggtaacagcaccaacgagggcgcaaaccccgaagaaaacaaacaatgagaaacaacggtgtgaagtagaaacagaggcagcaaaacaggagagctagacg

SEQ ID NO: 499271 - DNA, 1224 bp, Homo sapiens
  misc_feature (837)..(838): n is a, c, g, or t
  misc_feature (845)..(847): n is a, c, g, or t
  misc_feature (936)..(937): n is a, c, g, or t
aattaggctaggtacgaggctgggtggttaatggccgagggcggcgccattaaagcgaggaggaggcgagagcggccgccgctggtgcttattcttttttagtgcagcgggagagagcgggagtgtgcgccgcgcgagagtgggaggcgaagggggcaggccagggagaggcgcaggagcctttgcagccacgcgcgcgccttccctgtcttgtgtgcttcgcgaggtagagcgtgtgctgctgctgtgcagctgtgctgtgtgtgatctacttttgcattgcttagttttctgtgttctgctgtcgcagctgtgctgtggttgttagtactcctgtgctgtggcatgctgtgctgtgagcacaacctacgcaccatattagtccggatgtgaccgcatcgttcctggctgtgggtgacctgtggggcttggctgtgcaagctgtgcaaactgtgctgtgcctgtgtagggccgtgcttcctggctggtgctgaagcatgtgatgtggatggccatgggttgggctgtgcgacaccatgggttgtggcagctgtgcgtgtgcaggctgtggatcagctgtgatgcctgggtgaccctgtgtggtgctggaaaccagcagtactggaatgtgcaccctgaatgtgggtgggcatgcagcccagagtccagagaagtggtgtgcagacaggatttggatcagccatgtaaacgaaccgagggagggatgaaggcctattcaaaactcctccccaacgaacactctggaaagcagcgaacggcacacgcgggaaagaatggaaacatgtgtttcataggaggccttagctgggacactannaaagaannnatctgaatggactaacttttccaaatttggtgaagttgtagactgcactctgaatgttagatcctattcacagggcgatcaagggcgtnnggctttgcgctatttcaagaatcgcacagtgtacataaggtcaggtgtccaaggacctaattgatggcaacgggatgagcctaacgggcaagcctacacaaaggccggttaaaaacctttggtgggggcctctcctataacctgaagaaacagcagaacgggggactgaagagggcgcccaagcccaggtaacagcaccaacgagggcgcaaaccccgaagaaaacaaacaatgagaaacaacggtgtgaagtagaaacagaggcagcaaaacaggagagctagacg

SEQ ID NO: 499272 - DNA, 240 bp, Homo sapiens
  misc_feature (14)..(14): n is a, c, g, or t
  misc_feature (100)..(100): n is a, c, g, or t
  misc_feature (119)..(119): n is a, c, g, or t
  misc_feature (149)..(149): n is a, c, g, or t
  misc_feature (167)..(167): n is a, c, g, or t
  misc_feature (202)..(202): n is a, c, g, or t
  misc_feature (230)..(230): n is a, c, g, or t
  misc_feature (240)..(240): n is a, c, g, or t
atcctccacatctncatgtcgaatagctgaggaggagggggattggtcttgctgcctcaggtggcagaggtggaagaaaatccgtgtataagcagatctntgcagttcaaacccatgtncaaaggtcagctgtattcaaagtgggagtnttaggtcttctgcaagangtggctaagaatagtggggggaagagatactattnctaagtatgtttatgcttactgctacancactactttn

SEQ ID NO: 499273 - DNA, 298 bp, Homo sapiens
aattaggctaggtacgaggctgggtggttaatggccgagggcggcgccattaaagcgaggaggaggcgagagcggccgccgctggtgcttattcttttttagtgcagcgggagagagcgggagtgtgcgccgcgcgagagtgggaggcgaagggggcaggccagggagaggcgcaggagcctttgcagccacgcgcgcgccttccctgtcttgtgtgcttcgcgaggtagagcgcaccctctgtaactgccgcgattacttggctggttgactcggacacaggcattggctgctgaag

SEQ ID NO: 499274 - DNA, 897 bp, Homo sapiens
  misc_feature (44)..(44): n is a, c, g, or t
  misc_feature (112)..(112): n is a, c, g, or t
acgaaggtttcctgagctattacagaaaaactggcagtcctctncttggtaatctagctactgatgctgtgaaggaagctcagggcagccacacgaaataagcccatatggnaaaagaattgagaccaccaactaacagctccagctgagccaacaacagcttaccagccctgtgagtgaggccattttgaaagtggaccttccagacctaagctatgcctgatgaatcctgctcaaatagcaaaatcttgagcaaagaaatgattgctgttgttttaaaccactaagttttgggcaacagattatcaaaacagtaccccaatacagagtgatttaaaaatgagtgatgattcgcacaaataaaactggacagattctcctgatgccaaattacggacctcatatttccagagataagagtttgactgctttttgtcttttcacccagagggaaaggttataggtagactttttcagcaataatcctttctggaactctaaacgtgcgttttctattgtcaaggttcccattttgtagaagtgcctacattgccattactatcgagagcagaagtaggttacgccctgcctaggttaagccaatacaatctcgcgattttaccttgaaagggctttttagcggaaacttttgaaaccaaatcactaatctgacgatcaatctatccgtacccctaataaccaaaaaaaatactaccggacccttttgccccttagtcgccggaccctctccggcccgcttcctttcagtgaagggtgtactttcccacccctcccttccttcactaacatgagctcccgcaacaccggttgccgcatagctggtcattttttttcccacacgccgagtaactgcgtttcccccggcccccagcggtc

SEQ ID NO: 499275 - DNA, 177 bp, Homo sapiens
  misc_feature (177)..(177): n is a, c, g, or t
cgtgactggccgtcgttttacacaagccacgcgcccacacaacacactccccccccaacaactccatctttcacacgcaacaagcgctcacgttcacaacaccccaaccacctagcggcgccacactcaaccttttaccatcaaatcaccagccgataaataacaatacaaaaccan

SEQ ID NO: 499276 - DNA, 359 bp, Homo sapiens
gccctttaatggttccaaaccctaagtccccacatagcccctgggtttggcatcttcggagcccccctggccccgagctgcttgactcaccggcttcctatttgatgcacccaggcccccttgtggccaactccctccccttttcactgaggcagaagccctgaggtggggtggacatgggtgccctcccgtcccttcatatccccaggcccactttggcctcaggttttgccctggccatgtcatctacctggagggggccctcccctttttcgggccttgaatcaaaagcccctttgttagggggggatttcccagccccctcctcccattaaaaaatattttggaaacatgcagta

SEQ ID NO: 499277 - DNA, 438 bp, Homo sapiens
ggacaatctgccctctctcacgaccgggggtctcgaagaggacgggggtaggaaatcctccaggatctcaggaaatttcactcggcttcgtcctgcggcaagggtctcttgggtcggcagggtgttctgctccggcgtcgccgtggtcttcagcttggcctttgctcttgctgtggctcttgccagtgctatggctgcggcgtgcggctcttgtccttgcttggggctcgtgcttttgctctttcttgcgccggctccgactctgggttccgggtccgggtcttgcgccgggagcgggagcccgatcgggaccggagatctactcttagaaggactgctttcgctggctgccacttcgggcttctgctctgtgacgggaatgtctgcttcgagagcgagagcttgaatgactccggtttctggagtaggaccggcgtc

SEQ ID NO: 499278 - DNA, 401 bp, Homo sapiens
  misc_feature (138)..(138): n is a, c, g, or t
  misc_feature (141)..(141): n is a, c, g, or t
  misc_feature (154)..(155): n is a, c, g, or t
  misc_feature (182)..(182): n is a, c, g, or t
gcaaacagttaaaactttgtgcacgaagcccttggtaacatgttccggaatgtctggttttcagggaaaaggtcaactgcaagaacgggcagggccactgctaccaagaggcactcccagcatgcacatcacagacgncgnctgacaaacggcnncaggtaacccaactgtgcataccggancagcccgaaggagagacacatcattgtggccatgtgaagggagcccatatgtgccagaccactttgatgcaactgtggaggactctcaactaggtcagagcacgacgagataccccacctccctcaacctcatcctctccacagctgcctcttccctcttacttccctgctgtgaaagaagtaactacagttagggctcctattcaacacacacatgct

SEQ ID NO: 499279 - DNA, 1019 bp, Homo sapiens
gcgggatgctggttttaaggaataaaatgcaaatggtgcttcttggaatcaatccatgtaacagcctagagaacaatggggcatccagggataatgagatcttctagagtgcaataggtgagggttcatggaagacacatgatgagataacatacgagagaaaaaggttgttgtgagataaatgaatttcggaatcctagtatttctggtgtagtatagattcgtgggtaataataacactatgcaaaatggtggagttcacgagtctgaagttgtcagaattggacatctttggtcatcacgatctatcatcaatcttcaaggcttaaggcttcttactcgtcccgctcaacgaaggggcgtaaggcaacttgcacggggggactggcaggaaccacaatgcatcttgcagtcgagtaagggtccctaatacacctggtggcatttgagggccgtttcgtgcacgaactggcaggatatgagctaggggaggaaaggtccataaatgttggagtaagaccccctaaagcattattctcgcttaatccagcaagtccctaaccaggacgttctacaatctaatctccgcctacagactgcatctgtcccggagcttttactcaaccgtaccgggtagaaatatgttagtcgctgaacgggagaaggctggctccctttttagtattttccacccctaagtggcactttgaatgatggaggcgacatcaaaaatgtattctatggttaccgcaatgacacattagttaagtccccaactttccaactacttggttaactatgatggggccggtggaaccatgttgcgtcaacgtataagtatacggaaacagtatgaagttgagcgtatgttgccttagtctaaaataccttacccatttagttgcccgtgccccacaattttggatgaagtcccttctcgggaataacgacattatttgtcttaacctcttaatatggtctatcccagagatttagtgtcccatcagttgggcaaccta

SEQ ID NO: 499280 - DNA, 246 bp, Homo sapiens
ggctcggtactttcagccatgactcgaggtctggcaaagggtccataatccccatccagattcccatcagcaggcatggacaaaggccgtggctatgccataagatggtgtattctctctcatttttgtgggcagaatgttggtttccaccgatctacccagcgcaactgtatccgagtctgcaactggtgaatcttacgtctccggactttcctggctccaacgaaggaattcgggcgactctga

SEQ ID NO: 499281 - DNA, 353 bp, Homo sapiens
agtccacccaagtaaaatgctatcacaaacaccaatattctaatacgtttataacaagaacataaataagatctgtgcatatgatctttaatttatatcccagatttaaaagtacttgatcaggtatgtagatatcactattagctatacaaagcaacagcacagcattcactcttaaacagcaatgcaacacttcaaaatgaggctccaccaattgcacatcacaaccactcaaccagacagcaccaaacatgcattaagactgtaaacacggcattatcatgtactttaactccatgtcaaaacacacccatatcaagttacagtttcagcacacttcaatcctcccaaaa

SEQ ID NO: 499282 - DNA, 373 bp, Homo sapiens
caccaaatgcgaacggactgatctacccagccggtgctgacggctcgtacttcccccctgggctcgaacgccctgacagaagcctcgcctgattcggcgagcgctgttgcaccacctttcttcccgcatttccactgcacgacgcctcgccggatcgcttccccgttgcttgatcagtccgttcgcatgttaacatgcgaacggactgatcacatgacctaagtaacctctcctttgttacagttgtcattgatcatttcttaaattaatatattggcgtttcggtttcaaaaaatgtaaacggggaaatacatgggcaggaccatatgagcaagctgagggaaaaggtgttggatcagtccgttcgcatgtt

SEQ ID NO: 499283 - DNA, 572 bp, Homo sapiens
gaacgtgacataactctgatcctcctgctattctcttctggattctcactagtctcacaaatctatacaactgggtaagttcttagtcctaaaataaagacctatctactacaatacttaaaatagttcttattctgctgccttcattgtacattgataaaaataacatagaaagaactattcataaaaaaataaagtgtctaaacaacatagtcaaatatctaataaaaaataaataaatcaagagtggtaaaatgtttaactctggaagtcatagaaaatataagtaaaaatcacaaggtcatctttaaaagctttactcatatagcaacaaatgaaaaggagccatgatacctcatttatataggcatatgttcacaaaggcattttatcctacatagattaggcactataaagtgttagagacaatgttaaccaataatccatctcctggatgtctatgccatacgaacaaagcagccataagtgatgacccgtatgtcaaggtgtttactgagtcatttaactaggcagcaaaacaatggagacaaaattactacccacgatgatct

SEQ ID NO: 499284 - DNA, 285 bp, Homo sapiens
tgatggtgtggtgttatgatgggtgataaatttgcaccacgttatatttcacagcagagatgagaaacaaatgctattcaatgtttcagattgaccttgaatcctatctccaattgaacgatgagcatgtactcacattaggaggatattgtagagattgaagaatattttctatgatgttggctttccccatattgaagtatatccctgccacattattgaattggtctgttgttagcttatatccttggagagatggaagaacatccataacaccacacaatt

SEQ ID NO: 499285 - DNA, 333 bp, Homo sapiens
aggcatattcttggccgaatattggattttaaaaagcttataggtttagcaagggggcggctggctggtttgtttaccccggtttgagaccccattaggaacttcttccaaaagaagggttcccccctctgggcttaactaatgctgttcaagtgaaaaaatggaatggtggttggtaaccgctggggctgggttgatttttcctgaagtccccaactcatcggggtcccaacaaagtttaagggttttttttttttttttgttctattcgtatccccactgccccgttgtgaatattttgttccccaaaaaaagttcgacttttttgcccca

SEQ ID NO: 499286 - DNA, 415 bp, Homo sapiens
aaaaacctttttttttcccccggcccccccgtttgtttaaaattttttcaaaactttaaaaacttcccccctttttttttaaattttaaaaaatttttttgttttcccccccccggagggttttaatttttttttttcaaattaaacccgggtttcccttcccccaaaatttcaatcggaaaaaaaattaacaagtttttattttccggggccaggcccatttttttttattttttttcagccaaaattttgaaaataccccccatggaaccttttttttaaattttttggggtccctccgggggtaaaatttggaaaaaaaggctttttttaaaactttatttttttttttaccctctcccctattggggacctttttaaaattttatttttttccccctttttttttggaagg

SEQ ID NO: 499287 - DNA, 99 bp, Homo sapiens
tgtacataactccatatcactttcagattgcataagggtgagagctgaatgtaggctccaacaggaagacggcattgaagcctggttgcttgttactac

SEQ ID NO: 499288 - DNA, 1000 bp, Homo sapiens
  misc_feature (858)..(858): n is a, c, g, or t
gagagactgtgggccgggccgaggaagaaggctgctggcaaaggggacgtcccaacggagagaccacctgtgcttcgagctggagttgaacgatgcgtgcagcaccttggtggcagaacaaggacagctcagctggtggtgattgtaccacgacgtggatcccatcgagctggttgtctttttgtctggccctgtggtgtcggtaaaatgggggtgccctctacctgtatgatcacacggaaaggcaagactgggacgtcatagatccacagtggcgaccgtgccgccaggtgtcgccttcacatcaggtgatattcggcagtacataaggctgcatttggctaacgcctgataggcagctatcaggaccaaattaacgattgagagactacgactgagtatccgacgctccctggttggtggcactgatcctgggtccgaaggtctgtggctcgtatcgcgcagggtcgacaacggccacacggcttaggtgaacttgccacttaagggctgtgggttaaatcgtatcacggaatgagttttctgtaacactaagtactacatgagacactaagtacgacattttccttcaggcatcccacatccccggttgcctaatgggggtccggtgtacataaaagggggaaaggacccccatgtggcgtaggccagaaatatacgtgttctttgaacggaaaagcagggagtcaggactcttagagccagtgttgcttcggacgcaaagctgagcctatgcctgtatccgtatattgcagaggggctctccttcaagcccactatgggtgttagcgtcccttggcaaattttggcgctaggccgccggttctgctaatagcnaagacgggttagggaggatggagaccttacgccctctgtatcggttccacgtggaagattcccttctacgctgtcagtggggggcaacaacgggtggggagccgtattgaccgttgcccaaatggtggtcccaatcgcgatg

SEQ ID NO: 499289 - DNA, 929 bp, Homo sapiens
  misc_feature (133)..(134): n is a, c, g, or t
cggacggcagtagcgtgccccgagactctccgcactcactcccgactcgccgagccagaggcagctcgagcccagtccgcgtgcccagcagacagcgccgagagcagccccagtagcagctcatggccgggtnnaacgcctacatcgacaacctcatggcggacgggacctgtcaggaccggccatcgtgggctacaaggactcgccctccgtctgggccgccgtccccgaggaaaacgttcgtcaacatcacgccagcatgaggatggagtgtcctggttggcaaagaccggatcaagattattaacgatgaatgggctgacacattggaggccagaaatgtaacggtgatccggagactcactgctgcaggatggaggaatataagcatggatcttcgtaccaagagcaccggtggggacccacaacttcaatgtcactagtcaacaagactgacaagacgctagatccatgcgtgatgggcaacagaaggtgtccacggaggtatgatcaacaagaaatgtatgaaatggactcccaacttcggagttccgagtacaagtggacacatcggtacatgatacccaaaacaccgacatcagcgggaatacccacaaaagaaataagaaaccacataatctacaccataagaaaagacaaaacatataaataaagaggcataaacccaatacccttaaagaagcaaaaacacacatggcaaggagccaggatgaatgcacagaaacaacgacaaccaaaaacaccgagacaggagaaacacaggaacggggaaaaaaaagaaaaaaaaaaaacaaacaaaaagcaagacaaagacacagacacaggagaaaaaaaaaaacaaggcggagacaggcaaaacaccgccgaaaggccgggaaaacaaggaagaacagaaaaaagacaaggac

SEQ ID NO: 499290 - DNA, 626 bp, Homo sapiens
gcaggcaatctccggcacgtaggagaaggctctgccacagtgacgaaggagtgagaccctagtggcgagtatccacacactcgggtgcgtcgtaactgctagagcgctgatacagatgcctgttacgagtgagatgtcggtgctgagactctaccaggcaccagtggacattatctccaagaaggtagcgacgagtcacgttcacacgctgctcattctggaccaagcccttgccgaccaagtttctcctgatgacttcctcgacagacttttttttctagacgacctgtaagacttaactaacccagtgaaagcagacttggaaatgcttaagactaatgacgacagtactgttgcatacatggtcaaacaagagaccaagcaggacaatcctggtatagccgaagtgctactagatgagctaacgaatgaactgcgtatgttgattgtgacagtggctaacaatgaccagatggcctcaacatattgtgagtgcagggcactgcttttcaagccaaatttttatagaccattacagagggagttttatcaaacgaacaccaaggcatagtgggtataccccgaggttgctcattttcaacttttctcggaggtatcccttggct

SEQ ID NO: 499291 - DNA, 198 bp, Homo sapiens
ggacttaccagtcttgccctgtacgggacttccttctgtgcatcatagctaacatgcgggtgaagcacagctctttttcacctgtcggtgacgcgctgctccctagagatcgtcacgttgatttggcagcaggatcattctctctttgatgaaaatttttgataaatacattctcggtgttcacacagaaaaaaaaaa

SEQ ID NO: 499292 - DNA, 233 bp, Homo sapiens
  misc_feature (8)..(8): n is a, c, g, or t
  misc_feature (27)..(30): n is a, c, g, or t
  misc_feature (84)..(84): n is a, c, g, or t
  misc_feature (88)..(89): n is a, c, g, or t
  misc_feature (163)..(163): n is a, c, g, or t
  misc_feature (194)..(195): n is a, c, g, or t
ctcgtgcnaaaatatttaatttaaaannnnttgtaaacttgcaataatgaaaaagtgtacttctgaagaaactacatgaacgtntttnntggtattcaagtcagctagtgtttataattactggatattgaacttaggggaagctcggctgccctagtaacanaaccagcaaacgtcctgatgacaacgaagtnntgacattagccattccttagggtaggaggaacagatgg

SEQ ID NO: 499293 - DNA, 112 bp, Homo sapiens
ggctatacaaccatatagagatcccaagtaaaatcaataaatttcttacagtgtttcaggaaccgataacgcattgagtggaggctagcatggtggtatcaaggggtgaccg

SEQ ID NO: 499294 - DNA, 105 bp, Homo sapiens
ttcaaaacccttgtataccccttcttcaagcttcggggtgtcttcctgctgggtggtcctttggagaaaggcatttatttctctgaagaaggaggtcagtcgtct

SEQ ID NO: 499295 - DNA, 771 bp, Homo sapiens
agggtgcaccccaccttgtgggtggcagccccgcgtagtccttggtctgtccgtccactattattgttcgtcgctccgcgttgtcctcgcccccgcctgtgtggttatcgctcacccgatcgctgttgacgtggcctccattaactgggggcgcgggccccccgccggagttgtggtcgctcctcttccgtgtgggggccccgtcctgccactgcctccctccacggcggcgaatactctggggggcgcgagactcactttagtgatgacgtgccgcgctaattctcgcacgtgtcgggttgggttatcactagcgtgactccctacatcgaccacgctgtgttttgtggtagtgaacgcctccgcgaccgagtggtgccacgcggtttctctgtacgcgtcggtgcgggcacgcatagagacactcctttgtctcttgtctcttggtgcgcgaggggtgagtgtctttctctctcccctgggtccgcgggcggttgtgtgttctggcccccgtgccgttattggtgcgcccttcggtcgcggtgttgaagacccctatttgtgacccacacatggttcggtatatttctctggcaatcaggcaccttgcggccccttcgtgggtggggtgttagcaccaccgccgctattgttgtatctcacactttggggggttttccccacgaagagagtgtgcctgcatttctttcctcactaccaactgctcgtcgtgtgaacaccacccccacacaaacaataaacaaaacaaca

SEQ ID NO: 499296 - DNA, 585 bp, Homo sapiens
aaaaacagaaagaaaaaaaaaccatttggaagcaagaaagcagagagacaacccacagaatggcagaaaatatttgtaaatcatgtatccgataagggacttgtatcccaaacataaagaactcttacaactcagcaataaaaagacaaataatccaattcaaaaatgggcaaaggatgttaatagacatttctccaaaggaaatatacaaatgatcaactggcacatgaaatgatgctcactaccattgttcattagggaaatgtagatcaaaaccacaatgcaatacttcttcacatccactaggatggctaaaatcaaaaaacagaaaataagttttggatgtagacagaacagaaaccctcatacatagcaggtaagaatataaaatggggcagctactgtggaaaacagtttggaagttgctcaaaacctttaaacaaggagtcaccacaatgaccaagcgattccactcctaggtatatgcccaagacaaaaatggaaacatgatcacccagaaatttgtccacaatgttcaagaccatattattcataatccgcataagtaaaacaatgccacaattc

SEQ ID NO: 499297 - DNA, 415 bp, Homo sapiens
tcgactatacacgatccccatgccaataacctccttttaaaataaatttcccagtcttgagtagttctttatagcaatgtgagaacagactaatacaatggtctatgtatttaactgtgtttttgtggtggccaataattatctttggtttctatgtttagcactcccttaaggacctcctttaaggcaggtctggtgataacaaattcccttagcatttgcttttctgaaaagaaatttatttcttcttatcttacgaagtttagtttggctggatacaaaaattcttggttggaatttcttttctttatgaatgctgaatataggctcccaatctcttctggcttgtagggtttctgttgaaaggtctgtggttagcctggtggagttcctgtaaaggtgacatgccctttct

SEQ ID NO: 499298 - DNA, 243 bp, Homo sapiens
gacggatcccctcacactttttgcagacgcagcacacaggatccaggagcccagtgtttagatgaagctacggactgagcgagctaagctagcaagcagcatttcgtggctgaatatcggaaaagagtccaggagccagtgcgatttggtgaaagaagctaggaagaacgaaggagcgctaacgatttggtggtgaagctaggaaaccggattctcggaaggagcgagtgcaacaagtgtgct

SEQ ID NO: 499299 - DNA, 1109 bp, Homo sapiens
aggcgtcatcaacctcaagtgccatttaacaagattgccccctgtctgaagccctgtggaccctgaccttctcctagcgtgccgagaccctgcaggcctctgccctgaaggcctggggcggtgcaccgaaggagtaacctgaacggcttgcgcaaggagtgcagtatgtcgagcgatgccctggccaacagccttgcctgtccactgaaagtacactccgagcggtcaggctggggctgcttgccagacgagtccctcttcgtctctaaccacgccgtattaagcggaggtgttcccagggcgtgcgccccatacatcgtccaggcccatgtcccgcctcccactcgttgaagacggaggcctgctcctcggggtctccgggctggcttgcccgacgctctttcttccctcgtgacatggtaggtgtgtggtgtcgtcatgttggaatgctaggttccatcaccctttaccggtcactactgaccataataaacagcgtatttacagggggccaccttaacacagactcaaaagagaattgctagtgtaccgtacaaggagggccggcatcaaaagcagggatcccgccgcgagaggggcgggcccgcgaaaaatatgtcgctggccaaccgcacccggtttcttgtagtgcttccaaaagggtggcctcctaccacaaggcgagcaaccgcctactctaaggcctaacgaatgaggtgcccagcgagttgcaaacagaccctgactgcttccgtatgtggaacacgactgcctcacatttgacgagacgcactcggcggagagcccgagcgaccacctgttacccaccggtttgcgggaacggcccatcccaaattgaacttgtcgggcccaaccacgtgacaacgcctcgggagggtatgccaattacccacgctcagaacgcatatcacactcattaaacagcttgagaatcggcggttaatcgacggtcggtcgacacacacgtatcggcgtaaactcctcattcgaccgggaaccacaaatagaacttggagaacgcgcagcggacactcgtatcatacctgacaacatttattacaaccgccgcgaacactcttaggacaact

SEQ ID NO: 499300 - DNA, 874 bp, Homo sapiens
gactagttctagatcgcgagcggcgccctttttttttgaatacagggtctcactctgtcaccctggctggagtgcggtggcgatcagagctcactgcagcttcaatctcctggctcaagtgatcctcccacctcagccttccaagtagttgggactacccacatgcaccaccatgcacggctaattttttgggtttattttggggttttttgtttgtgttttttattggtttggtatttttgagacagagtctcgctctttcgcccaggccggactgcagtggcgcaatcttggctcactgcaagctccgcctcccgggttcacaccattctcctgcctcagcctcccgagtagctgggactacaggcacccgacaccacgcctggctaatttaggtattttaagtagagacggggtttcaccgtgttagccagggtggtctcgatctcctgacctcgtgatctgcccgcctcaagctcccaaagtgctgggattacaggcgtgagaccacgaacccggaccttgtcaggtaaaagtaagtagagacaaggtctacactaacattgcccaggtgggtctcaaaactcctgagctcaaagcagtcttcccacacttggcctcctaaagtgtggaaattaatagcatgaaccactgtcaggcccttaagaacagccctatcagactctaacatcctcgaaaccagaacaggaaaaggtgatcgtgaattgacaagtttatgacaagacttataaagcagaagtctgtacgaaaataatagaccattggggttggtataaactccaagtagtttgagacactcttaataaaggcaagtggagtaaaacaacaaagaaaaaggaggggggaacaaggc

SEQ ID NO: 499301 - DNA, 203 bp, Homo sapiens
tgtgtgtagcccactgcagtcgtcagtgggggccagaaggaactggtggcagcgagcaagatccccggggacaagaggcatgtctggttcggcgagaagcatgaccgatggattccagttcgagtctggcggccagggctccgagcctgccgatgtggccatccagctgaccttcctgcgcctgatgtccagcgagggctccc

SEQ ID NO: 499302 - DNA, 210 bp, Homo sapiens
tacccaccacgccaccggagaagcggggggggaatctcttttgcattttctagggccactcctgtgtcatactatgaggtccccaaagactagaggtctaatcggagccgaagccgccagcctatgccatagcaatgcaggatctgaaccacatctgtaacctacaccacagctcatggcaatgctggatcccttctccggtggcgtggt

SEQ ID NO: 499303 - DNA, 174 bp, Homo sapiens
ctgacggttcccgatgctcacttcatcgcgttcttctttcttcggtggagtttcgctcttgttaccaggctggagtgcagtggtgcaatctcggctcaccgcaacctctgcctcccgggttcaagcgattctcctgcctcagcctcccaagcagctgggattacaggcaggaga

SEQ ID NO: 499304 - DNA, 608 bp, Homo sapiens
gagaagactgtacacaattccagaagagctgccctgaaggagagaacaatgtcatcactacccgtaccatacacactgcctgtttcacttgcctgttggttcgatgactgtgtataatcactagggaacaccgatacctcagctttgtgtcatggacccacagactggaggtgcaatttctagcactgggagtgtgatgatggactcaggatattgctttccaattccgagctggccctttggtcatcctgcaatcatgaacaggtcgtgtgttgggcatatggcagcatatgaggagaagatgctactatttaccctttgaagatggcaaaccatttgagctgtgcatctatgtgcgtcgcaaggaataccaggtaatggtaaatggccaacgcatttacaactttgcccatcgattcccgccagcatctgtgaagatgctgcaagtcttgagagcatatctccctgacccagagtgctcatcacgcgcatcgcaggcgcagcactgatcagactccctcattgctcgcagcgaatcccctcctttctaccttgacccactgggattcccagcagccctactaaccagaactacatcccctccctca

SEQ ID NO: 499305 - DNA, 656 bp, Homo sapiens
actgggtgcagtggctcgcgcctgcgatcctagcactttgggagcctaggcaggaggattgcttgagctcagttcgagaccggcctgggcaacatggggagaccctgtctctacgggaaattaaaaaattggcttggcatggtggtgcacgactgtggtcccagctactcgggaggctggggtgggagagttgcttgagcccgggaggtcgaggctgcggtgagccatgaccacgccgctgcactctggcctgagcaagagtgagaccctgcgtttaaacaagacaaaacaaaaacaaaaacacaccaaagctaaaagcttctctgtgatttaaaagatgtagaactagaccagcctgtccaacatggtgaaatgcaacctccaccttctgggttcaagcctcagcctcccgagtagccaccacgcccagctaatttttgtatttttaatagagacagggtttcaccatgttggccagtctggtctggaactcctaacctcaggtgatccggccgccccagcttcccagattgccgggattacaggtgtgaaccaccatggcagccttctggcacttgccagcagcagcaagagcctcacggtgtcccccggctcccctcagaccaagctccccagcgtgccgcacagagggtaca

SEQ ID NO: 499306 - DNA, 103 bp, Homo sapiens
  misc_feature (58)..(58): n is a, c, g, or t
tctagacggatccccgcttacaaccccaaaacggtcacgaacggtcgtgacggccccngctttccaccggtccctgtacttcgtacctgacacacactcaacg

SEQ ID NO: 499307 - DNA, 97 bp, Homo sapiens
ggatttgctggtgcagtacaactaggcttaatagggactcgaattcgagctccctgttgaacttgaacctaaaaggaccattcaaagcctgaaaaaa

SEQ ID NO: 499308 - DNA, 108 bp, Homo sapiens
  misc_feature (97)..(97): n is a, c, g, or t
aaaatttcattgcactgaaatgcaattttaaatgccatgtgtatgaacttgttttccttaatctttaagatgtcagtattcatgtaaataaacaatngatccagcttt

SEQ ID NO: 499309 - DNA, 194 bp, Homo sapiens
acattatttataatacacactatatattaatattatatatgtcagctctctgttcccttgtcaaattcaaatatggttcttaaggtaggtcatctgtaattatttggtgaatgaaacctgtccatgccaggtcctctatcaaataggggcacacaacttattacaatagccatatacctggatattgcaaagtc

SEQ ID NO: 499310 - DNA, 404 bp, Homo sapiens
  misc_feature (45)..(45): n is a, c, g, or t
  misc_feature (56)..(56): n is a, c, g, or t
  misc_feature (345)..(345): n is a, c, g, or t
  misc_feature (397)..(397): n is a, c, g, or t
gcctgggagaccgccgggagcccgacttcctggcgctttgcctcntgggaagtcgncaaaggaacagcgccaacctctctccacaagccagggaccctacaacccaccgcctcaggccagaaccagcagctgatttagataccatcaagacacctaaaaccttatcatgagccagatgctgtggaagagattctgggagaatcctgaggaccccccagttgcagccatgtcaagactgatgctgaggaggaccccaactgttcacgagcaacacccgttcgaacacagccaccttacttggggaaagattcaagaagctgttcacagatggtgggaaggaaaacntgagggaaagcggggacaaccagttcacaatggagttattttaattgttagntattgag

SEQ ID NO: 499311 - DNA, 532 bp, Homo sapiens
ttgaatataattagctctacttcaaattgtcggcctataatccctcagcagaaacaaatcatttacatagtaatcccatggggaagaaaatgactgtgattcataacatttaaaattttaaacaaaacaacagcaatgatgtggtcatctattcattcaacaaatgtactaagtaccttctatggaccagatgcgaaagccctggagatggaatcatagaattagaaattaagaaaactgtatggattatgcctataatcccagcactttgggagcccgaggcgggcggatcgcctgaggtcgggagtttgagaccagcctgaccaaagtggaaaaaccccatctctactaaaaatacaaaactagccggggggaggggggtggcgcggtggtgcatgactataatcctagctactcgggaggctggggcgcaagaattgcttgaacccaggaggcagaggttgcagtgagccgagatcacgccattgcactccagcctgggcaacaagagcaaaactctgtctcaaaaaga

SEQ ID NO: 499312 - DNA, 319 bp, Homo sapiens
tcctgtccccaacgaagaatccgggggcccctgggccagtcccaggacctttgcacaggaatgatgggtataacttaccccccccgggaggcaggaaaacagccaaaaaccccctttacccttttggacatttccagttttggagagtttattggcaattgcttttcaagtttaaccagccccaccagggggcataggccctttccaggggggtttgtcccccaatggtttgcctcccgttccaaaaccccctcatcctcaggttgccccaactggttggacggcaggaaagaaaaataaaaaaaaatgggttttgtga

SEQ ID NO: 499313 - DNA, 81 bp, Homo sapiens
atgcagaagtagggttttggcctaggtaacggggcagagatgtggttcgagattctccccggactctccgtcatgggcgtg

SEQ ID NO: 499314 - DNA, 118 bp, Homo sapiens
atagaacgagagatatatcaaaaggggatctaaaaaaattccatacaggaaggcagaagaaaaggcaaatgaaaaggggaaaccaactaaaaacagaaggggatctgggcctcgggcg

SEQ ID NO: 499315 - DNA, 360 bp, Homo sapiens
acatataaagccccatgcgggagtctcatacatgagccagagacatacctatggacgaggcacgatgagacctgaaacactgacacatttaagccatggttctacacaagtacacaaaaacacgtctgaaaaccctgcacacaaacttagaccagtgatggtcaccacctgaataataccaggacaccatcaatgaggaaaccatggaaaactccttgagacagacatatagctcttgcctacatgtaaactttatcacaacactggtgcaagtattatagctaacttacaatacacatatattacaagctctaccactgttgaaaaatatgtcattctcatttgatcactatgttcaga

SEQ ID NO: 499316 - DNA, 532 bp, Homo sapiens
ggtcgtcgctgccgctgccgtgtgccagtgtcacatgtcacctcgcggatcaggagccagcgttgttcgcgccgacgcctcgactgtcggtgggaggaagcgagagggaagccgcttgtgggtttgtcgccgctgctcgcccaccgtctggaagaggccggagctgcctcgtggccatgctcgtggtcgctattggctgaacggatcgtagactcgtttacccgcgggtcggtccatgagccgtcgtacgggtagaggcgctgcgcccaatgggcgttcgtggagccgagttcagaaggatgtatgatctaatcaacggtccattctcaaacagatagaaccgtcccagtcggttaatggttgatgaagccgatcaatgaggacaacagttgtggtgtccttgtgccagatccaagatggatgacttgcagtgtgttccgaggtgactacagtgttgctgaaaggaatgtaagagactgagaagctgttatgcatcggccttttgtgatgatacttgttctgatgagtaaga

SEQ ID NO: 499317 - DNA, 335 bp, Homo sapiens
caggtccacacttgctgccgccccggaggcagattgccgcggacatcccagtaagtggttgttcccttgcattgtgacgaaagcttggctcctatatgcatccaggctctaggaaaaacatggcctgctattgcagaataccagcgtgcattgcaggagaacgtcgctatggaacctgcatctaccagggaagactctgggcattctgctgctgagcttgcagaacaagaaaaatgagctcaaaatttgctttgagagctacagggaattgctattactcctgtaccttctgctccatttcctttcctcatcccaaataaatgccttgttacaag

SEQ ID NO: 499318 - DNA, 385 bp, Homo sapiens
  misc_feature (51)..(51): n is a, c, g, or t
  misc_feature (167)..(167): n is a, c, g, or t
  misc_feature (208)..(208): n is a, c, g, or t
ggcctcagaggggaggaaatgagcaccagttggtccatgggcagccacggnaggcatacaaaagacaccacaagttcccactatggtccatgggactggcatgcttggcccccagtcttcagggtctccctggcctcaaggtggggcctcaccagggacccaccccnttcctcccaggaacctgtgtgcctcctgctgccattcatgnacccaggctgtaggtgccaaggtgcactgcaggccagtgctgagctgccctcagccccttgtcaacttccctcctaaggcacatcagtgccaaatgtctggaagggggctgagctggcagggggctggcatgtcagcactggcactgagcatgtgtacatctgactgggctgcgaca

SEQ ID NO: 499319 - DNA, 295 bp, Homo sapiens
  misc_feature (213)..(213): n is a, c, g, or t
cacggctgcaagcagctgtgaccaggagtacaaccctgctgagcattatgggacctaccaaaagcatatttatgaattccttcagctaaataagccagaatcagtgtctcttgctttaactaaggacattatgtgatagaatgattaactaaacttttaaaaagcgaactgttaggcttaaaaaattcccatggattggatttgatgcatggngcaccaaatttgaaacctccctgataaattataaggtccttctggggggctcgtggtctcactggcctcaagagtgaaaccg

SEQ ID NO: 499320 - DNA, 516 bp, Homo sapiens
  misc_feature (17)..(17): n is a, c, g, or t
  misc_feature (28)..(28): n is a, c, g, or t
  misc_feature (51)..(51): n is a, c, g, or t
  misc_feature (73)..(73): n is a, c, g, or t
catacacatttgaaacntctgcgtctangcgttgattacgagacaatgatnttaaaggggggatctgtagcangtgacaacttaaatacaagttcagagaacaatgatgagaagattgtgcagaatgctataataaaaaaaataggattttttggaagtaaactacaagattatcagaggtcagaaatcatgatgttaattatggggaaagtacatgtctttggaaaatataaaaataatttggatataagtaaactaggggatttgggaaaaaggagaattaagataatgttgatgagatctttgattatggtgacctctggatataaagagaagaagattgttaatgaaatgaaagggtatttaatggataatttgttataacaatctataatggaggactacgaactgagaaagttggtattggaagtaatgacataatatcatggatcgtcatgacaatagggaaaagcttcgagggataagaataataacggatgtagctgacctaaagat

SEQ ID NO: 499321 - DNA, 141 bp, Homo sapiens
  misc_feature (8)..(8): n is a, c, g, or t
  misc_feature (11)..(11): n is a, c, g, or t
  misc_feature (32)..(32): n is a, c, g, or t
caatttgnttnatcaacgaatgaaaataggtnagagaggcattccagatactggatggggttctacctgatctcatttcataccttattcctggtttatatgtaggctgcttcctaaaaatggttaactcagggctagagg

SEQ ID NO: 499322 - DNA, 400 bp, Homo sapiens
aagaggatccccttcgacggacgcattcaggtggtttggatgagaatggctgttactacgagggctatgtggctgattgaagagtatgcaatgcgggttttatgttgttaatgtggtgggtgagtgagccccattgtgttgtggtaactctgtagagggagtatagggctgtgactagtatgttgagtcctgtaagtaggagagtgatatttgcatccaggcagcaacgtggttactcagcgccagcagagtctccccagtaggttcacatcagtggggggtaaggcgcaggttagcgaggcttgctagacagtccatccaaaacacagctcattcagtgggcagtagcagtttgccagtccttgcagcagcaggcattcatgcatgcgcactgtgaatg

SEQ ID NO: 499323 - DNA, 394 bp, Homo sapiens
  misc_feature (37)..(37): n is a, c, g, or t
  misc_feature (40)..(40): n is a, c, g, or t
  misc_feature (47)..(48): n is a, c, g, or t
  misc_feature (52)..(52): n is a, c, g, or t
  misc_feature (85)..(85): n is a, c, g, or t
  misc_feature (107)..(107): n is a, c, g, or t
  misc_feature (114)..(114): n is a, c, g, or t
  misc_feature (140)..(141): n is a, c, g, or t
  misc_feature (149)..(149): n is a, c, g, or t
  misc_feature (154)..(154): n is a, c, g, or t
  misc_feature (178)..(178): n is a, c, g, or t
  misc_feature (195)..(195): n is a, c, g, or t
  misc_feature (240)..(240): n is a, c, g, or t
  misc_feature (242)..(242): n is a, c, g, or t
  misc_feature (278)..(278): n is a, c, g, or t
  misc_feature (284)..(284): n is a, c, g, or t
  misc_feature (354)..(354): n is a, c, g, or t
gagagtgatcatagaggacccctcacgccatgtcacnaantatcccnnaggnagctgcagtgaggttcttccttaaagagcaggngcagcctgtgaggtcaacaggnatagttnggtgacatgggaatgggttgggcctnnattagcanagttngtgtcgtaaggtgagactcatgtnacatttctggaatagangttattgactgtggacatgcttatcaactccactggccgtcattntncatacatccagcttacatcacttactcactgacttnggggtnagggtgggtggatggggtggcaattaagcctcctgggaaaaattgggaagctcagtatctcagtaatggntgaggcagcagtgaggctgagcaaaagttaatcagtgatt

SEQ ID NO: 499324 - DNA, 442 bp, Homo sapiens
  misc_feature (50)..(50): n is a, c, g, or t
  misc_feature (91)..(92): n is a, c, g, or t
  misc_feature (136)..(137): n is a, c, g, or t
  misc_feature (169)..(169): n is a, c, g, or t
  misc_feature (194)..(194): n is a, c, g, or t
  misc_feature (256)..(256): n is a, c, g, or t
  misc_feature (364)..(365): n is a, c, g, or t
agaaacttgtattaactgacaggtacaggtgcttgttgtacgagttcttnttttacttgtattcttagcattgctccgactcatttccaanngggttactttaggggtcaggcaccttttattttcctccattccnnttgtcagatgagggtttgcttgttcaatcacnatttgggtaagtattacgttatttngtggttggtattcgtgggtattcgcgatctgtgggggcgttccgttgacactctcctttaanaatagacgttttgtgtttgcaagttgtagcgatagccttgaaggatttcgccttcgttttggtggttgggtatgagttgtatataggagtgttgtgacaaagtgaganntataggtagtaagtgtgcccccacccattacgaggtagggtatacgataggtaagtttcatctccgcttaaaaagaa

SEQ ID NO: 499325 - DNA, 640 bp, Homo sapiens
  misc_feature (332)..(332): n is a, c, g, or t
tggagtcaaggtctcactctgtcacccgggctgggagtgcaggggcactatctgggctcacggcagccttgacctccgggactcaagcagtccctccttacctcagccctccctaatagccaggggctacaggcatataccaccagtgcccaactaatttttaaatttttggtagagatgagtgtcactagtgttgcccaggctggccgggaactcctagcctcaagcagtcttctggcctcagcctcccaaagtggcgtgggattacaggcgtgagccattccacccagcccagattaaagtgttttaatttctaccgtgccatcatgggntcttaactaagtgaaggtgacttctttctttaccaattaaattagaactgggtatactaggcaaaaaacaaaaaaaaaaaaacccgagagggaacttctatggccgggagcgcggagaaaaaaagaaggtgtaattctggaaacgggggcccatgggggccaatagggtggtatctccttggacccaagttttcctttggtcaccagtgggggtgaaaacctggcgggggcccccaaaaatgggaggcgcgaaataaaatcccggaaaaccccaggtgtacctctggcttagtgtctctcacacaagt

SEQ ID NO: 499326 - DNA, 642 bp, Homo sapiens
  misc_feature (258)..(258): n is a, c, g, or t
  misc_feature (370)..(371): n is a, c, g, or t
  misc_feature (418)..(418): n is a, c, g, or t
  misc_feature (436)..(436): n is a, c, g, or t
  misc_feature (451)..(451): n is a, c, g, or t
  misc_feature (505)..(505): n is a, c, g, or t
  misc_feature (510)..(510): n is a, c, g, or t
  misc_feature (534)..(534): n is a, c, g, or t
  misc_feature (537)..(537): n is a, c, g, or t
  misc_feature (544)..(544): n is a, c, g, or t
  misc_feature (547)..(547): n is a, c, g, or t
  misc_feature (562)..(562): n is a, c, g, or t
  misc_feature (575)..(575): n is a, c, g, or t
  misc_feature (581)..(581): n is a, c, g, or t
  misc_feature (619)..(619): n is a, c, g, or t
gccatgcgcgctgcccgcgccgcgccgctgctccagctgctgctctctgctggggccgtggctggaggctgcgggcgttgcggagtcgccgctgcccgccgtggtccttgccatcctggcccgcaatgccgaactactcgctgccccactacctgggcgctctgtgagcggctggactacgccgccgcggccaggatggccctctggtgtgccacggatccacaatgtggacaacaccacagagatgctgcaggagtngctggcggctgtgggcgatgactatgctgctgtggtctggagtgcctgagggcgagcacacagtgttctacccagatgaagaggtgtcccaatgacactgtgaccaaagaannggcaccagttttctgataggagctggaagcaggaacgcccctcaccntttgaccaggtaactggngggcgccgaactatnatcgctagttttgacagacgacagcacaaacatttctgtacacaatcaatacangactnctgacgggcttactgcatgggggncangggggcnttnccagctggctgggcncccaagtgcctgngagctncccagtagcctaactatctcccaaactctctagggtgntggggaatcacccccccaagggg

SEQ ID NO: 499327 - DNA, 147 bp, Homo sapiens
gcagaggatcccctccataaggtgtgcccaaatagaagcagtctgattaaattgtgtgacacacaggcctcagattcttgaaaaggctttagagaccaggcatgtggcttatgcctataatcccagcactttgagaggctgaggctg

SEQ ID NO: 499328 - DNA, 226 bp, Homo sapiens
tccccccaattttttataagaaaccttttccaagggggcatctttgggctctctggttttaaaaccttttgaacccaggcttggagccggcagaggaggctggggctgtgggcttccgcccccccctcccccttggtgttcaaaaaaattcccggttccggcccttcccaggtggaaaaggtggtcttttttttttttttttcccataaaaagccccttagcttta

SEQ ID NO: 499329 - DNA, 760 bp, Homo sapiens
  misc_feature (25)..(25): n is a, c, g, or t
  misc_feature (248)..(248): n is a, c, g, or t
  misc_feature (290)..(290): n is a, c, g, or t
  misc_feature (295)..(296): n is a, c, g, or t
  misc_feature (298)..(299): n is a, c, g, or t
  misc_feature (594)..(594): n is a, c, g, or t
gagagaactggctcgagtagcacangagatctgtgcttcacttttgcattgtttccgttggcttctctgtcttttttaaacacaacaattgtttgttgcacctccggtttcctcacatacttttgaacaaaaaatgtccaccaacccccccctgcctccgttttgggccacaggagttaatcacttttttggcaaaccccataaacaaagaatcctttcacctgcctaacctcgtgccaaattctgcncgaggtgaatgtccaggaagacttttggtaaaaaaggcgccnaaagnntnncttttgggaagaagaaaacctcttggaggggcttgtaggaatctacatgaagcgattatgtggaaactggtttccccactcccccggattcccttttgctatacttaaaggcccgtaccttgcctctgccctggattggttggcaaactaaaggacttgacgtcataactccggtgccttttcccttacaaggtggggagtgcccctggctttcgcctttgtttggtgctttggcctcgggtgcattttccaccgcccttccatgggccttttgtggtccctggggagctctttnctcataattttgcgaattttttttgtggggttttcatacctactttcggcgcctaaattgccaaaaggaaagggaccgaaagaacctccttatttgtaatgaggattggtttagcgctgattttaaaccttatgagctttttgtccacatatatgggggggtttgg

SEQ ID NO: 499330 - DNA, 528 bp, Homo sapiens
aatttttaattaaaattatatttaaaaataatataatcactcaaaacccaaaacccaccaacaacaacccactctcctcccccaaaccaaaccaaaaaccaccaacaccaacacactatatcccccaacaatacactcacttcctaaactttacatcaacacccacacacaaccaacaaactaaaccaccacacctcccccaaccacaacaccccccatcacaaacacacactaacacataccccaacccccccaacaaaccaaacattacacacctcataaaacctcctcaacaccccaataaacctccccacaaatttcataatcacttccacccaaaacaaaactcccaactaaaccctttttgaaacacaaaattcctatcaccaacacactaacccacacacctaaccaaaaatccaccattctcacacctaataccaaacccccaacacacaccccccccacctccctcaccacacccactcccattcaaacacaacaccacacctccccaaaccgatccct

SEQ ID NO: 499331 - DNA, 126 bp, Homo sapiens
caaccagtgtgtccacggtcacttagagattgctcaagtaagatgcagtgtaagaacagatcactgagtttttccaacatagacttactgggtgtacttgacttcagtaattgatctcatgcaaca

SEQ ID NO: 499332 - DNA, 301 bp, Homo sapiens
ctccaatcctacacaagccctatgatggcagagcatccaactgcgctacctgctcagagtggtgctcaagacactatggaaacaccagtatgcatggcctttccagcagcctgtggatgccgcccagctgaacctccctgattactatcagatcattacaccgcctatggatctcggaccaatacagacgcgcttggaccacaactattactggcatgctcacgactgtatccaggacttcaacactatgtttaccccttgttacatctacaacaagcctggagatgacataatccaaagg

SEQ ID NO: 499333 - DNA, 317 bp, Homo sapiens
atagtcgggcttgggggtgccaccggtatccaggtagctgccactacaggtgccgcaccaccacgccgggctaattttggtatttttagtagagacaggtttcaccatattagccaggggggtctggaactccggacctggtgatccacccgcctcggcctcccaaagtgcggggattacaggcgtgagccacctggccgggccaaaaatctcagaatttctttaagacgtgtttaattggctccagtcagtaatttggaacgcactttccttttttttttttcccccttttgggtccctttcccccaggcccacca

SEQ ID NO: 499334 - DNA, 299 bp, Homo sapiens
  misc_feature (132)..(132): n is a, c, g, or t
gcggccgcgtcgaccagcacggcctggcggccaaggaaggccgcggcgttggggatcgagatgtcgacctcacgatctccggaccgctgtttctcgcagaccagaaacggcgcatcggcgccggccgccacntgcgccacccactgctcgctctccaggtcgggcccgacgatcaccggccgggcgatgttctgcttgatccatgacgccatgagcggcgcggcatgaacaagctgggtggggatgcggtagatctccgccaaggcgtgatagcggtgcaggtggggatcgacggtcac

SEQ ID NO: 499335 - DNA, 83 bp, Homo sapiens
gtttgctttttaaaaaaagcaaaagcccaaactttggtttttcctaaaaaaccccaggggccccccccgttttttccaaatta

SEQ ID NO: 499336 - DNA, 732 bp, Homo sapiens
ggcctatgctgatgaagccaagaagcgctctaagcccatatgtgaagacttaccttctgcctgacaagctcccgccaaggtaaaatagaaaataccagcatcaagcgggacacgtagttaatccactatatgatgagacgctgaggtatgagatcccagaattctctcctggccccatgcagcgaccgctgtcacgtttctcatatttggcagtcagtggtcgttttggcagaatacactttccttggagaggcagagatccatgatggattcctggaatgcttgataagaaactggatcattgcctccctttacatggaaagactcagtgctgagatccccgacgtggcttgccatcacacaaaggcgagttggctggtttcattgaaagtacatcccagcctccaaaacctcctgttggaggctgaccggaaaaagagtaacggtggggaagggggagagctccatggtgtggatcatagagaagccaagaacttgacggctgccaaagcaggagggacttcagacagctttgtcacgggagtacctcgcttcccatgagggaagcaaggccagtaaagcgtaaatagtcctgtgatgaagaagaacctgaatcctcactacagcatacattggtctacaatggtgtgagggtgggagatctacagatttgtgctggaactgctgtgttggaccgggagccccgggcgatggtttctgggcgggggcgcg

SEQ ID NO: 499337 - DNA, 207 bp, Homo sapiens
  misc_feature (19)..(20): n is a, c, g, or t
  misc_feature (54)..(54): n is a, c, g, or t
gcagaccagaagaatagannatggaaacgaatgaagcgtcagaaaaaatggcgngtacaacgcgcgacctgcgtctgaaaagcctgcaaaaaaagaactctcaaaccactgtaatttaacttttctacgctttcagccgagacagatgtccagattcggaaaggcaagctgagtggcaacgccacccgaacttagcactatcgtggt

SEQ ID NO: 499338 - DNA, 578 bp, Homo sapiens
tgtcgtcttgagatcaacgggtcaagtacccctcaggatcctatttatacagtggcctcagcaacatgttccaatttctcctcagcacttgtatctcagattgcacatttatgggcatgattatttgatgtacgtctctctcccacactctgggtccgtcgcctgtgttagatatgtgtgcgagtatccataaacagctgttaggaagacatccgtgaagttctgaggactctgatggcaccaagtggagcttgcaggtgtggcttgagaaggtgcagtgtgaatgataggcctagggtgataggccgagaagatcggtcaagcccagatatgacccactgggcctgtcagtgtccaggaggtggggtgaggcaacaggtctaaggttctggatctgtcagtaccacctgaggagttgggaatgggcacaggtacaaaagtgatgagtcttcattgttcaacaaagaatggcaacaggtgtgaggatctgggtatgtcagtatctgaggatgtggggcctggcacaagtatgaggcactgggccactgtacaagcaggtgggctgaggacagcaatgt

SEQ ID NO: 499339 - DNA, 1182 bp, Homo sapiens
gggccatatcatcatagctaaagagcccagtgccatgacccctaacaggggccctctcagccctcctaatgacctccggtcgcgtagccgatcgtgatttcgacttggccactaccagttagagcgtcgtccctcatgactaggacctactgaaaccagaactagcgactaatgcatattaccaagtgagtggcgcgcatgtaatcacgaggaaagcatcataccgagaggtcgcgaccgagataccagctggtccaaacaaggcctgtcgatatcggggataagtcctactttagttagctctcagaaggtgttggtttccttcggcaggatgttttcgtgagcctcttgtaccatctccagtccttaggcctcctaccgccacaaagttgagggatgggcactggccccgcaacaaggcagtcacccctgctaaatcgcccgtagaaagtccgcagctcgctagaatgacatcgcgtagttacgtcgcatcagggacgtatcaagtcacctgagctcaccatagtctaatagaaaacaaccgaaaccaatataattcaagcactgctcattacaattttactgggtctctattttaccctcctacaagcctcagagtacttcgacgtcgtcccttgcaccatttccgatcggcatctacggcctcaacattttttgtagccacaggcttccacggacttcacgtcacttattggctcaactttcctcactatctggttcatccgccaactaatatttcacttttacatccaaaaatcactttgggcttcgaaggcggcggctgatactgacattttgggagatgtggttggactattgccgtatgtctccctctattgatgacggtcttaacccaaaaaacaaggcgcagacactgcgccccaacaaaaccagcgcgcgctcacataggcgggcgacagcaatctccacgacacggccaccgcgtatccccaccaccgcgcttgcacaagagaacacgccgcaaagagaggaaataaaccacggggctcacgacacacgacggacgaacaccacaccagacacgacgatcacacctgggaccaccggggaaccagaaacaagaacgacaaagagcacacacacgaccacacaagacaccacaccgatcgaggccctacaccgcgccgacccagacgagcc

SEQ ID NO: 499340 - DNA, 781 bp, Homo sapiens
ggcctgatgttggatgtgttgcttgcagcacgagtgctgggatgctgtggtgagaacctgtggaagtgctgcaaacctcctctccatgctcaatggcctgactgtcaacctgtcccacatgctgaaatgatgtgtgtgccctccatgtgactgccctgctgcagtgcttgctgtggttttgttcttgcgagatgactgcatgatgtgtgcatgcctgtcaccactgacgtgagcctgtgactctgcgggatgctgctgtgtgtgatgctctgacctgtgacttgactgctgggctgcacgtgccatgtgccccatgtctgacacgctgtgacaggaacgcactgccaaaattcacttctcgcttctatgaacaaacgaatttacgttttaaacgaccttgacgtgagacatgcacatggttgtacactgtgacacgccacccaagtgacgcctagctgagaagttgttccgacaccgtgatgtgacgaatggctgcaagcaaagatgtgcagaactgcttagcgtgcattggcagctttggtaccacatgactcagtagggtaacacctattgaaggggaatttcacacgcgtgggaatgacatgccatgaattcttgttgggacgatcagtgtcgtgagacgagccaaccaacggaacaactagggaactgcgcggactggtccacgcaaggaactgcccttgcctccttcccgggacattggacacgttgcgatgggactcttggacccaaaaggacaccgctacagaagaaaccaagg

SEQ ID NO: 499341 - DNA, 294 bp, Homo sapiens
  misc_feature (171)..(171): n is a, c, g, or t
aaaaaacatgtcctggaaagtttctggaagcagaggtttgaatcaggtggctcagatgtcacctcccgggctcacatactcagaaaaggccaaattctgcaagtctaagaataactagttggtaccagtgtatgagctacaagtaaagttttactctttttttctcttctnttctggaatactttttaaatgatgtaatatatcccctacggaagattaatttgaacatagttgttttaaagaataaagatcacccaagccagtgactcacccctgtagttccaacattttgtg

SEQ ID NO: 499342 - DNA, 396 bp, Homo sapiens
aagggaaaaaggaggaatgttgggttggaggcccctggaaccaaatggcaaaagggggccagcttcctttcctggggggactttggccagttcctttaaaaaaaatggatgcccaaaggcctcccaaccctgggttggggtcaaaaaacagccaccaaaagttaggggccttagggcactgggctgttgttccattaaaaccgactttggccctggcccttacttggttttttagctttttaggcctttccagtttgcccctgtcccccccctccaataaattgtcctgaagcaaaaagtcccccctcccccttccattttcccccactatttaagcacctccaggcccggggctataaaacctacctgtttttcaataaaccacgggttaagcca

SEQ ID NO: 499343 - DNA, 294 bp, Homo sapiens
gggcttcatggtgcgcgtgaagcgtctggggctactgcgactctagatccgacttgcccaatgtgacatacatatgaccctgactttgaggatagatgtatctgggggagacagagacagtatatcgtgccatgcaagtaagaccattggacattctgttgcttgctgtttacatgagaaccagactgctactaagctcatgacttaagcctgatacgggttgcagacagagagtcctgctaagtttagaggagctggaactgacacagattacaatcgcgactttgtggtccg

SEQ ID NO: 499344 - DNA, 388 bp, Homo sapiens
  misc_feature (11)..(11): n is a, c, g, or t
  misc_feature (13)..(13): n is a, c, g, or t
  misc_feature (145)..(147): n is a, c, g, or t
  misc_feature (192)..(192): n is a, c, g, or t
tccccccccananaaaagagtttttttctccccctttccttttaaaaaaaagatccccctcctataaaaaaaaaaacccttctcccaaaaaaaaaaagttttccaaaaaaacccctccccccagtgggttcctcccccccccccnnntttttttttttttgtcccacaccccttttttttttaaaaaaaaantttttttttccccccgggggaaaaaaaaaaaaatttttttccccaccctttttttttggggtttttttgcccccgggttttaaaaaggtttttttcccaaaggggatttccccccaaaggccggttttttagggggtgaaccccatcccgggtttgatccagggggcaatcccaggacggggttctaactcgtgca

SEQ ID NO: 499345 - DNA, 214 bp, Homo sapiens
  misc_feature (62)..(62): n is a, c, g, or t
tagaggatcctgactaaatggctgtcactcgaaagagacgttatgaatgcagggtgcggganagcttaattctccaattattcaatccatcaagaactcacactggaagaggtcctataaatgtagggaaatagtgagagccttcacagtttccagtttctttcgaaaacatggtagaatgcatactggaggaaaaacgctatgaatgtaaata

SEQ ID NO: 499346 - DNA, 347 bp, Homo sapiens
ccatgccggtggagctctaccggaatggcatcatgatgctcgacggtcccttccagcccttctacgatccctccacacagcgctgcctcagagacatatgggtcctctttggctgcgtctgagctccagcgactgggccccaatgatttttttttgcaaggcgataagctgctcctcataccacacctttggggatgttgaagggagtggggatacacagcctccccagacacctcccattctgaggggaagccgctgcactccctgggggaccccagtctgatgccctccaggaggataagtctgaagccgggctgggaagggagcggagaggcccgaaacagagc

SEQ ID NO: 499347 - DNA, 223 bp, Homo sapiens
  misc_feature (1)..(1): n is a, c, g, or t
  misc_feature (5)..(5): n is a, c, g, or t
naggntggtaggatcacttgagctcagtcaaaaccagccaagtcaacacagacctcatctccatttaaaaaaaaaaaaaaaaaaaaaaagattggtttggcccccccggggaaaaaattttcgggccccccacgggggggtaacttttcccttttttttggatttgggttggacccatgtaatttttttttttttttttgggaaagagaggacaccctgtgtt

SEQ ID NO: 499348 - DNA, 403 bp, Homo sapiens
  misc_feature (30)..(30): n is a, c, g, or t
  misc_feature (167)..(167): n is a, c, g, or t
ctggccaagggtaacatcctcgccgagagntacacctttttcattgacatcctgctcgccactatcagggatgagatcgctgggtgcatcgagaaggcctacgaaaaaatccttttccctgaggccacccggatcctttttttcaacccccccaaaaagatgccagncttccccaaaaagcgagggtgggtcttgggccccaacaacttctacagttttgccagccagcagcagaagccggaagaccccccctttccctccccaaaattggccaaacaggtcattgagtatgcccggcagctggaaatgtttgtttgagccccccgggccctgggtggggcagggcccgagtttttttaaacagttcccctgcagggttttgcccaataaaggtgggctgcca

SEQ ID NO: 499349 - DNA, 241 bp, Homo sapiens
  misc_feature (22)..(22): n is a, c, g, or t
tgctattgtttacatagtaagnccacatttaatatcaggtagattattggaaactgcaactatcagcaaaatggtgaacaatgaaacaaattttaccataggccaattgatacaacaagatataagttcctactgcatatttctggtcacaatattatcactgtacttctaaatggagactaaaacacttataacattcaacactgaaataagtgtgaggtatcatcatttttaaaagatt

SEQ ID NO: 499350 - DNA, 152 bp, Homo sapiens
ccggtacgtacgccacaggactccagcacaggcgacagagtgaaactcatctcaaaataaataaataaataaaaatacaaaagttagccaggcgtggtggtgcgcacttctcgggaggctgaggtacaagaattgcttgaatccaggaggag

SEQ ID NO: 499351 - DNA, 242 bp, Homo sapiens
ggttacatttatgatgggaatgaatggacattatcttagacttgcagttgtactgccagacttatctacagcactagagtaaaagaagggtctgcaaacttttactgtaaaggggccgatttataaatattgcagactagtgtcaggctataatatatggttcacacatgtgcagcaggagatgcagttcatcagctattccttgactatcagcttctgaacaaccattcagagaatattaa

SEQ ID NO: 499352 - DNA, 1034 bp, Homo sapiens
agcggagttgggagccgctggccgtcgccatgacccgctggtaagccagactgtgagctcgacctcgcgcagaatgaatatgaaaacagcacgagcgactcggttaagggaaagcgccgagaatgacgggcatttctgctgactggcacgaaaagcagatgggtacatcgagagcatcatgtcatcagcaagacacgaacataggccgaaagcgagaagaacgatggaacactcaagtagtcgttgtgtgcttcgatgtcccatatcctcattgactccttcggactgattgtgcgctggaggccgagtcgctcgattcacagctcggcgttgctcgtcgctgtacgatgctcctacaggtcctcacgtctacgcgagtggtcgattcccgttgtgtcacctgcagtatgctagcgggggtcgcgctgtttgtgctttgcgcttacgcctcattcatggctatgaactctctcatcgctcacgtgagggccatctaccgcgtgcgtggtgagtggggggttatcacctttcccatgttggtctgttaattcgctgatggcgagcgtcatcgccaaagatattaaagagtacgctttgtacatacatagagaaagaaataaaaaataggacactgtacactagggtcttggaaatcacgggaccatataggagggggggcgaaaatggcttctggagtgggcgggtaccagggtatgacacggaatatgtatagtgtgtcctccatataaggaagagcgggcgttgaaactatactcaaggctagggaggttgaaagcggactggggacacaaattaggagcgtggtaacccggtagggcgttagagaagattgggcgtagacacccagagtacttcgcaaggtttgcccaggcatgactcgtgggggaacgtcaccacaaaaacctatgaggttcgcgggttgggggtttttcggaaaacccgagcggaagggtggcccgcaggtaaaccaaccccaaattatccctttgggcaagccctgtcccatgtgatag

SEQ ID NO: 499353 - DNA, 152 bp, Homo sapiens
cccttgtgacgaaatacggactccaggcccaatatcagtctgagaccctcaaagggcagatcgccttagacctcaagtttttcagaagatctgaacccactgggggctcctgtctcctcttgtcctgccccatgcctaaactaggtattcca

SEQ ID NO: 499354 - DNA, 317 bp, Homo sapiens
atatagccgacgatggaggactcagcagttagatgcagaaaagagtcaattcagtgaatgtttaaaagagactatttagttagacctgtaggatgtcattagtgacttggccaggaattttcatttcagtagggactacaaaaatcagctacagtgatttaagagcaaatgagaaacaaggcaaagtatttactatggaaaaggaagagacgtgtatatcatgaagttgggggtgtctctgaagagaaaagtaatgtttttgtaatcacccctcaggaaagtcactgactcagtacatgtcaaagaaatgcttaggg

SEQ ID NO: 499355 - DNA, 127 bp, Homo sapiens
ctcggtgtatctttccagtacaatggatacaaccataagtaactctacaacgatcttgtctgtactgtgtgctggtcaatatatcctcaatgtgtcttcaacacattgagagagacattcatctcat

SEQ ID NO: 499356 - DNA, 431 bp, Homo sapiens
  misc_feature (70)..(70): n is a, c, g, or t
ggaacgcaacaatggcaggtagcagcgggtggtgaacattcacaggtgctctctagcctgcacaatgatngacaagagatcacccaaaggattatttctgaaggtgtttttttctttatttctttttctttttttttttttccttttcctttttttgggcacatgacagtgttggtttgggggaccttccagggaagagggatgctgtgcagtggtgccggggtgcctggcctccagtgtccccacctctttcaccaccccattgggctccttggccatctggatgctgaggttcccggttgggggagactcaggtggttgggggtaacaagaagggaaagggcttctgagggcttggccacaagcttacctgggggttcagtcctgagaggccaccaccagttcccatcagcacggtctccatgcagcag

SEQ ID NO: 499357 - DNA, 977 bp, Homo sapiens
atactatacaatggaaaattatttagccagaaaaaggaaatgaaatttgatacatgcttacaacataaatgaatcttgaatacattctgctaaggtgaaataagccagacatttaaaatgacaaatactgtataattccacttatgagatacccaggaaaggtaaatgtatagagacagaaagtagactagaggttcccaggggctgggaggaggcgaaaatgaggagtcactgttcagtgctatttaattgggtacaaagcaggaaaatggcttgaaccccctgagacagaggttgcagtgagccgagatggcgccattgcaattccagcctgggtgacagaacgagactccatctaaataaaaaacaagccacacaaacaacaacacaaaaaaaaaaacatgtttggtcggcccacccatcgcggccccctaagaaaaacggttctaaagacacaacttgcggatggcaggcagggaccacaaagaacgggagcagctggaacaattggtcatacaccgtgtaccccaagaagaaactcccctgtggcaacaccaacaactgtggctggagctccaccacccacactataacaaaaagcgcgccgagggcgaccacacgaaccggtctatgcgaaccaaagaccacaacaggtggtctaacggggcagacacacgcgcaccaccagaggcgcacacgaacacgcccgaaaatcaaaaatacccccctccgggggaacaaatgccgcacacaggcagacacgacatacagagacggaaccacagacgcacacaacagaacccgaaaacgctaagcgcacgacctgaatgaatgacggagaagagccacgttagaaacagcaagactaccaaacatgaggtacggaactacgacacagaaacagtcacacaagaatcagacgaacgagaggctacaaacacgacacacacagacgaaacacaacgaacaagacgata

SEQ ID NO: 499358 - DNA, 1263 bp, Homo sapiens
tgttatctctcttgtgtttccctcgtttggttttgccgtgttgatgcgtgttgaatgtcttgggctgtagttgcttgccaagggtgattgttaacttcccttgtgcgttaattggctgttgtctgttagctgttggctctcccgctctttttgtgggtttttgttgggggtttgctcctcttggttatgtgttcccgccatacccaagtgggagtctctccgttcgtggtgttatggggtgccgtttattttgtctgtgagggtgttgtacctccttccctgtgtccatgttgcgtttgtccgggccgtgccacggcgttttgtgatgctgttgttgtgagtgtagtggcaattgtgggtgcaatgttctgttgtgcgatgtgttggtggagtggcgttgtgtcgcactctgtattccgtttcctctagttgtggtgttctcttttgtttactcatcttgtgtagtcccacctgtggggtgcgtgatttttgtgtcccccctccccactgtgtgcgcctcatcgttgtgggttgtgggggtttggtgtggtatcgcctgtcgacctcgccgctgtggaaaacgcggttcaccgatgtgtggccccgtgggcgcgtcaatatatggaagtgatggtgcacgtttcgtgttgtatttgtgtactccccactttgcgttcaagtgtaagttaaaccccctgttgttgtaatggctattaggggaaaatattccacgcaaagaaacccacacgttttacactctgtgtaaaaaaggtagaatgtgtgtaccccagcaccattgtacccacagcttgcttgtctcctcagccctccttatatagaaaaagtgtaatggtggagagcagttataaaatatataagtgtacacttaccccccttactcctgataagagtaccactgcgccctggatttccatgtgattgttgctggcccaatgtatgttgagcgattatgtgtaatggaatgccatgatgtttagttgagacccgtgttacatgttgccttatacggaccattggaacgtgcgtgtgagccgagcctttagagctgggctctttgaatggacctttactctggccagtggatggttgggacgtggaccagatctgctggcccagccccggtgtggtgaagtgagtgatggcccagaaagagcttcagagtcttcttcacgaggataaaacatgattatgaaatcttttgtaaaacttaacggacactcccgtaaagacataacaaaaaaa

SEQ ID NO: 499359 - DNA, 392 bp, Homo sapiens
gtttctgtgataccaaagtctcaagaaggaaaactacagaccaatattctttatgaaattagacaaaaaaaaaaaaatcctttaaaaattattggccaggcacagtggcttacacctgtaatcccagaattttgggaggccacagcagaaggtttgcttgagtctaggagttcgagaccatgccaggcaacacagtgagacccccatctctacaaaaaaaaagtatatatataaaaatagctgggtgtggtgatgcatgcctgtagtcccagctgcttaggaggctgaggtgggaagattccttgaacccagtaagttgagactgcagtgagccgtgatcacatgccactacattccagcctggacaacagagtgagaccctgtctcaaaaa

SEQ ID NO: 499360 - DNA, 373 bp, Homo sapiens
cttgaggatccctgtaaccctcgaggacgaaagacgatccttcgtatctgatcggagtatggaggtttacacagtggacagctttcggaattttaacacaagtgaggtgagactatctaccagcgctttgagaccatactctatcttttccatatgatcctcttctctaaagccgcgtcacagggaaaaaaagggtttaaagagaaataacttctccgggcaaaaactgaggttagcgggcctatcagctgtttcttctcactccaccactgctgctgactggaggagcagcctggaaagcagccgccctcccgcaaacaggtaaaccacattacctattcctgtggcggaggcaaatggatggtcaaaccta

SEQ ID NO: 499361 - DNA, 279 bp, Homo sapiens
ggccttggaaaggtatcatacataggggtatgccagagtaaattccatttttttgaagatcagccccgtggggctggttttggtccccagcataacaggccctgcctccttacctgtgaggaatgccaaataaagcatggattaagttagaagggagactttcagccttcagcttcctaaattttgggtctgtgcctttcgaagttttttaaacctttgaatttggacccctttaaaatttcaagtgtcctttaaaattaaatccttttaatgggccca

SEQ ID NO: 499362 - DNA, 896 bp, Homo sapiens
  misc_feature (148)..(148): n is a, c, g, or t
  misc_feature (528)..(528): n is a, c, g, or t
  misc_feature (856)..(856): n is a, c, g, or t
agcggaaagaaatgctattggacaatggcttatagaacatgctgtggcccaatattattgaaagggacgtattgagtgcagatcaaaacctgaccacatgtgaactcttcttctctccagctgacgagttctatattataacggtatngagtattacacagactgccctatgctaggaagaggcagtattatctggtacagcttcagtatattgctggctctttgtaataaagtctcacatttgattttcctattatttaacctatggtatgataaggggaacagagatttgcattaagatttcaatggagagaatgattgtctatcaatcgaatcttgagattccgtcatggtaccgtctcgctactcgagccgacaagatgagttatacaggaagtgtcgaagtaattcattggtacacaatccgctaatgagagcagatacaatgaatactcacgtatcagatcatctaatatatccatgcgtagaagggccgtatatttttgaccatgtatagggcggacacanttgccagtcttcgggtgcgcattactgcctattacgacgtagaatcccacactcgcaagcgaaggactctcacattgtaagattactgtgcgtgtccaaaaatcagcttataaactatactaatgtgggataaaagcttggcgaattaattagaagttacgttgtcgtaaagttataatactcattaatactaatttgctcaagatagctatttccaaataggaggatttacatgggcataaacattagttagcattgacttttacttgtggtgtcacaaaaaggggtagttaacgtaaagaggtcaaactttcgtaagggtaatttntcgtatgtaatataatcgattgtttcccgtaaggttaaga

SEQ ID NO: 499363 - DNA, 914 bp, Homo sapiens
agcggtggcgacgcagagtcttgagcagcgcggcaggcaccatgttcctgactgcgctcctctggcgcggccgcgattccctggccgtcgagtggatcggggaagcaccggcgggcgcgcggttcgtgtcgtctgcgcgccaatgctagaactatgatccgcgcgtcctggaggatcgaggcgggagaaccagttactgtgctgacgcatgcccttacagtgacgccgtggatgctaggagtcggcggcctacgccgtcggatgcagcgagcgacggtgacgtgccttctgaggcccataagaggccggaccgcctacttcgcaacgttccccgcgccatagatttctaattgctcggaccatgccatcgaccgatcgtctaactgttcaccgagagaacatggtgccctaagtcgctgaggtcgtacactcccttggagtttgtatggcatcgacggagactgtaccagtcttgtagcctgcgtcctgtgaagctgagaaaatcgtgtgatgcttgctgtgatgacatgatgcctcttgtgaccagatctttcattaaaaccgaaacaaagcagtgaagtagtctgctagtatcgaagtatcttagagctctagagaccccaccaagtactttagcaagtctaagttgctgtcctgtcggtttcattatgtctgactaggaaggatcagggatttgccgtcagtcagcagaatgatactcttgaagcgaaagctgcaataaagcctactagtgatttgagtgtctttgcttaaggtatgagatacttgatgggggctttatcatgcagcatgagttggcttaccttaagaattgcccaaaaatgactgaccatatgagcttgtcagttaaacatactcctataaacattttccgggatttactactaagatgg

SEQ ID NO: 499364 - DNA, 388 bp, Homo sapiens
agaggatcccgacttgacttgtacttaagtcctccaggctgtaagatgaggagacctactgcactggcgtgttaggaggttgaaatgaaatgaggtggctgggtgtggtggttcatgcctacaatcccggcactttgggagtctgaggcgggaggactgcttgagcccaggagtttgagatcagcttgggcaacagagtaagatctcatctctacaaaaaaactaaaaattagccagttgtggtgatatgcacctgtagtcccagctgttctggaggctaaggtgggagaatcgcttgaacccggaaggcagaggttgcggtgagccgagatcacgccactgcactccagcccgcgcgagagagcaaaactcctttggccactcaata

SEQ ID NO: 499365 - DNA, 114 bp, Homo sapiens
  misc_feature (47)..(47): n is a, c, g, or t
tagaggataccctatgcccgtctcgcctctttctttcttcacgcagncaacacaacataccccagcaggcgtgacgctccgcttactgatgctcccttatgctccgcttactga

SEQ ID NO: 499366 - DNA, 121 bp, Homo sapiens
cttcacatggctggctgcacatcactcgatcttcttgagcagccaatggagtggggtaggccgctcttattgctcagtgttcacatttcgcatttctaccgagaagcagcgacaccatgtc

SEQ ID NO: 499367 - DNA, 462 bp, Homo sapiens
  misc_feature (97)..(97): n is a, c, g, or t
  misc_feature (239)..(240): n is a, c, g, or t
  misc_feature (254)..(254): n is a, c, g, or t
  misc_feature (273)..(273): n is a, c, g, or t
  misc_feature (331)..(332): n is a, c, g, or t
  misc_feature (341)..(341): n is a, c, g, or t
  misc_feature (348)..(348): n is a, c, g, or t
  misc_feature (353)..(353): n is a, c, g, or t
  misc_feature (382)..(383): n is a, c, g, or t
  misc_feature (421)..(421): n is a, c, g, or t
gacgccttccctaacatcgagaaggtgtccaatatcacgtctcccgtgctcatcatccacgcacggtaggacgaggtgatcgacttctcgcacgggntcttgtacgagcgctgccccaaggcggtggagccgctgtgggtggagggcgccgggcacaacgacatcgagctctacagccagtacctggtacgcctgcgtcgcttcatctcccaggagctgcccagccagccgctagcggnngccccaaccggccngacctcagcaaaaggcggnccccggacctcaccccggccggccccccaggggctgcatgtggacccccgggcggccnnggggacccngccccgngccgngggctgtggacgatgtacaggcaacaganntacgcactcctttccttttggaagcaagaagaaaatangtgaaaacggaaattaaagatttaaaattttagggctaaaa

SEQ ID NO: 499368 - DNA, 324 bp, Homo sapiens
gcacgaggcaaatacaaaagataacagcaactctgatgatgaagaacattcttcaaaaaaacgtaaaacaaaaaaaaaatcaataacagatttcttcaaaaaacagaaaaagaacgaagatacaaccacccaaaacggcgcaccagacgatgcagcaataaagcaacctcgcctattgaaaaactgtattttaaaaccttaccaactagaaggtcttaactggctgatcactctttatgaaaatggcctgaacggaattcttgccgatgaaatgggtcttggtaagactgttcaaagtattgctcttttggcgttcatatatga

SEQ ID NO: 499369 - DNA, 116 bp, Homo sapiens
gcaatgttggtgtatctttggaaagaagggaaggtgaatttattatgcaccatatgtccatgtgtggcacagcacttggctaaacagtattttggagaaatatttggtcttcaaca

SEQ ID NO: 499370 - DNA, 143 bp, Homo sapiens
catcataacggaataacatctgtcgaaatgcaccctgaagctttgagtgaagctcttcctggggacgatgtgggcttcaatgtacaagatatgtgtctgtacagggatgtactgtcgtgacacgttaagccttggtgcacagc

SEQ ID NO: 499371 - DNA, 362 bp, Homo sapiens
tggccggacacgttcagaggatgacgaggatattactattgacctgtttggctgtgacaatgatgaggatgacaattgagtgtggctcagctgcgggaggagcggctacgtgctgtacgcggagaagaaggccaagaagcctgcactggtggccaagtcctccatcctgctggattgtcaagccttgggatgatgagacggacattgcccagctggaggcctgtgtgcgctctatccagctggacgggctggtctggggggcttccaagctggtgcccgtgggctacggtatccggaagctacagattcagtgtgtggtggaggacgacaaggtggggacagacttgctggaggaggagata

SEQ ID NO: 499372 - DNA, 141 bp, Homo sapiens
  misc_feature (11)..(11): n is a, c, g, or t
  misc_feature (27)..(27): n is a, c, g, or t
  misc_feature (78)..(78): n is a, c, g, or t
  misc_feature (82)..(82): n is a, c, g, or t
  misc_feature (104)..(104): n is a, c, g, or t
  misc_feature (116)..(116): n is a, c, g, or t
  misc_feature (118)..(118): n is a, c, g, or t
  misc_feature (123)..(123): n is a, c, g, or t
  misc_feature (134)..(134): n is a, c, g, or t
ccctgagtagnggatgctgctatgcgngagttcatggacacaagttgattacatggtttttagaattataattatggnttcntcttatttcatggtaggttgtntttaaagatatnanaattnggatgcctttntgaagca

SEQ ID NO: 499373 - DNA, 133 bp, Homo sapiens
tcttagaggatcccctctaatccctaattcattgcaattcaaagatagagtgaatgtcacacggcattatgcacagacacatttgggatagagaaaacagagtgttgtctgcatagtccaaaggcaggacaag

SEQ ID NO: 499374 - DNA, 226 bp, Homo sapiens
tgggacacgatgaacctttcaccagccagacctatcacctatggcagccagagacaggaaagacatgatccttcagactcatgacgccacccaggacttccagaacaactgcagaatgaaagagtccctcatacggctccccagaccccatgctgccatcatacaagcacgggtatgggattgtatttgtccattaggcggcatctgtccataaatttgacgagca

SEQ ID NO: 499375 - DNA, 881 bp, Homo sapiens
gatttatttaagttgcgcgaagctaaaataaatcataaaacttgaaaaaaaaaaaaaaaaaaaaaaaaaaaaaaaaaaaaaacaaaaaaaaaacaaaaacaaaaaaaaaaaaaagaaacaaaaaaagaaaaaagacagagcagacaaggcacacaccacacagaccgaaaacaacaagagacaaacaaggaggcgacagagaaccagggcaccccacgagttaaaaacaacaggcaggagagaagaaacaagaagaaaagggggacagagaaaacagacaagagaaaacaagccgcaagcagagagacacacgcgggaaaaaagaaaagaaaagaacaaaagaaagcacgaagagaagaaaagaaggaagagagaagaggaacagaaaaaaaaccaacgcagcacacaacacaacacgaacaagaaagacagaaggaagagagaaagaaaaagacaaacaacgagcaaacacagagaaaagacaaagagaagacacaagacgagagacaaaaacaccagaaacactgaagcgagaaacaaaagcagcagaaaggacaacaacaagaaagaagacgagaacaagagaaacaaagagcggcgacgacgagtagagaaaaagagcaacagacagaaaaaaagaaaagaagaaaaagagaaaaaggaacaagaaaaaaagaaagaacagacaacacaacacagaaccaacacacaacgagacagcaaaagaacaagaacagaggagaagcagagcaacaagacacttagagaagacaagaacacagataaaagaggacaagagacaacgaagacagaagagcaacagaaaaaacgcgacagcaaaccagaaacacaagcaaaaacgccgcaagagagacaaacaa

SEQ ID NO: 499376 - DNA, 195 bp, Homo sapiens
atgaagtacgagtgcaggtgtcgttaggtagaagtggttccttttcctttgggtagatacccagaatatgggattgctgggtcgaacggctaattctatttatagttctttgaggaatcttcacaactgctttccccaggtggctgagcatattttacagttcccagccaaacaggtgctagggttaccgatgct

SEQ ID NO: 499377 - DNA, 442 bp, Homo sapiens
ggatgactatgaaacaggccgctatgggacaggggtctttgaccagaatgagtacctacgctatcaagaggccctgaatgagctggccactgcggataacgcacgaattgagagctctcagcgacatgaccagacagcagtcaaagacctaactcaggtccctgaggtctccccaacaaccatgcaggtgacatacctcccctacagtcagaggagtaaacgtgccaagcactaccttgaattgaagagctttaaggataactataacacattgtagagtactctgtgacggagctgaacgactcttgacgcatactaagccagtcagttgcaatgtgcaagacatgctgcatgccggacccgcctcgtaacatctggcccagcaggcccagactgtatccatccgttcccgctgcattcacagctcttaggcttgtgtctg

SEQ ID NO: 499378 - DNA, 684 bp, Homo sapiens
  misc_feature (175)..(175): n is a, c, g, or t
atggggacaatccgctcaggaacttgtggatttttataggcccgggtccccttgtgttcacagatggtctaaccctgtagacccactcaatctccccccttgagattattgcacactgctcccagggtgttggccacgaggctttctatagtgcccactttaaagatattttganaacggcttgttcacatcttgttgctgtgccgtgaactaggaggactccctatgcttcggcacaagtagcccgtaccataaccttcaagttttcttagtgtcggcccatataatgtctccagaaatgacctctaactcctcttaagccttatgtgtagtaatgttttccccttcatgcccgaggatcatattgtgtgctcagtatgtagaggtcaaagtcacggtttagctaccataatggtagcacgcgcctgctcctttcgcttagagacggctgtaaagcggtctgacatgcgattcagtttttttgaagattgtcaggctgtgccggttacataacccccaccgcagaagtcgtctgagtctatgcctccgcttgtccataaagtggggtctttgggcttttcacatgcagtcggcatttctgagaattaatgtatggggccctgcaaggttctctatcgttggatctgtagcccctgcatgcttcttgataaagcctgcttgaac

SEQ ID NO: 499379 - DNA, 236 bp, Homo sapiens
ggtcacaaaggagaatgggtccgggcacagtggctcatgcccgtagtcccagcactgtgggaggctgaggcaggaggatcatctagaggccaagagttcaagatcagcctgggcaacatagtgataccctatctcttaaaaaagaagaagtttttaaattatgaaataataataggtactggatttatgcaaaatgtcttttctgcgttcttttgagcatgacgtatcagcgtttt

SEQ ID NO: 499380 - DNA, 883 bp, Homo sapiens
taagtaggggtgatgaggaatagtgtaaggagtattgggggtaattatggtgggccatacggaagtattaagttgggggcattttaaattcttagagcgaaagctataatcatctgctcatcatttacccaaccacccaatttatttcttatacaacctaagccatgggccatccccttaatgagagcgggcgcaagaggataaataaggggcttgtacggcttctaaagattaaaaatggcctctaagccccatatttctataccacaagggcaacactcttaacagcccttaaataccccataactaagttatatatccagaaacccatacaggcctaatcttcccattacaaaaccagataatgcccctggggccccgagaacagcggccataaaaacctcctgtgtaaaccacatatatctcttgggggagggggcccaaccccctgtactcttccaataggcgatccctaaaaatttgggaggaaagtgcgcggccccaccccccctaaagacaagaataaattcaccatcccatgataaaacctcttattctctctctctaaacacagctatatatatacatttccttttaccaccacaaaatctctctaaagatgattactcaccgtgggagctatattccctgaagaaacaactacctggctgagtgaccggcctataaaaatccccaacaagtctcttcacgtgttttctaccacacatcttttcttaatgtaaaagaggctcttctaaactcctggggcgacaagcaacaaacccatcttttcaaataccacaacacacaagcaaccacacacaacacacacacatccagcagaaggggagaacacaccacaataggacacagagggagacgg

SEQ ID NO: 499381 - DNA, 637 bp, Homo sapiens
agcgtgctactgcataacaagcccacagccatcacgcctgatgagtacttcactgaagagttgtgatctgaaagacagggacataggaaggccgaacgagctgacgattagaacacagaagctttaaagcaatgtagtggatgtgtgaagagtttcccctctctctggaggagcaggtcattcccatcattgagctaatggacgtgcgaacgagtgctcatggcgtcgaagactgaggagattcatcaaataggaattcgccaccctggtatatcgctgtaagaataaaaattcccttgcttgcatgtcttaaatgcgcggattacatttggaaatgtacctgggtgtggcagtgccgaataatcggtatctcaaagtgtggatgggacccaggctgaattcaggaacgttcaggaccagcttcgtaagtggaggtatctgacagacaaacacctatgatgcccagtatgagagggccatccagggagaagcctcctcaccagcacagaaggcctgtgccccagcgccctgagcgagacaagccgttttgataatgacttgcagctagccatggagctctctgccaaagagctggaggaatgggagctccggctccaggaggaagaggctgagctcc

SEQ ID NO: 499382 - DNA, 353 bp, Homo sapiens
tgagccacgtgcccggcccattttgtattttttttagtagagacagggttacacgatattggccagtgctggtctcaaactcgctgacctcgtgatctgcttgcttcggcatcccaaaatgctgggattacaggcataagtcaccatgcttggctcctcatttttgtattattagtagatactggggttctaccatgtggggcaggctggtccctaagctcctgacctcgtgatccgtccacctatgtcctcccacagtgttgggattacaggcgggagcaaaagagctcgcccatattatacctatttctcattgagaaaacatgactctagtttgcattcatattacagtc

SEQ ID NO: 499383 - DNA, 330 bp, Homo sapiens
aattcacacaggcaaaggcactgactacaagagaagagacgagatgtgaagcaactttaactcgccaccctcaatacgggcagcaggagtgtcttaagcacagggcccgttctaccccctgggagctgcctggggccagcccctcatttctggctgttgacagtgttccccattccttagctccccggtatcttcattgggagtgtccagtggaccctctatcttccagtggccactttctgcaggagcttcgggttcgagtgtctacgttgtccagaacagctcttgtctctgagggctggtgtgcccgggttcccatccgcatctcgt

SEQ ID NO: 499384 - DNA, 1527 bp, Homo sapiens
gcactggccatgtgaggtgctgcctgcgcggagtgcgctggggcgtgtcatcctgtcaaaagccatgctcggcatgtgtctgggtacctgtggctgctgcccctggggtgatttttgacctgcttccatgcatgtcgacgcttctggctttcttgtgtgctctgcagaacggtgctgcttgtcccctgtgagctggtggcgtgcgtgggggacatgtgggcctgattgataccccaagaagacatggcccataccttgcactcgtgtacaatggccatcagtcatgtattcctagagaggatatcattgactagcatagataatggtcacacttcacccaattatccatggactaggttttgcccttgaaaggaaatatggttgaccacaaaacgtaacagaaggctgagaattgagtagggtagtaacaccagcccatggagagacacagggaatcacagaaacaccacaccaaggtgggaccatggagacactgggattccattgcatccattgcccagctttcaagtttggagatccatgtatcaaagaaggagggttggagatcctttgaacgaggaccaacctgaaggcacatgttcaaaagcaggtcacacattcagcccttgacacaggcatagggcccgtccgtaaatggtggcacctggtgagctttgtcggcttgacccagggtagagagaatgccatggatggttcccaaagggaatatcgggcaaattcattgggcggaacacacggtagatttgacattcggtccggaggatagcaattgaacctttgggtggaaaaaagggaacacccttggtaactaacaagagtcccacaccaaacagagcagtatggaccacatgacacacagaggaaaatctggcccacaagttggagcccaaacagtgggcccccgttggctgccaaacactgaaaggggcaccccagctatggacgttgtggtaaggacacattcccgacgcaattgtggtacggaaaagtgccatccaaaatgaaattccacaggcagagaaacaccaaagagactttatacctatggacgatggggaaatgcgatagtccgaaccagggaacatggatgtgaaaaccataggaggggaccatgtgtagtagcaggacctagggcgacagagggatacgaacaacccggacggacgtatggggaacaagccagacgggacaagcagcagggagacgagaagccagtgatgacaaatccaacaagagagaactggaccacacacaaacgggagaagcagagtgcgacacaaaggctaattgcgcgcacccaacagagcgcgatggggagcacgcagagagagacgagtccagaccgaaaagacagtgagacacgaacatggcgaagcagatatcacacgtgggagacaagcaaaacagcagtagagaaacctcacaaatcggagcagcaggacggatgacacacaggagaaccaccacgagagagacgaagagaagagaagagaaagacaacgtgag

SEQ ID NO: 499385 - DNA, 817 bp, Homo sapiens
  misc_feature (265)..(265): n is a, c, g, or t
  misc_feature (277)..(277): n is a, c, g, or t
  misc_feature (531)..(531): n is a, c, g, or t
aactttggaaggggtgggatttgaacagggcgtctacaaatagtgaagatcatggagttagaggaagaacaactagcttcagggcatggaatgagaaaggctctgagtcagaaggacctgggtcttatctggaagtggctatcatttgcattatttgcactgggtccagtggctgcagctggacgcagagtccctgagaaaatccatgcttggaaactagaccaggaatagtaagctgagaccagaaatgccatctgggggtgtntggactcatttngtgtgcagtaaaagccactgaaaacaagggaatctcgtgttccagataactgaggtggccgtatagaaagctgattatggcaagataccagcaataaaagtcaagtaggagataagtagtccaaatgagagaggatggacacttaaaccttagtagaagcagtgggattagagatgaggagacaggatttacttttcactaaatgtaatatgccatcaatgatgacacaaccatttttaaaattatagctcatntaaaaaagctgcaattcaatgatgacacaatgctaagacactgggcattgaaaaaaattgcatctttatttcagaggttaaaaaaggtgtccatcttagaactgatgaaattacaacagaataatttgaagaaggatggacatttggcattttgggaccttgagcaggtggtggaggtacatgatgccattaatagcgaatcatgggaaacatgggaatgacgaattgagtccaaaggaaaagaaggattctgcttggacctattgggtggtggcctaaaaatttg

SEQ ID NO: 499386 - DNA, 130 bp, Homo sapiens
tgcagccccagggggatactttgaacacgtcaatctcccaagccaaaggtgcggtataaccccagctggatggcaaaatgaagacttatgttcccctggtactgaatcccttgatatggctaatgccaca

SEQ ID NO: 499387 - DNA, 316 bp, Homo sapiens
  misc_feature (20)..(20): n is a, c, g, or t
gtgcaggggaatggaatggnatggaatggaatgcaatggaattgaatcaacacgagtacaatggaatggaatggactggaatggaatggaatggaatggaatggaatggaatggaatgatacggaatagaatggaatggaacgaaatggaatggaaaggaatggaatggaatggaatggaatggaatggaatggaatggaatcgttccgagtggaataggagggaatgcattcgagttgaatggaaaggaatggaaaaaacctgagtggaattgaagggaatggaatagaatggaaactaatagaatagaatcaac

SEQ ID NO: 499388 - DNA, 173 bp, Homo sapiens
cagctctccgaataggagggcttagagctgtgcctagtgactccagctcatgcgctgaataataggtatagtgtcccaactgtctttgtgagtttgtatgagaatagtcaacgtgtctggcgaatgatcgaggccacatgtcttgcgctgatccagcagtcttcgcagatgtt

SEQ ID NO: 499389 - DNA, 223 bp, Homo sapiens
ggagagaactagtctctcacgtcggctccccgccagtctcgggagcctccgcttccctcggctcccgctagcgtctgctgggagctgtgctcagggaagcttcgctgaaagcggggacagagggaaggagtggggaaaagagccatcgcaagagggggggggggaatagagaggacgacagggaggggtgtttgggggagaggacaagaacggcgagaagaag

SEQ ID NO: 499390 - DNA, 261 bp, Homo sapiens
attctgcaccacagtcatgctcactggttatacaaaaaaaactgacagcctgtatcaacgttgccagagtctgagggaccccaaatgatcaatgtgccaatttgcgtcatgattaggagcttattgtgcgataaggagataatccctatagtcataaatagtacatgtacagaagacagagacagtagaggtgtgcaatctaaactaaatcaggcagcgtattttgagtgagccctccgtatatcttttttctagaatgct

SEQ ID NO: 499391 - DNA, 156 bp, Homo sapiens
gcagcatcttcgggagccttaccctgtacagtacatgctgtacaggtttgtagcctacagtactaggctgtaccaaatagcctaggtttttagtaggctataccatctaggtttaggtccagtgacacaattgcgtaatgagggtaccgcgctcga

SEQ ID NO: 499392 - DNA, 118 bp, Homo sapiens
  misc_feature (5)..(5): n is a, c, g, or t
ctaanagcaaaccttctatcctaatatacgtatacacacacacacacacgcacacacacacatagcggggaaggggggggcacacctatagtcctagccactcagaaggcgggagcag

SEQ ID NO: 499393 - DNA, 620 bp, Homo sapiens
aatcacgccactgcactccagcctgggcaacagagtgagactccgtctcaaaaaaaaaaaaaaacccggatgtttaggccatgataataaattttggaggcggggggataagtccttttggtaacccccacttgtctgggggaatgatccgccaggcttgggagaaaattggatgttttgggactgaaacatggacgcctatcacggctttttcctgggtccctattgaagattcgggaccattagaaaacacaaaaactcacccttaaaatttgacgcaggggtcgtgtgatgcgcaacaaaatattttacgggacaaagcggaatatccttatggaagtaatactaacagttaaagggagcgtgtggcccattaactatttggctaagttttctatacgggctgtcacaggtaaacgtacatttggttcacaaacgtaggtttggtgtgtgtgtgcctaggttgtaacaacgacctggacattgggatggctaacaccgcatttgggctccgtccttttggtattcaaaattgggcctgcctcttaattggaggggagagcctgcttatcacaccttcggttatttatcacgaggcagtttgtaagacaccctcattc

SEQ ID NO: 499394 - DNA, 228 bp, Homo sapiens
caacgccgaaacttaaaggaaaggggggaagggcaccaccaggagaggagccgccgcaagtgcacaccatggtggtaggagcaaaaattcaaacgagaactttgaaggccgaagtggagaagggttccatgtgaacagcagttgaacatgggtcagtcggccctgagagatgggcgagcgccgttccgaagggacgggcgatggcctccgatgccctcggccgaacga

SEQ ID NO: 499395 - DNA, 331 bp, Homo sapiens
  misc_feature (11)..(11): n is a, c, g, or t
  misc_feature (48)..(48): n is a, c, g, or t
  misc_feature (96)..(96): n is a, c, g, or t
  misc_feature (168)..(168): n is a, c, g, or t
  misc_feature (183)..(183): n is a, c, g, or t
  misc_feature (277)..(277): n is a, c, g, or t
  misc_feature (289)..(289): n is a, c, g, or t
tttaagccatnaaatgtggaacctatggaaaaggagtttgggctttgnaaaactgagaacaaagccaagtcgggcaaacagaccttaatgagctgnactgtcaagaacttaaaaaggtgattgaagcctacgatgttgtcctagaggtgttggatgccagagatcctnttggttggagatgtntttaggtagaagaggccattgtccagagtggacagaaaaagctggtacttatattaaataaattaggtgagtaaagagggtaccctttgttttntgtgtacatggntgaggtacgaggaataagtttgataggtattgaagactgatt

SEQ ID NO: 499396 - DNA, 186 bp, Homo sapiens
cgggacagtgtgacaacgtgccgggagatcttgtctgtggactgttccaccaacaacccctcccaggctaagctgcggcgggacgtcgacggaatcccttccaggtcgctgagagggttgaccatggaaatacaactgagctgctaaaagtccttaccatgtggaaggatgctcaacaccttcctt

SEQ ID NO: 499397 - DNA, 178 bp, Homo sapiens
aggctgatctacaggacgcttatcttccggccacatacaggcttggctgttaagccaaatggatcaaagaaaacattccccagtgaagacaaaagcaacaagctcagggctgacatcaagatacctcccagaaagaggtagctacgtcgcgcctgtgcatagagtgcactgacgggtg

SEQ ID NO: 499398 - DNA, 181 bp, Homo sapiens
  misc_feature (14)..(14): n is a, c, g, or t
tatagtcccaaatngaaaaacaagaaggagtcacactattaaaatggtacagatccctcttttctatgaaaaacttaaaaataaattttaagaaacaaaacaaagtagacttagaagagaaggatgaaccttgcttgatccacaatctcaggtttcctgatgcatggctaatgacatccaa

SEQ ID NO: 499399 - DNA, 190 bp, Homo sapiens
ggacagaggcattcagctgtatagcactgctgctagtgacctagcgccactacccgcgagttaccctacggtgacgcctcctagacaagtactggcttctgtgagcacgtgctgacctccaaataccgttaagctggagcctcggtagccgttcctactgcccgctgggcgtcccaaggggctctactcc

SEQ ID NO: 499400 - DNA, 182 bp, Homo sapiens
ctggaaatattacataaaagtggagtttgccagggtgcatataccaaattgcttaacaggctgggtgtagtggctcacacctgtaatcccagcattttgggaggctgaggcaggcagatcatttgaggtcaggagttggagaccagcctggccaatatggtgaaaccccatctctacttaaa

SEQ ID NO: 499401 - DNA, 1049 bp, Homo sapiens
  misc_feature (205)..(205): n is a, c, g, or t
  misc_feature (217)..(217): n is a, c, g, or t
  misc_feature (228)..(229): n is a, c, g, or t
  misc_feature (267)..(267): n is a, c, g, or t
  misc_feature (294)..(295): n is a, c, g, or t
  misc_feature (326)..(326): n is a, c, g, or t
  misc_feature (344)..(344): n is a, c, g, or t
  misc_feature (346)..(346): n is a, c, g, or t
  misc_feature (352)..(353): n is a, c, g, or t
  misc_feature (369)..(369): n is a, c, g, or t
  misc_feature (414)..(414): n is a, c, g, or t
  misc_feature (496)..(497): n is a, c, g, or t
  misc_feature (502)..(502): n is a, c, g, or t
  misc_feature (524)..(524): n is a, c, g, or t
gcaagattgtgaaaaatgtaaataacagactcctatgcggactgatcagtgggagaggaggccccttcccaccggaaactctgagtgtgtatttcgcctgctgtatttgtaatccactcgtggtggtggcttttttttttttttttttaaaataaacagatgctctcaccggggaagaggagacagggaggggaaccaatggaanaaagaggagaanagtcttagagnngtggaaaaggcaaccaggtgggccgtaaggtgcctgcntggaatgcgtgtgcctccacacgggtnntgggcatccggactgataaccagccggccanactgagggatggaaggcncntgaaanngggggcccgtccaggnggacacccgcagaaagggagcttcgggggtctctggcactcgggntgcctctggccctctcggggtctctctttctgggtctctccctctctcctcctcagccgggtctttctcttgggggcacacnntagtnatggtggtgagcaagggaagtncaaaggaactccctctccagctcttctgaatctggggacaaagccttaaaagaggacaaaagagttagaagacagcatagcaacttcagctcagggagctaccagaagaaaaatagcaatggatgtggggtgctataaaaaaatgaatggtccgacaactgtggacattaacagaggcaatgagaaggggtgcaacaaaaaccaacaacaagggggggcgccgaaaaagaagaaaaccccagaggggggggcaccaagaatataagaggagaacacccaattatcgtggacccaagggggccccaaaaaggagaaagcgaacataaaaagcacaacggaaacggggcgcagcagaatacaaaacgctacagacagagggaacaaccggggaaggagggaacactctggagcaacacacctatactccggggggcggacccaaatgggaaacaaaccctcaagaagataaagcgccgcgaggaaaaatacaaatgacagcggatcacggctgtcaaccaacgcgga

SEQ ID NO: 499402 - DNA, 573 bp, Homo sapiens
gaccgccgagaccgcgtccgccccgcgagcacagagcctcgctcttgtgccgatcctgccgccctgtccacacccggccgccagctcacctatggatgcatgatattcgccgcgctcgtcgtcgaacaagcggctcccggcattgtgcaagggccgggctttcgcgggcagaagattgccccccggggcccgttcttccctcttccatctgtgggggccgcccccagggcacacagggccgtgatgcggtgggacaatgtgcggtccagaacaggaattcccattaatgcttgggcagaacggagtgccccaggatgcaaagacagaggcattcctttcaacctctggaagtgtaacccccaattcgaggccacgggctattctggtcaccaaatgtggggcacgacattgcgcagaacaatcgtgggcaccaacaacctttcttacacattgaagcgtgcgttggtgggctcccccggagtgagcaacccccggtggcttggcagtgacccggaggtgccccccgtggaaactccatataggggcacaacggcaaggaaagattggacccta

SEQ ID NO: 499403 - DNA, 100 bp, Homo sapiens
taatcagtcggtccctcttacaacaccctgttggacgcttgctcccacccaaggaagaggttgagcccattctccagtaaatatatatccccattgctta

SEQ ID NO: 499404 - DNA, 166 bp, Homo sapiens
atctctcaacatcacctttgatgatactcatgtactggtattactgtattcagttcatctagcttgttaaacaaatatttacaaagtgctaagcagcatgctcaatgctgaggacatggcaaataacagagacgataatccctgtccctggagtgtgtacattcgt

SEQ ID NO: 499405 - DNA, 1208 bp, Homo sapiens
  misc_feature (485)..(485): n is a, c, g, or t
  misc_feature (563)..(563): n is a, c, g, or t
  misc_feature (570)..(571): n is a, c, g, or t
  misc_feature (588)..(589): n is a, c, g, or t
  misc_feature (600)..(601): n is a, c, g, or t
  misc_feature (626)..(626): n is a, c, g, or t
  misc_feature (668)..(668): n is a, c, g, or t
  misc_feature (672)..(672): n is a, c, g, or t
  misc_feature (750)..(750): n is a, c, g, or t
  misc_feature (761)..(761): n is a, c, g, or t
  misc_feature (793)..(793): n is a, c, g, or t
  misc_feature (809)..(809): n is a, c, g, or t
ctcttattaatgtaaacacttgattatattatgcttctagctactatatgattataaaactgaaatggttttataggttaaatataatcaaaactatagctgataaaaatacagattaagagcataatattatatgccacctgatgtttacttgaacgcaggtttctgttcatagcaaaaatttggtactgacttcttagaaacaaatctgtttaattttggcttgcctgttctgtggatggtgtgatgactcaagtcttccaccatttcctcttgtttgaaatgctgtaaaactttagcataacttactgtggcttcatttggcgtgaatgcatcgttctttctctctctctccctctctctcatacacacacacatacacacttattttttggtctgtgttctcttctcattagccttgagattgtgtggtgatactcagttatgagaagatcattctgatgagcacaaataagcattaattntaagcttaaggattttctagagccccaatttgagaaacacttatttgcatggtagatatgaagggaccatagcacttnagtcagnnttctcatttaacatcanngagacacacanncagccaaagaatctttgaggcccgntgcagtggctcacgcctgtatcccagcactttgaaaggccangcangtggatcatgagtcagaaattcaagacaagctggccaagattgtgaaactcattttactaaaatccaaaataagcggncatggtgcggntgctgtattccagtacttggaggcttaagcanagaatgttgaacccgnaggcggaggtgcagaaccccagacgggccatgattcagcctggcaacagatcggacttggccacaatatatgggcccatttgggtatttgccaattgcctaaggggcgttaaaatattggccgttttaaacgcgcatggaaaaactcgggtacaattaatgccttgggaaacccttttcacgtggataacaaagccccccatggcttccaaaaggcaccttgtgctagaaatttcgcgtaattttaaaacgcccaatttgtaacaccactttcaaagcggctgcggaactctataaaaaaacacacccgcatcgggttttccttacagagcctttggctccactcctagttctcatcacactttctgggcccacccccccccatcatatctgggggccc

SEQ ID NO: 499406 - DNA, 543 bp, Homo sapiens
  misc_feature (502)..(502): n is a, c, g, or t
  misc_feature (515)..(515): n is a, c, g, or t
  misc_feature (535)..(536): n is a, c, g, or t
agattcaccaagaaataaagtcaaccaaagaagcaaagtcatggaaaagaaatgcaaatctccacaaaaggcagcttttcagggctattcctgtctacacgccctctgaataaccatctcaaaatatgttcaagaagtatattttggaggtggcattgcagatgggatctcaaagccaagtctctacatatgatacaggcaaacagatgtttacatgacttgctcctccttgccttctgccatgattgtgaggcctctccagccacatggaatttttttcatccagtgactaccaaatggaggaattatcgtcttgaaggggaacgtatcaatcacttaaggaaactagatgggagactgaaggtggcaaaaggagaggcatagcaaatggaagaaggtgtcctagagtcactcttaaactttgagaagtttgagatattaggttggtgcaagagtaattgcaggttttaccattacttttaagagcacaaggaccaaacanatgaatatttacnctaaaaaataaactagagtnncttcaaa

SEQ ID NO: 499407 - DNA, 226 bp, Homo sapiens
cccaggacagagtctaatttccagggactctttacaggtggggtgggggaggcctgaacagcagcgcatcagctatgaacttccaccctggaagaccaggcaccttaggaaactgtccaggttgccttgaccatcagccttctgcctacttccacatgggactactctagtaggtataggtgacgctgtgctccccagtttccatcggaggtagctgaaatagtgc

SEQ ID NO: 499408 - DNA, 910 bp, Homo sapiens
  misc_feature (351)..(351): n is a, c, g, or t
gacgcgtgggtcgcccagcgtcgcgtgaaggaaccagtgggaattgggttcggagatggaaatcatggaggtccagaaagtgatgcgcaataccagtcatggtataaaaactattcaatcttatatctcaaggtcgaatgaactgtgtctggccacatatggaagcatgtgcattgatggtcttatatttcaagtgaaggtccaaaaaaactccagctgtgaaagcaacataaatggattttaaacggtctacggttcttaacctcatcgtgttaagttcccatgcctggagaagctaatgccaactcatcatgtgataattcacttgtgtacaataaattatgaaccctnggaaaaacaacacacaaaacacaccaaccgtagaacacaaacacaaacaagacaaaagaaccaacccaccaaacgacacacaaacacaacaccctacagagggcggtgcccccacaccaaagaacacaccaccgagagaggagagcacacgcaaagtccaagccaggccacgcacacattatctaacggaaccagcgagagccaccctaaagacgaccgacgcacttaatatcaaccaaggcagcgaccgcgagcccatcaccacacacaacacccgctgcataacgggtcaaccaaatctctcttcattgcacgctcacatattacgtagaacacgccacatacctccttcgtcggccgcagacagacaatatatgtaccgacgccctcatccccacgagcatcaaactacgcgcacgacggtcaaaaaaccacgtcccagagcgataatttgtggacacaccccacgaagtcacatcaccgcacaccacaataccatgtcaccacgataaaaacactaaaacaaaaaaatctactaaccagcccccccgcatcacac

SEQ ID NO: 499409 - DNA, 356 bp, Homo sapiens
  misc_feature (19)..(19): n is a, c, g, or t
  misc_feature (35)..(35): n is a, c, g, or t
  misc_feature (88)..(88): n is a, c, g, or t
  misc_feature (95)..(95): n is a, c, g, or t
  misc_feature (186)..(187): n is a, c, g, or t
  misc_feature (199)..(201): n is a, c, g, or t
gttgaataaattagggtgncttcatctgggttttntttagtacctaagtctacaaccctttctctttttctattgtgtttcgaactcnacattgnaatactatgttgtcatggaatacaacctttagatgtttactgctgaagtaggtcagaaattgtattatttgatttgcctcaaacatccacnncccccccaaaannnaactttttttgaagcatgaactctgaattatgtttttataaatctgactaggcaaacctagattctggtttcacaatggatttattttctctctcagtctccattttaacaagtgcttttgaaagtttataccagaaagctttaaaaagttaggt

SEQ ID NO: 499410 - DNA, 807 bp, Homo sapiens
  misc_feature (177)..(177): n is a, c, g, or t
  misc_feature (190)..(190): n is a, c, g, or t
  misc_feature (196)..(196): n is a, c, g, or t
  misc_feature (246)..(246): n is a, c, g, or t
gagcttacggctagtacgaggccgtgttaatcggcagaggctaaacaagagctcagtaattgggagatatatacacagttctcagcagtacaaatcaaataagctcctcattgcaacctttgacttctatttcttggcctttgttcttttttttttcagaatcaaaaagaccctctngctttggacaaantatatnaaggacctggaaccagtgtagagatggcaaagtgggcttccagagcttcntttccctaattgcgggcctcaccattgcatgcaatgactattttgtagtacacatgaagcagaagggaaagaagtaggcagaaatgagcagttcgctcctccctgataagatttgtcccaaagggtcgctctaaggaagtctgccccacagcttcccccatagaaggatttcatgagcagatcaggacacttagcaaatgtaaaaaataagatctaactctcattctgacaagcagcagaaagaataactgtttagattcaccagataagctttggattctttgtattgtgtgcatccccttgccctcattaaataaagttgcttttttaggttcccatagaagtaccctgagaactactaactacagatgaagaaagaaaaattggcggagggaatgttttttggggtggggtgaaaatgaatggtccagaagtgggggcctggaattgctgtcttcccagaacccgttttgtgtctcagatggggaggcaaggggcggggccctctaagaggagcgcctgatattgtccagaaccgggtgaccgtgttatacggggaga

SEQ ID NO: 499411 - DNA, 631 bp, Homo sapiens
catgttatctgctcctcgtggtaatcatgtagacaatgctcacctggggccacatgagacgtcagtgttttaaagatacatgtggtattgattcaccacttttcccatgggaaaagtggtggcactgccaaaccatgattattttaactatcttgaggacatgagaataagagatatttagatgccatggcgcggaggactctcttattctcatgtgtggagagccgggtatcccctcatggttgtctttggaacatcagactcatgtgtacctcagcaattctaaaaacatgggaaaagtggttcagtttatcgcatgcatttcaataacatggtctagaacatgttaaatggaaacagaaggctgacatgatggcgtgcaccatcctggccaacatggtgaccacgggcaccacttttcccatgctcatagcagtctcttattctcatgtttcaatgttagagtgtcaaacatgctaagacttcacaggccagactcatggacgaccccgacaaaagcaaaaacatgggacaaagtggtgactgaagagtccatgactgtattggactgcatacattccatggttgtggttaaaattgggctcccatgttacatggcaaagctgaggta

SEQ ID NO: 499412 - DNA, 208 bp, Homo sapiens
  misc_feature (199)..(199): n is a, c, g, or t
tagcattcatactgtccatcatggatctgtttagattagttgagtactgttctacttacatgttgtatttatcgttatttaccagtgacagatattatcattggtctgacaatcattctcacaggtccgagtaaatgtacaaataaaaagagtgctaaaattttacctaacagttttttttgttagtgatagaacactngtttgtgag

SEQ ID NO: 499413 - DNA, 767 bp, Homo sapiens
  misc_feature (82)..(82): n is a, c, g, or t
  misc_feature (137)..(137): n is a, c, g, or t
  misc_feature (150)..(150): n is a, c, g, or t
  misc_feature (156)..(156): n is a, c, g, or t
  misc_feature (206)..(206): n is a, c, g, or t
aaatggaacacgccatggaaaccatgatgtttacatttcacaaattcgctggggataaaggctacttacaaaggaggacctnagagtactcatggaaaaggagttcctggatttttggaaatcaaaaagaccctctngctttggacaaantatatnaaggacctggaaccagtgtagagatggcaaagtgggcttccagagcttcntttccctaattgcgggcctcaccattgcatgcaatgactattttgtagtacacatgaagcagaagggaaagaagtaggcagaaatgagcagttcgctcctccctgataagatttgtcccaaagggtcgctctaaggaagtctgccccacagcttcccccatagaaggatttcatgagcagatcaggacacttagcaaatgtaaaaaataagatctaactctcattctgacaagcagcagaaagaataactgtttagattcaccagataagctttggattctttgtattgtgtgcatccccttgccctcattaaataaagttgcttttttaggttcccatagaagtaccctgagaactactaactacagatgaagaaagaaaaattggcggagggaatgttttttggggtggggtgaaaatgaatggtccagaagtgggggcctggaattgctgtcttcccagaacccgttttgtgtctcagatggggaggcaaggggcggggccctctaagaggagcgcctgatattgtccagaaccgggtgaccgtgttatacggggaga

SEQ ID NO: 499414 - DNA, 465 bp, Homo sapiens
gatggagtctcactctgtgaaagacgaaagaagatgatgatgatgacacagacactcataggaaaatgcattatggagatgttggcagggattagagcaagacttctacattctattgaaaacaggattgctggcagccaccaagagctgggagaagtgaaaaatagattatcctgtagagccccttgagggagtacagtcctgccaacactttgatttgagacttctgggttcccagactaaatgaagagactcctctatgccattcaccactgtgttaaatacttgcaaggaatcttacaacaggtggtgtcggacaaacacaggtgcgcatacactaagacatccatggtatctacagatacctacacagcatgtactgtgagagggaaggtgggccaagtgtgatgggtgcggtattactcatgtctcaccactacagagaacaagttctgcagaatttct

SEQ ID NO: 499415 - DNA, 686 bp, Homo sapiens
gggctgtaggccacggatgtatacggtgcaagctgccagatcctgctgcatctagcgcattctcgacaaaaaacctatacagtgctggcccatggacatgcctttggacctctcattcgtcgcggacagaccctaatatattctcaacaaattggctcaaacctgcaacatcatacttgtgaagaaacttgtggcgtcgtaattgcccccatagacgcgaccacggacgacacctgaacttgcgacaccgacaccttatcttgctcaccgcccttgccccacccaggaacacttcgtacccaatgaaacaacctactataagtcgaaatactggtggccttccgtaacttcactcttggggccattctcctacttggcgccgccaccttggcccctcatccccctccatttgcgcactcatatcttcaccaaaagcttgatgggggtaactcctcacggttgttcccaaactgttgggccacactccttggcggacttaagaccgtttccgctgcgcacgcagctaacaccgagcacaccgcgcaacgcgcttataccacgcaagcacgctgggttcaacacccgcttcactacaaccgcgcccaccgaatgacctaagcccacaaccttaccacaacccgtgctgaccacaacatatcccaccgcttctacaccgggccaacaca

SEQ ID NO: 499416 - DNA, 182 bp, Homo sapiens
acgagatcttaagcaatggtcagcaaatgtcctctgtatactagaataacaatcatgcagtcacagtatccagtattgtctgcaagtcacttcacaaaaactacttattttctgttattcttatttgggaggcacatggaactgaccgatgtagcagaccaattttattcaactaccccacc

SEQ ID NO: 499417 - DNA, 245 bp, Homo sapiens
gcgcacaaaacagccaccgattttgctatgtctctgagctgcgagataatcagacagctaaatggagactgagcagctggtccatagaggctactatagaaacagctacaacagtctaacaagtgcaaggagcgatgaggaactttagacggagcagctgttattatggactttcaaacatctgaagatgacaatttattagatgctgacactgcaggtgtgactcattatacaatgacaaatgg

SEQ ID NO: 499418 - DNA, 636 bp, Homo sapiens
ctaattttttttgtatttttagtagagacgggggtttcaccatgtggccaggttggtctcgatctcctgacctctggtgatccccctgccttggcctcccaaagtgctgggattaccgacgtgagccagcgagccaccgtctcctggtccagagaaatctttaagagcagtagtaactccttcagcaccaccgtgtgccacccccaaaagcgtgattgagattgaacctagaggctagagcagatgaggcgagcaagaaaagagttcatgcatgaaggaactccactagaaggcatagttgcacttgtcggcatcttcaggttagagactagcagaatttagatgttcaaggacataagatactgaaattatcagatgtggactgtaacatctgatggatggaatatatacactagtggaagtataaatattaagggtacattttatgtagcatagaattcataaggtggactcagcaagaatgagcaaggcaatcaggaggtgtcaataagatgaccagatgaattttcaaagagacgaacaggataatagaactttaaaaggagtttaattgttgaaagtgtagaagctctggtggaatgggttcaaacaggagattgtatacagtaaaggaga

SEQ ID NO: 499419 - DNA, 463 bp, Homo sapiens
  misc_feature (19)..(20): n is a, c, g, or t
  misc_feature (70)..(70): n is a, c, g, or t
  misc_feature (89)..(89): n is a, c, g, or t
  misc_feature (100)..(100): n is a, c, g, or t
  misc_feature (114)..(114): n is a, c, g, or t
  misc_feature (250)..(250): n is a, c, g, or t
  misc_feature (342)..(342): n is a, c, g, or t
aaaaaaaataaaaaacaannaaagtaaaaaaaaaccaaagaaaaacaaaaaaaaaaaaaaaggaaaaaanacaaaaaaaaaaaactaancacaaaaaacnaaaaaaacaaatanaactcaaccaaaacaaaaaaaacaaaaaggaaaacccaaaaacatgtcttcaaaaaggaagaactacaacccatcaataaagatccaggcagtgagcgaactttttacaccctgtagaattgtgggctgaagcganactctgattttctgtctagtatcagagaatgctggtagcttaaaatttttattttaggacttgcaaaaaaattttcaggaaccgtcaaaagngaagcagcaaattcacatattttcgacttgagaaatgcttgtggtatgtgttttccaaactgccccctatatgtaaagttcagtttaaccactccttgccttgttattactaggttttttg

SEQ ID NO: 499420 - DNA, 618 bp, Homo sapiens
  misc_feature (151)..(153): n is a, c, g, or t
  misc_feature (155)..(156): n is a, c, g, or t
  misc_feature (207)..(207): n is a, c, g, or t
  misc_feature (245)..(245): n is a, c, g, or t
  misc_feature (247)..(247): n is a, c, g, or t
  misc_feature (276)..(276): n is a, c, g, or t
  misc_feature (301)..(301): n is a, c, g, or t
  misc_feature (406)..(406): n is a, c, g, or t
  misc_feature (475)..(475): n is a, c, g, or t
  misc_feature (484)..(484): n is a, c, g, or t
  misc_feature (530)..(530): n is a, c, g, or t
  misc_feature (603)..(603): n is a, c, g, or t
  misc_feature (617)..(617): n is a, c, g, or t
atcaaactggcgcagatcaggcctctataaccgccagagatcacattcagctggtgaaactgcaggtggaagaggtgcaccagctctcccggaaagcagaaaccaagctggcagaagcacagatagaagagctccgtcagaaaacacaggnnntnngggaggagcgggctgagtcggagcaggaggcctacctgcgtgaggattganggcctgagcacactgccctgtctccccactcagtggananagcaggggcagatgcaccaaagctttgcnttggcatgactgtctgtgcaccganaagaggcggcagatcctgcctggccaatcaggcgagacccttttgtgagctgtgagtgcctcctgtggtctcaggcttgcgctggacctggttcttaacccttgngacttgcaccctgtttaacatttcacccactctgtacagctgctcttacccattttttttacctcacanccaaagcanttttgcctacctgggtcagagagaagagtcctttttgtcatgcccntaagttcagcaactgtttaacctgttttcaatcttattacgtcgtcaaaaatgaattaagtacttgttccccnggttgggaatgcang

SEQ ID NO: 499421 - DNA, 364 bp, Homo sapiens
  misc_feature (205)..(205): n is a, c, g, or t
  misc_feature (278)..(278): n is a, c, g, or t
tagagatggagtctcactatgttgcccagagtggtctcaaactcttgagctcaagcaaagctcccaccttggccttccaaagtgcttggattacagatctgaaccacgacacctggccctgggctctacttttcataaagtttcacattttagactttaaatccaaacccagaaactatctcaacaagagttaataaatagactncaactctggggaatttttaagattacttttttgatacgtaaagtggcatagtcacacataggaaggcaagggntttttttttatttatactaaaaaataactaaaaaggcactatttccctaacatttttgaaactttgactttaaaaggcacttttta

SEQ ID NO: 499422 - DNA, 109 bp, Homo sapiens
gtgacaacacgatcggcatagcgcactacaggccagaactcctgggctcaagctatcctcccacctcagcctcccgagcagtcccaattcggcgacaagggcaccgcga

SEQ ID NO: 499423 - DNA, 512 bp, Homo sapiens
tatgcgccagggtcaggaaaaaaatgagttcataatacatttgttacgattagaaggaagaaaacaaacaaacaaaaaaagatggcatgtgtcgaggcaagaaaatagacaacatattccagaatgaaggcaaagaattataagaggataaaacagcagtaactaaaaatgataagtaagcgataaacacaatgatgagtaaaatgtctattcctgaatccgagacggtgcttcacaaagacagcctcagaggccacaattccaaagcttttttctacgtacagatattctccccgatgcctgggttaatggcgcccgaactgcagaaaacataacctcaaccgagttttctgcttcaatgacaaatgacaccagagccccaccaccaaaccatggctggcatctatttagttctgagcactgctctgacagaatgcatcagtcttgctttgctctcagcaaaactgggtgcagaggggacggctgttagcctggtcgttgttacacattct

SEQ ID NO: 499424 - DNA, 257 bp, Homo sapiens
ccaagtaagggtactgtaggatacgagaatgggcggtaagagctgatgtcagtcaggggaggaccagatatgtgccatgggaagggcgctcaatgtgtgatatagtatattacaaagtgatgtggctttgcatggttagaatgcgaaccaaaaaacaagtgagatagagtgtacccctaaggtaattatgaaccgtccagagcatctggaatccgagaatataagcatataggacgtgctgatgatgctatacaaaa

SEQ ID NO: 499425 - DNA, 391 bp, Homo sapiens
  misc_feature (14)..(14): n is a, c, g, or t
  misc_feature (17)..(17): n is a, c, g, or t
  misc_feature (42)..(42): n is a, c, g, or t
  misc_feature (109)..(109): n is a, c, g, or t
  misc_feature (112)..(112): n is a, c, g, or t
  misc_feature (239)..(239): n is a, c, g, or t
  misc_feature (276)..(276): n is a, c, g, or t
  misc_feature (336)..(336): n is a, c, g, or t
  misc_feature (376)..(376): n is a, c, g, or t
  misc_feature (390)..(390): n is a, c, g, or t
aggcagccacctgngangtctgacatggctgtcagcgacgcnatgcatcccgatcatttctccacgttcgcgtcatggcccggcggaagggagaagacactgcgtcaanagntgccccgaataaccgctggcggatggagctctcccacatgaagcgacttcccccagtgcttccggccgcccctatgacctggcggcggcgaccgtggccacagaccatggagagcggcggcgttgcnggcattgcggcggtacaaccttggcgcccctacctcnggagagagaccgaggagttcaacgatctccttggacctggactttattctctccaattcngctgacccatcctccggagtcagtggccgccaacgtgtcntcgtcagcgtcaant

SEQ ID NO: 499426 - DNA, 1190 bp, Homo sapiens
gagcggggctgcggcctgcggcggcggctgcttgcagccgctgatcttgaagcaccgtgactgtgctggttcacgcagtgctactctatggcagcgtgggacgtggcgggtgaagcgttgcatgccggcgatcggtcgtttccggtccgtctagaggcgcacggtcggcggcttgctccattggaagtagatgtattgtgctggcgcttgagcacatatagcgccagtctccgtcctcgtgcttcgcttgtctaactatagatggtcccagggaacgtgactgcagtgaagcgacgacactggctagccatatattgcatagccgggccaggcgtcacaacgcgacgctgttcacattattccgccaccgcgctaccgcgtgctctcctgacgtacccaacgcttaactatgcgctcgtgtacatctcccgtctacagcgtgaccctatacgggccttgtcgacactctgtaccgcacctccacgcctctccggcactgccccgtcgccatgcgtcgtaagttcctcaggcaacttgcccttcctctttacatacgacggagttcttaaccattgcgcccacgccacacgctcaccacctacttgtcgcgcgcagctgttcaatgtcaccttacaacttgcttccacaagctggacgacactgggctatcaccacagggcgctaagttgttacaacagagagcccattatagttccccaatacctgccaccgcccaaatgcgaacgtcccctctctcgccaaccggcgtcacgtcgtcgccgacctaggggaagagttcaccccccacgcagagaggaacaccacaaacgttaccttacgcatatgcatctgtgggtacccgcgaaacacctgtccaacgccatatgggcccccttatccccgcgacctcccgccaccccgtcacactgttcaagtagcttacttcccttgtcttacccagcgctatttactctgtcggcgggtattgcggtccccgtgtcaagtgaggcaacctgtgccttgtcaccatgtggcccgtcctcgaccaaccaaattctcaaacagcacgcgttctagtgcaacagcgcaacatgaggacagttgttatatcctgacagtggctcgcaagccttagctacctttctacacgggtatccctgggtcgtgtttaacacacaaacacccttgtg

SEQ ID NO: 499427 - DNA, 419 bp, Homo sapiens
caggtcacgccgtttgtgctcaactctggcaagtgcaagctggtggtcgaggagtactacgaggtgctggaccactgctcttccatcctcaacaagtacgacgacaacgtcaaggcctaacttcaagcggggcaaggcccacgcggccgtgtggaatgcccaggaggcccaggctgactttgccaaagtgctggagctggacccagccctggcgcctgtggtgagccgagagctgcgggccctggaggcacggatccggcagaaggacgcacagcccacaccccggttcctggggtttttgttccattccagcagcacttggtcatgcgtttcgtcacgagtccagtcctactgttgccagcccccctgtccgtgatgcgtctggtttctgtgtatattatgtccttcatttatctatc

SEQ ID NO: 499428 - DNA, 659 bp, Homo sapiens
  misc_feature (2)..(2): n is a, c, g, or t
  misc_feature (107)..(107): n is a, c, g, or t
  misc_feature (165)..(165): n is a, c, g, or t
  misc_feature (231)..(231): n is a, c, g, or t
  misc_feature (348)..(348): n is a, c, g, or t
  misc_feature (419)..(419): n is a, c, g, or t
  misc_feature (649)..(649): n is a, c, g, or t
tncctttttcccactccattctgtcatttttttcacatatgtacaagaaaaatgaaagagtctctgtgtatgtgtgtgtgtgcgagtgtgtgtggtttgtgttgttnttttcttgttttaaaaagctctgctggtcgggtgggtgggggggtgggcgggggggcnggcggcgcggtcaggtgggggtcccgtggggggtgtccggggcctctgggggggcgcctccaggcncgggctggaagggcatggggatgggggtcttcaccgggctctgcgcgggacagccccccgttgggtggcctgtgtttgcactgcatggggggcatggtcgccgggctgctcagcggnagcggcgggttgctgctgggcgcctggtgggagtgtccggctggtgccgtggctgctctgctctggcgggngggtgctgcccgcgagctgggtgttctggtactcccgtgtcggctccaaggtctgggtgggagccaggccccccatctccagggccgagagctcaatcgacgctggggaaatctgcttgtgagcaatgtcttcatccatgaggctgttcatgcgccggtgggcctgctccaagttctcttctttgtcctccttgggggtctcctggtggcaccggttgctgttcccccanaactccaggg

SEQ ID NO: 499429 - DNA, 2187 bp, Homo sapiens
atactgagtatgctacttaaaatttgatcttcattttcctctggaaataatagatacatttagcctcactggtaaaacttaatagtttaaacttatcaagcatgttaaaatttggggagagtttgtaagtaactccccaggtttattaagtttatattttgggggcaagtaataacatgtacttgacatcagccagaatttttttgccctaaaatagaagacaaatggtcacttttttttttttctgtagctagtgtaaagatagttgtatagaacttttgcttgcattgattggcttccgagatgcagtcaagtttactattttctgtttagtatattactagtttgaaagttctttttggaaacctacttgacttcagtgcttggcagttcatggaaaactaacttaatgttaacttattaatccgggttctgtctgctaaaacttatgtgactttcttgattaacacttcttttgaaacacttttcttctttctctttcagtcttggtctttgtaatgggaaaagaaggggtccatggaggcggattgaataagaaggcatactcaatggcaaaatacttgagagactctgggttctagctgctaggcagactgttaagtattaggggaaaattgctcttaaactttcctagctataagcttaagtcttaattctggaaattttattggcaatgcagggtgatggggtatgaacctgtgtctcctttgtatccctctgttggtggggaaaggtgtctttctttctgccctccccccccaaaataattctgttcacttttgttttgtttccttgtgtactccagtattggttatagtcatgggaaaggaaggtgtccacggaggcacacttaacaagaaagcatatgaactcgctttatacctgaggaggtctgatgtgtaagcagcctctccccatctacctagcaactgtcttcatcaacaaccctaattatggtcacaatgctaccaaactgtagatggtagctaatttctctttacctattttctaatgtcatgattcctgtttgcccaatggatcatttgtatgttaaccactgtatgtaaccaacccttatctggcaacataattgcagcacaataatgatttgcatgataccttgaaattggggggagggggcatgccaagttgggcatcactttgtcttagcaattaatgggatattgattactaaaataagttaatattaagcaaggtgccggttgtacaatctctgatcagtgtcttttcagcactttgagcatttacttggctcatttagtcttccttttgtagcgcatggttgggaggaaaaagtgcatgcatcattccttcactcttctctttttcccgcccccccctcccttcgcacataggcatttggtttgcttccatctttttttatgcagtgcctgtttttttttaaccaattaaaatcccttttgttgatgagctattgagagctgcagtagtttgcttttagtattgttgttgcacttgagcagagacaaacctttattcatagtgtctacaggacatatgaagagtgcaatggcaaaacaagagcaaaaagcacttcctcccatgaccttacagtaaccatactgattgaatccccagggacattccatcattgcaatagctcagatttttcttcctttttctttgcacaccagctctactctttagtaaaattgtaaaaggctgccattatggacattaggtatcccaacataaccatctggagtgtgtccagtttgttcttcataggaccaatttttatttgcagcttgagtttttatatgaagttgcattattgtggacttggctgtcttgtgatgaatttttttcatatgtattctgtgccatactattgttaaaatgaactgttgctattgtgagatggattttaactgacctattaagggtttctttcgaatggcactactttagggacattctagtatttgcttctattgtttgggccttgtggataatgtacagatttaaaaacaaatcttgttgctgatttgtccatttctttccctgcactttgttacatctgggatacagtctaactcatctgatttaatatgcatttaaaaaaatgccataactattaaacaccttgtttacagacagatgaaataaatttattccaaccca

SEQ ID NO: 499430 - DNA, 2021 bp, Homo sapiens
  misc_feature (1641)..(1641): n is a, c, g, or t
  misc_feature (2021)..(2021): n is a, c, g, or t
acacaagtggatgagtacgaggtctgcctgaaaggataggcataagctctgtggtaatgcgatgcgtagactcgcgtgtctcgtgggagctgtcctctctaccgatcagctcggtctcggatgtgcgcgagacgcctgtggggcttgcccttgttcacgaccgtactcgcgtgaattgtgtgggtataggtctgtgtgtcctggttcgggcccaggatgctgcgagcagcttgcatagtgtttcctctaaaaactcgcggcggtgagttgcttcgagttgccatagcgttaaagccatacccattgtgcgacaatggtcaaacgaaagcttgcaattgtaatacacatttcctcgatcttcagagattggccaagcccaaatagcatatgccctttgtggcaagtcgcaatagcctcctatctcgttgaggcgaacaagaagtgtttgcgccgcatttacaaacttgtacaagcagaaagtccgtatgtcctatgtgcaagacggatattatgtgtgcgcgtaccagtaatggcccaaacccgtatatggttatggggtggggaaattaggccaaagagacagatgtggttaactccgcatccccaaccatagtggaattacgccctagggcgattgagcacgttataacaagcggatatgggccgtgcacaatgggggttagggacttttggaccttctgcccatagagagaagcgtcggactttccaccttatggtgggggcaacaaagacgtcatcaggggccgttcacccgagcgctttggaaatttgtaccacgccgcgttggggtaacctactgggcggaggtttagtgggcgaaaaccatagttggagggggctgccgaacccgattctctggcgaagtttggtcccatattgctaatggtgggtcccttggggaggggcatcacggatgacgtggcgcagcccgcccagttggacgtctctggtattccagacgcgctgcttttccctctcggattttaggaaccaccacgcgccatggcgggcagaaggcgcaaattcgaggtgccctccctgtcggccatttgttccctccttgaggagactgtgtgctctttggggatccgcattggagcctctggcgaccgaagtctctcggtttccgcaatctcacatatgggggcgtcgtccatcggcgcaagagattgggcgcccgggcttttgaatgtttcggatgagatgggaaggtcacccggctcttttatttgtcacgacggaaaccgttgaacattttcgcacgcccgcgtgtttggagcgcgcgtcttggcgcgcccatacgggcgcagcgctttccccccgagtcggccccccatttttggcgcgagccgaggacgaccctcaggttgggacgcgcggggggggcgagcgggactaccgatgtctcctaccaaccgccggcgtctgctgccccgccacacagcacaacgcggacgcaggtggcagttcttagcctcccatggtggctaccggtgggttactaacccacacgagaaatctggtgtctctccgcaaaaaagatgaccttccctagagagggcctaacaaagagtaggagacaaattaaatttttggctgctactatataaggtggtgcgnagacccccacaccactcgaggaaaagaaccagcgggggtgggagccaacgacgcgctcctctggctaaccaacaaagatcgtgtgtcttgattagattgactgcccaccgctcaactcgaggatggacgcagcagacacatcgacgcacgcgtgctctctaccgctaccacacacactgctgccagcttgatgtagcaagcccacatctgaagtccagccatgagaacaactattagatgtttgccgcaccccgcagacgatccaaatagatcgactaggtgaaagcagcaccaccacaaatcaaatctaatagcaaacacgcggctgcttcttgagcttacgatgccgccagaaagcatcactcactacactatcaatn

SEQ ID NO: 499431 - DNA, 494 bp, Homo sapiens
  misc_feature (112)..(112): n is a, c, g, or t
  misc_feature (148)..(148): n is a, c, g, or t
  misc_feature (423)..(423): n is a, c, g, or t
aaccctggaggggcgttcgggtgccatcgtcgcgctggcaccgaactacgccatctacatgctgggccgcgccctgatcggcgtggtcgtcggcggcttctggtccatgtcngccgccacggcgatccgcatggtgcccaagcgcgangtgccgcgagcgctcgccatcgtcaacggcggcaatgcgctcgccacggtggtggccgcgccgatgggcgcgtacctgagcaccgtgatcggctggcgcggcgccttcctgtgcctggtgccggtatcgctgatcgcgctggcctggcagtggaagacgctgccgtccatgcccgccgccgcgcgtgcgccgggcatcggccaggtgttcaaggtgttcaccctgttcaagcacccgggcgtggtcgtcggcatgctcgccagcagcctgctgtncatggggcagttcggcctgttcacctatgtgcgcccgttcctcgaaaccgtcacgaacgtgcatggcgcga

SEQ ID NO: 499432 - DNA, 385 bp, Homo sapiens
  misc_feature (379)..(379): n is a, c, g, or t
taatatgctgtctcacttagtctttccttaaataataagcaactctgtttgtacgtatttgaaaaactggctcatgtgatattggccgaggtatatggatattaatatacagagatgaataaagtggtgtgagtgaaaaatagtgtgttcgactccaagctagctcaaaggcttacacgtccatttcaacattgggaaccattcactatagaatgtgaaagggaaatgacagaccaatatacaaatttttgtaggaataattttggatatataccacaagatcattattcacatattaaaaataaatacactgtttgttaggtaattctgaaattgtcatttctattttggagttacaaataataagccctgagacagnctatca

SEQ ID NO: 499433 - DNA, 983 bp, Homo sapiens
  misc_feature (180)..(180): n is a, c, g, or t
cccgagataatgtgtctacgccgactgtggtacttctcgggtccaatgcggtataatccagagcttcttgtcggggacttcttgccacgccactgggaagccgagtgcgccccgggggcaccgtgtcgtccgcccagatgtattctgtcccctccggccttatgcccccgtgtgcctccnctgtatggggctcccaccgggtcccgaaaacagaagatgcctgttaggttgaacacaatggattcgtcgcctcttttgcgtcctaccaaactgggggaggggccgcccccaatgtgtggagagttctgggagagcaacccacattgggttaatgcgtctctctctgcggaacaacccaaggcgtgctggagggcgttctccggccagcagcccaaccaggggaggggaccagcacaggtcctggcgagagaagaagggccccacgcgaactcagcgggggggactaaaacaacacccgctggtgcccaaaggacagtctctgacgagtcagcacacaaggagcccaacagggtcgtcccacagatacgcatcaaaaggagactactccaagcagatatgattagcccccgtggcatccggcgtgcacgcccccccctctgtaaacgccaagggcggcgaggagaagacgttgtacacgaagcccgcttgtgggaatacaagcaggcggcactcaagtgctccaatgttggttacaaatcgggtgctttatatgtgaggaacacaccgcgcgccagtggtttactacgcctcacgcacagggagcagtggagaaagagttgtatctttggcggcgacactcctagggggtgttccctatgtgcgggcgagtgccggatacttgagtcgtagtaggcggggttcgccagaagcacgcagactatgggtgagtagggagagaccagcgatgagccccacgattctggccccaaaattggggcgcccaattaaagaaccacatgaca

SEQ ID NO: 499434 - DNA, 300 bp, Homo sapiens
agtaccgtgatgtctacacagctacttcggaggctaaggcaggagaatcacttggaccaggaggcagagttgcagagagctgacattgcactgctgcactccagcctgggcgacagagtgagactcttgtctcagggaaaaaaaaaaaaattggattaggtttaattgaccttttttcacccaacaaaatattcagcaatcctttgcactactgacttttccccccatttaattaagtttagttccagttctgccatttagttacctgtgaaggagcattcccggggaactccctctaga

SEQ ID NO: 499435 - DNA, 105 bp, Homo sapiens
  misc_feature (80)..(80): n is a, c, g, or t
cccgctgtaccagttgcggagatcaagaacctcttcactaagaccatccgcagtggtaccccgcccgcaggtcctccgcnctgaccccaagggcaagtccctgaa

SEQ ID NO: 499436 - DNA, 1009 bp, Homo sapiens
gacagattcgcagtggtcgctgcttctccttggtaagtgtgatccttggtaagtgtgatcagatgcttgccaccggcagttgtgggtctaatgctatagatcagtagccgagcttccctaggaggatcatataatattttatttatttacttttttttttttttggcaaacaggagttcggttgcgccccctcaggctggactgcaaggctcgctcgcaaactctccgcctgccgggtttcaagcgatttctcgtgccttcagcctctccagcagtgtgggattacaggcacgtgcccaccacgccgggcaattttggtatccttaggggaaacggggatccgctagttgtggcaggcgtggtttgagaacctcctgattcccggtgatccaccaccctcggccttcaaaagtgctgggatacagggcgtgtagccaccgcgccgggccggaaactcatggtcctctgaacaacatataataggggatagcactaaggcggcatcggctcccacactctaagagtccgcgtaaggcgggccccgtgggccagaaggtgggcccatgcgagaccctcgggacccgccagggctgaccgaccaacccagcgagcctctgaaggtgacaccgcacccccactgataactctaacggcactacatagataggcagcatggtcgctcctcactactaggtgccgccaagtgcatcgggaccccatgggcccttaacgaaattgtcaccaactcggcgttcatatggacggcccatgaacctcgcaggcgggggccaagcaagccccggcccgaacccccggatagcgggacaccgaggctgacacgcggcgggaatggatgtaagagagaggctacccactgggcagggccaaccgacgtatgcgcgcagccacaatcaatgagaccaccacaacgcagcagggccgacccacacaggccgcggcggcccagagacaccacgacacacgagctcgcccacaaacgacgaccggc

SEQ ID NO: 499437 - DNA, 352 bp, Homo sapiens
atactggtgccatgaaccaagtgggaacggtaggtctttaattcttagatattcaaatttgtgttgtcttatcattagtattgtcagaaccacatagtataaagtcttgttcttttcaaaatgagtggctcttctttttctttttgttcctatttaaattgtttttaaaacttttatgggtagatagtaggtatatgtatggggtacatgagttgtttagatacaggcctacaatgtgtaataataatcacagggtaaatggggtctccatcatctacaagcatgtatcctttctttgtgttatgagcactccagttatactccctcagttgttaaagtatacaaaaaatta

SEQ ID NO: 499438 - DNA, 143 bp, Homo sapiens
  misc_feature (23)..(23): n is a, c, g, or t
  misc_feature (33)..(33): n is a, c, g, or t
  misc_feature (35)..(36): n is a, c, g, or t
  misc_feature (38)..(39): n is a, c, g, or t
  misc_feature (44)..(45): n is a, c, g, or t
  misc_feature (53)..(53): n is a, c, g, or t
tgctggtccgtgttacagttgcngcgcggcgtngnncnncatcnngccctgcngctgagccagtcgccgccgagctgcgcgcgcgcttcgccattgctggcgtcatcgtcgctctcccggttggcgatgctggtcaggagatg

SEQ ID NO: 499439 - DNA, 116 bp, Homo sapiens
aggaagagaggggaagggacattttagagattatgctgaaataatacaatttgcttccttccctctcttcttttcatgtaaaagaggaaggaccaaggagacacatggccactcaa

SEQ ID NO: 499440 - DNA, 248 bp, Homo sapiens
aggaaacggcgtggaggctttgcagttcaggcgaggaagccaaaaagaaacgaaatagatgcggcgcgcccagctatgcgcgacggacagcagaggaggtggaggaagaagagaggggccggatcccaggccccgttttcaagggaaagtggaaaaataaggacggattctcatcttttcttccagaggagtaaattttagatcaagacatttattgcaggacttgagattgttgatgcctcattcta

SEQ ID NO: 499441 - DNA, 111 bp, Homo sapiens
catgacatggtgtgaggatcaaaagagataataggttggagctttttttcttttaaggagagagagagtctcgcactgtcgcccaggctggagtgcagtggcgcaatctca

SEQ ID NO: 499442 - DNA, 448 bp, Homo sapiens
ggaaaaaaatgtgcgaccggtggtccgtttgtgtcctggagtgggccagaggaaccttattttgcaacctgtggcagagctgaagaagcaaacgggttttgagcacaggatggccaaagaacagtggtggctcaaggtgcgcccgctcgtgagaatcctggccaagtagaaggcgagctatgaggtgtcggactcaggccagctggaacatgtgcagccctggagtgtgtgaccgagtcgcgccggcatgtggctgcaggcaccgtggactgtgtgtttttgtaacacttaagttattttatcagcactttatgcgcgggttattgacattaatacctaattgcgagtgcccatctggcccacgggctccagtgtgtgctgtctgtggagtgtgtgtcatggtttcaggtggtgcgtgtgggcagaattaggtaaagatttggctatg

SEQ ID NO: 499443 - DNA, 453 bp, Homo sapiens
cctattaacgctcggtcctctgaaatcaaccatgccgacaatgaataaatgtgaataacgggcctcgtagttgtcagcccccataaaattctacttaaacttgacgatatgcttgacaacgggcatattccggataatattgccgacatcattgctgtccttaatgtttcggcttactgctacttgtcatacgccgttactacgttgcttactcccttgagttttgcacaaatacgagtttggctttcgcctacccctgcgcacagtcatgttgctggcaattttacagtacttcttgcatttacacgtttttattatgcaatagcgattatttttaattatatctaacccgctgcaaatgggcgattacttaatattatctcccgtgtatttcacttactttttcgcattcatataaaacctactgaaattgccgtgcactccggtgctaat

SEQ ID NO: 499444 - DNA, 547 bp, Homo sapiens
  misc_feature (34)..(34): n is a, c, g, or t
  misc_feature (71)..(71): n is a, c, g, or t
  misc_feature (75)..(75): n is a, c, g, or t
  misc_feature (109)..(109): n is a, c, g, or t
  misc_feature (136)..(140): n is a, c, g, or t
  misc_feature (155)..(156): n is a, c, g, or t
  misc_feature (159)..(159): n is a, c, g, or t
  misc_feature (170)..(171): n is a, c, g, or t
  misc_feature (179)..(179): n is a, c, g, or t
  misc_feature (186)..(186): n is a, c, g, or t
  misc_feature (190)..(190): n is a, c, g, or t
  misc_feature (232)..(232): n is a, c, g, or t
  misc_feature (312)..(312): n is a, c, g, or t
  misc_feature (337)..(337): n is a, c, g, or t
  misc_feature (394)..(394): n is a, c, g, or t
  misc_feature (456)..(456): n is a, c, g, or t
  misc_feature (538)..(538): n is a, c, g, or t
taatgtaaaaacatactttacataagaatactcncatactttacaatgttacaaatatatatatgtatganagantcatgaaggcatttgatataaaacatacacagtntgccattttaatatacaaatgcttaannnnnaatttagtcataagnnttncgaaatcatcnntaatttgngggggtnttcntttttcttaaaggtcacattctcatcctttgggatgtgcaanaattatgtggtttacacagttttatccacattcaaaacatcacgttttggatgtcttcagcatagcatgtacagtataanatgtttccataggaacacaaaaganactgtcactagtggcctgctgtcagatggcttctaattcatcagttagccatttttngggcactagtccagcttattgctacaatcttcaagttgttctagtcacccaaattataatgnattcaatgtataccagaatttaccaataaaggctcaaagagttatataatatacaccaatatacacaaaacagctattctgngtgaaatga

SEQ ID NO: 499445 - DNA, 860 bp, Homo sapiens
ggaatattaagacatcttaacaacaaaccacaacatgcctgcatgtctaaaagaaaatatgggcctggtgtggtggctcacacctgtaatcccaacactttgggagcccgaggcgggtggatcagctgaggtcaggagttcaagaccagcctggccaacctggtgaaatgcagtgtcaactaaaaataggaaaatcagccaggcgtggtggcagacccctgtaatcccagctactcaagaggctgaggtaggagaatcacttgaacttgggaggggtaggttgaagtgagctgagatcacaccgaaatggggtggggcgcagtggctcacgcctgtaatcccagcactttgggaggccgaggtgggcggatcacgaggtagggagatcaagaccatcctggctaacacggtgataccccgtctctactaaaaatacaaaaaaaaaaaacaaaaaaaaactagccaggcatggtggcaggcaccggtagtcccagctactcgggaggcagaggcaggagaatggcgtgaacctgggaggtggagcttgcagtgagccaagatcgtgccactgcagtccagcctgggtgccagagtgagactcccgtctcaaaaaaaacggaaaatgggcacaacaagtactaacattttgcaaagaaaagacatcccttggggagtgtaactgaacaattctcagcactcataactacataattgcgactactagagagaaaaacataagaaaaaaaaggggggcgaaaaaatcccagggagcaagcacgcgccaagtgtgcaaggcccgtagggggtaaggcggcggcggcgtacaacacgcgggaggcagggccgagacacaccgggag

SEQ ID NO: 499446 - DNA, 782 bp, Homo sapiens
ctctgtgaaccctctttctgtagtggatctttcccatcagcgtaaaacatcctgttatttcccctttttaaataaaacctcagttttttttaatgcctctcttttactgctctgtatgtttgcttcccttcacccaaacacttctggaaagagttgtctgcagtgactctttccagttcctcaccccgccccaccgtagttctcttcctaaccctctccaacaccacttccatccccagactgctttcttgctcttgagttcaccagtgacctaatcagtgtctgagcatcattcagcacagttggactctctcttggcttctgtgacctggaacttctggtttcctctctacctcatcctccactccatctcatggcttttcctcttctaacctctaagtcagagggccccctagagctctgtcatgggttttctccctcagcattctcttccctagaagtttccattccattctcaagctcttaataccacctataggccagtgacccttacatttattactaatcttgacctctccccagagctgctgtcttagatacctagctgcttatgcgatgtcttcacttggatatctgacaaacatcttgtttccaagagagaactctttattctccctcttgctaagattccatatcaggacatagcattatgtttgccagttcctaggagttaacttataattctttcttacccacattcgcatattcaagtcattgggaggtcctgtaattttttccccagaaatttattttagaaccag

SEQ ID NO: 499447 - DNA, 384 bp, Homo sapiens
ccaatcaggaatttcaagaccaagaacgacccaacttggcagctattttcttgtaggaggacatgactggcctggccggacctcgtgagcacatagtgtcctgcccaccctaccagctcctccagccctgccgggcacatgccctggggacgcctgcgctgcccaggttgcctcctggcctgccctcacctctgatagactttgtgactctgaactgctctactttgagaagatgaccggtttggagtaatcagaatgaaccctcctccttttaacgggttaacctttgtccctttttctaaaaggctatgtatcgctcctatggaaagaccagatccttaaagacgttgggggtataaaaggaacgtggggccggaatattta

SEQ ID NO: 499448 - DNA, 113 bp, Homo sapiens
  misc_feature (48)..(48): n is a, c, g, or t
gtctgctgccggtcgcctctcgacggctcccccacgtcctccacctcncaccctgccaccttcggccgggtacttgacgttacggacgcggacgggaccggggtgacggaccg

SEQ ID NO: 499449 - DNA, 875 bp, Homo sapiens
gaggtccaacagccgagcttagcccaccgggctctgggaaagacccgactgaggctaaagccgccccggaaggccaagtccgagttccatttcttgaagaggccggcgcgcgtaaggctgtgacattggccctggcgactggcttcccaggagctgttctttctcaggagctccacagcgcgggccatctccagaaaactgtcttctagacagacctgcggttttatagcagttttggcagtcaacttcagcttgtgcctgagcagacggggttgtggtggcccgccagcgggggatgccaggccacctcccccagcggcacgcagcccctctcttaattagatcggttttcccctggtgtccgggagagcggtcccggcagaaagtcagagtgtatttccttttatcgtcaacccagagccccaccgcggctaatgcaagaggccaaaaaatgtttggaggaagaaaaacaaaggcaggaagtggcggcggcctgacggtgcgtgtgtgtctgcagagaagggagggagccggctcagtctcttcttgtttttccaaacttcaaggtccaggcagccctctgcagggccgggccccattgctccccgcgcggcattggaggtggccgcccggagaggagaaggccaacgcctgcgccaggcttgtcaggcggaaacggctaacaaggagatttggtcagcaaaacagacccagcctttccgaggcttcgtctgacttggcccgaaaggttggggagggggggcttgcgcagagcctcagggaccctcctctctggggactaccatccctgagccttacgcttctttccacagcctttgcaggcggaatatcggaataaagtgggtccaggcgcc

SEQ ID NO: 499450 - DNA, 128 bp, Homo sapiens
  misc_feature (9)..(9): n is a, c, g, or t
actcattanatcttcttcctgtaattcttcatctgaactctggtagtggacccttccaaagttcagattctgcagcactttcttacctcatcagagtactctcaagtacgagaatctccagatttcta

SEQ ID NO: 499451 - DNA, 833 bp, Homo sapiens
gaggtccaacagccgagcttagcccaccgggctctgggaaagacccgactgaggctaaagccgccccggaaggccaagtccgagttccatttcttgaagaggccggcgcgcgtaaggctgtgacattggccctggcgactggcttcccaggagctgttctttctcaggagctccacagcgcgggccatctccagaaaactgtctttcagcttgtgcctgagcagacggggttgtggtggcccgccagcgggggatgccaggccacctcccccagcggcacgcagcccctctcttaattagatcggttttcccctggtgtccgggagagcggtcccggcagaaagtcagagtgtatttccttttatcgtcaacccagagccccaccgcggctaatgcaagaggccaaaaaatgtttggaggaagaaaaacaaaggcaggaagtggcggcggcctgacggtgcgtgtgtgtctgcagagaagggagggagccggctcagtctcttcttgtttttccaaacttcaaggtccaggcagccctctgcagggccgggccccattgctccccgcgcggcattggaggtggccgcccggagaggagaaggccaacgcctgcgccaggcttgtcaggcggaaacggctaacaaggagatttggtcagcaaaacagacccagcctttccgaggcttcgtctgacttggcccgaaaggttggggagggggggcttgcgcagagcctcagggaccctcctctctggggactaccatccctgagccttacgcttctttccacagcctttgcaggcggaatatcggaataaagtgggtccaggcgcc

SEQ ID NO: 499452 - DNA, 174 bp, Homo sapiens
tctcgcttgacttgagtatcccgtgtgtcgatgatagctatgcgcagtggaccatgcacgaaaagctcaattcacacctctcactatacttcatgagctaactccgaaaaatattacttttcttctgctctactgtatcttatcctggaaattattatgcgtattgtagactca

SEQ ID NO: 499453 - DNA, 292 bp, Homo sapiens
  misc_feature (36)..(36): n is a, c, g, or t
tctgcttcctgggttcaagcgattttaatgcctcancctcccaggtagctgggattacaggtgagcgccaccaagcccagctaatttttgtagttttattagagatggggttttgctgtgttggccgggctgatctcaaactcctgaccttgggtgatccacccgcctcagcctcccaaagtgctgtgattacagatgtgaaccacgtacctgacctcattttctcttctcattctttcttgttggaattcctactaagtagtcaatgttggatatcttgtatggactttgc

SEQ ID NO: 499454 - DNA, 820 bp, Homo sapiens
  misc_feature (86)..(86): n is a, c, g, or t
caaggtaatataacggaactttacacaactttttaaaaaaaaggggaaagcttaggggaggactatgcgaaaacctttgaagattntgaacccattgtgaactagcaacattgattatgttttatattctcattttaagccgagcagttaattgcacttaagcggaagatatttccctgaaggaggatacacaaagaagctagtcccaatcgaatcagagtatagaagatcttcatttgaaaaccatctacctcagcatttactgagcattttaaaacttattttcacagagatgtctttgtgatgtgatgcttatcagtttggcccgaagaaggaaaatatcagtaccatgctgttttgtggcatgaatatagcccactgaccaggaattatttaaccaacccactgaaaacttgtgtgttgagcagctctgaactgcatttacttttaaagaatttgctcatggaccctgacatccttattataaaaaggctcactgacaagagacagctggaaatttcccacaacaatcattggcgactaacctttattaggagaagcctatgccagctgagagtgatcgctaggaggctccagtctttgcatctcaaagccttttgcctaaagttgagcccttcttttccattccccaattttaagtagtcactaatgatactagcttttccttggttctgagtaaacccaatcagagaagtttaaccctacttttctccaagtctttatactatgcaccattatcaccttctattgcaataccacaaatattagtattattacaataaatacgacaaagtcacca

SEQ ID NO: 499455 - DNA, 1090 bp, Homo sapiens
  misc_feature (96)..(96): n is a, c, g, or t
  misc_feature (487)..(487): n is a, c, g, or t
  misc_feature (898)..(898): n is a, c, g, or t
gtgaccctcatgaatcataatatattatgctagcattttaccactctcgactttctagtgaactacatagtaataatcgcgtcacaacctcaatantccctcacactacataatggcactagaacaggaattaattactatcgtcgtgattcattaataggcatatcatcttcgaataaccgcgtcaaacacaccggactctcctcttaagccacattatttcgtggcacatattgtgcacactatcgttagtcttttaggctcgcctggcagaatgcaatgcggctgaggctctaggcccctacatatgtcttgcaattcctcctatatcacctaatatttggctcttacgagctactgtatcgttaaccataaagctcgtactaccaaatttgcctcatatcatctgaattgcacccgaacattaaattactacacgtcattggctccaccataaattaacaccctcaatacatgccttgtactngttgattccttcaatctacgccgaactaagagcatgattaaacagtactaaactttaccaaactttacgcgtctctctcccattgtcaaaactgtccccaaatatgatatacatatatagtatatacattataattgaaagaagacataataaatatatagtgggggtggaaggggggggggaatatggggggtgggagcaaccatgagagaggatggtgtatttttatgagacaatacaaaatgctgtgtagaagaggtgtgtcgtgtcgtgtgtgtgggacacaaatgtttgggtgttatctttgacagaaagcctggtggtcgtcgctacacaaaaagaggagtggtgtcaatccacaacaagagagagacataccccgcagcgaggagacaccaagaagctctagtnagaggcgggcgacgagagaagatttgtcctcgccaccccgcaaagaaaaaaaacacaacttgggcggccaaggagagcggagcaacaacccagggaggggcggtgcctttatgagagcaccaaaaaactacgccaagcaaagggagggagcaccacagggaggggggacaacaaacggggggaacccgaaag

SEQ ID NO: 499456 - DNA, 318 bp, Homo sapiens
atgtgcaccaggcaggcccttcccgcagtgggcagcgtgcggggtcttcagcaccgctgaaggagtacagagcatacacaccacacagtgcaccgagccttctagtggatgggctgaccctgggggcccagacctggaggcaggcgtgtccctcacccggcatgtgacccaagacgttgtgagccggacactgaccaccagcggaacccttagcacccacatgttccaacagttcttccaaacttgaccgaacactgacccacccccgccacgtcccattaggcgtactcccatgtactgcgtgggtcccatgggtac

SEQ ID NO: 499457 - DNA, 608 bp, Homo sapiens
  misc_feature (26)..(26): n is a, c, g, or t
  misc_feature (29)..(29): n is a, c, g, or t
  misc_feature (79)..(79): n is a, c, g, or t
  misc_feature (291)..(291): n is a, c, g, or t
  misc_feature (296)..(296): n is a, c, g, or t
  misc_feature (300)..(300): n is a, c, g, or t
  misc_feature (310)..(310): n is a, c, g, or t
  misc_feature (314)..(314): n is a, c, g, or t
  misc_feature (316)..(316): n is a, c, g, or t
  misc_feature (319)..(319): n is a, c, g, or t
  misc_feature (324)..(324): n is a, c, g, or t
  misc_feature (329)..(329): n is a, c, g, or t
  misc_feature (332)..(332): n is a, c, g, or t
  misc_feature (342)..(342): n is a, c, g, or t
  misc_feature (348)..(348): n is a, c, g, or t
  misc_feature (382)..(382): n is a, c, g, or t
  misc_feature (390)..(390): n is a, c, g, or t
  misc_feature (395)..(395): n is a, c, g, or t
  misc_feature (432)..(433): n is a, c, g, or t
  misc_feature (447)..(447): n is a, c, g, or t
  misc_feature (471)..(471): n is a, c, g, or t
  misc_feature (477)..(477): n is a, c, g, or t
  misc_feature (482)..(482): n is a, c, g, or t
  misc_feature (514)..(514): n is a, c, g, or t
  misc_feature (519)..(519): n is a, c, g, or t
  misc_feature (527)..(527): n is a, c, g, or t
  misc_feature (533)..(536): n is a, c, g, or t
  misc_feature (540)..(540): n is a, c, g, or t
gacacagggtgagtccatcttttggntancactcattgcacttcaataattacacaaaacacacaagtacatgcatctncaattacgcaccgcatgagaaccgttagttataaaatctatcatcaaccagtaaatcaatgtgaaaaaatacagtgtcaaaccaaaaagtataactatagttgcatagaatattaccatgctataacatttcaaggtcattggaaacaaaagacaaattataaaagtttgccttgattgaatgaatgtacaagaataaggttcaacacatcngtgcnaaanggtttatgantttncntgncttancaganganaagataatcncttagngggcgatcatacgtatatgctgcgattcattatncccattcngtggnctgttccagcttattaaagtcacaggttaagcccttnngattatagatttcngtttatattactcatctttatgtnccaganctgcncaatttcctcatctgacaacatacaataaggnatgantatcagcngcttannnntganacaagcatttactttattttggatttctcccacccccaaacatataaatctctctctctctctcttta

SEQ ID NO: 499458 - DNA, 231 bp, Homo sapiens
gatccccggctatcacattatctaaacctatgtgtacaagtgtgtcttattaaaccagagccacggagatcaagtgactgctagtaacgtgttgtctgtaaactaatccagatgcccacgcttctccacgagggtgggcatggtcagtaaacccaagaagggtcttgagcggcctaatcccagtatcacctatctaatgaatccacttccctgtgattactgttgatagct

SEQ ID NO: 499459 - DNA, 782 bp, Homo sapiens
ggggcttccaggtttccccttgtggatgcgcggccccgcggctctgctcctcccggcgcatgaggtggccgggagaggccacatggagcgtgacctggcacgggatttctcgaggaacgggagaagactggcgcccgatcccgcgtctggagggtcggtgaacgatgaagggccggcggcggcgaccggccgatggtgctgttaagttcgcgcgtgctgttggtgctgtgcacgctggtgctgttgctcgtcccctccgtcttggacggcggcctggacggggacaagggcgccgagcactgccccggcctgcagcgcagcctgggagtgtggcagcctgtgaggcggcgcgtggccggcgacacgcgagcagtggggctgcggaggcgcgggtcccgcgcgaggaacgggggcgcgacaaccaggttctcctctggttcccaatgcaacctcacgcggcgctgtccggggacggcatgtgtctcgcggagaatgcagcacatctacgtgcatgacgccttgggcgcaccggctcgtccttcctgggcgaactctttaatccagccacccggacgtatgctaccttgtatgagcccatgtggcactctatggccaggcgctgtatccgggcgacgccgagagcttgcatgggcgcgctggctacatgctgcgtcgctcttccgtgcggacttctccgtgctgcggtgtacgcgcgccggggacccgtgggcgcgcccggacacgcaacttacagggcgcctcttcggtggggctccacggcc

SEQ ID NO: 499460 - DNA, 1184 bp, Homo sapiens
gcacgtcggagactacgtctactttgagaagctcctccagcaatcgcatacctgatccggagaatcgaggagctcatagcaagacggccattgggaacgtggagtgccaacgtggtgtgcttctaccggaggcgggacatctccagcatcctcatacgccctggcctgacaagcactgcaccagggaactagaacgtagcgaaattggagcaatcctggaacatggtgggacctgacccgagtaaaacttagaagcaccagattgcggcatctgaagagctgttcctcttcccggtagactggcatgtctcatgccctgacaagcaacatcagggtgcatagtgcaggcgtaaccctgcttcaacgctagaccgagttcgctcaatgtcctatctggagcgggaggattacttcttctatgactctaggtctacacgaaacccagagcagtaagaacctgctgggcatactacccagggaagagattcgacgtaaggacacacgggtagccaggcacgagatcacccgaccttgtttaaacagcatggcgaggaggacttggccgagagacagatccagggttggaagaacccaggtgtgggaggcgcgacaaacccatattccacagaccaaacagaatcgcaccaaggtagcatagtggtggacctgcatcatgtggagcgcaccttccgacacagagtgcctggaacttgacagcagatcccgttccggacaagaccaagccttgcaccattagaagacgccgcagattggactccccgagaaacatacacccctttgttcccacgcaccatggcataacttcttcacacacacgaaacgatctaaccgcacagtctccaaaggcaatctcagggcacatgggatgcccaggcaggggcgggagcccggtgcttcttccatgggggcactcaacaattggtaggaaagatgagatcctagacatcaagaaaggaccaaccctactacaggaggcaccacacccatggaaaagagactaatgcggacaagggatgttaccatgagacacagtttacagacaggcagttgcctcaccgtatggaaaatatagctatacaccagcgacatacatcatagacgtacacaaattaccgatgtatagacagaacacccggcgacgcataaggtggaaccaaaaacca

SEQ ID NO: 499461 - DNA, 513 bp, Homo sapiens
gcagaaggaactacctcaagatataataaggaccatctatgaatagcttgtgatcggccaggcaagggggctcacgcctgtaatcctaagactggggggaggccgaggtgggtggatcacctgaggtcaggagtttgagaccagcctggacaacatggcgaaacctcatctctactaaaaatacaaaaactagctgggcgtggtggtgtacacctgtaatctcagctacttgggaggctggggcaggagaatggcttgaacctgggaggcagaggttacagtgagccaagatcacgccatggtactccagcctgagcaacagagtggactctgtctcaaaaaacaaacaaacaaacaaacaaaaaccagtatgattatatataattatggcagaactagtagactagtagacagaatttctacagactttaaatgctaagatcccaccaaaaaacacaaaaccccaaaataacacacgccatttggtctcgcttacaggacaggggtgctcga

SEQ ID NO: 499462 - DNA, 924 bp, Homo sapiens
cgcagtggctcacgcctgtaatcgcagcactttgggaggccgaggcaggcggatcacgaggtcagtagttcgagaccagcctggccaacatggtgaaaccttgtctctactaaataatacaaaaaaaaaattagctgggcacagtggcgcacgcctgtagtcccagctactcgggaggctgaggcaggagaatggcttgaacctgcgaaggcggaggttgcagtgagctaagatcatgccactggcactccagccttgagtgacagagcgaggctctggtatcaaaaaaaaaaagttgcgggggggtgctcaatcttaactggcagaggatctacagcatgaacaaacaaagtgtggggaaagtgcttaaaaaaaattagaaaatgtggtgcaattttttacaaaattggtaagcgttaggaaatactaatatatggaatagtgaccataagtgtccgagttgatgtattggtacatttcagtcacatgtgtaatgggtcccgagatatgacccgtgtagagcagaatacgggaagtgtaatgttaagcctatttggacagaaaaaattcattcggagaaaaagttgaaggatttcagagacaacacagttgaagaaattacagggtgaatggtcgagaaaaaacggttcgggttccacaagcaacggggaagaccacgcgggggacgacgtgaagggggaacacagagcctcacataagctcgtgggggagcgtatattcaccatctagaggacgcacattggggaacaaatcgcctggcagagcacacgcacgagggctaatgggcggcccacgtggctaaggtggtacacagctcccctttcagacctgtgcacgcccttaggacagtagtacccccaaaacacaagcaagttggacctcggagctgcaaagcgatgaccg

SEQ ID NO: 499463 - DNA, 118 bp, Homo sapiens
gccatttaagagcttacacaatcaaggggcacgtgagtaaaccagtaattgtggcataatacccttagagccatgatgaagtagacataggacaggtccactgagctcttgtaccttt

SEQ ID NO: 499464 - DNA, 265 bp, Homo sapiens
tgatcgagctcgaccactcctagcctgggcagtagagcttggctctgtttcataaaaacaaaaaacaataaaaaaaacacacaaaatataattgtcaattgtagctagttggttctcctgttgcaatatccgctgccccccgccccccggcactttttttttcccgtgttttcctgctccatattttcgggtaaatgacctccgaaaagaattagaaggtcgagctcttatgggccaggcggctcttattgcccaggtgtgaagt

SEQ ID NO: 499465 - DNA, 874 bp, Homo sapiens
agctatggcgactcagtgtgcttgcgtatacctcgatcctggagtgaggttggagatgcccgtttcacagatgctgttgcgtagaccactgccacgtcccctccccaagctatagttaggtcagtcgaggacgagctaaggtcagtatactttgagagacaatagctaggcatacgtttgttgcttacatggtcactcaggatggaccactgctggtaggtaagggaggcagtgcgtttaagtatcacaactgattctgagttgtatacaccacacaaaagatcaatctctgcggtttatctaccgttgcataatagcatagtatcgtgccgatagctataggtgcttttttccaaaacgttcttattactgggcggactgataacatttaaacaaataattgtgtttgaccccaaatgactttatacccaattctacatcaacaatatagaagatctatcttttttgttaccttcagatgttcactaaataactcagttttttaagcagaagtctcagggcattaccctatatgtgtgtatgaagtatctcaaactggaacataaattgagtgatcaaaactggccattcacagtgtaaggcagcacttaacatttcgaacctaaagttccggatctggggtggtataaagaacctaaaagcagtatctggtattagctggtaaccaagtgggaagctattcggatatttcttaaatatggtgacttgggagtactgttcttccttcaacttgaatgtattaattcttgaataatggcctttttgttaacacacccttgtattacttggggagaagggggggtatggaaacaattcacgctgttttttggcattaaaattcctcaatgggata

SEQ ID NO: 499466 - DNA, 113 bp, Homo sapiens
tcgagctcgtaccgatttataatctgttatgtaagaactgtggctcttaggtaaggattacttaaactggatcggagttgttttctgttttaggtagctgaggaccatcgttg

SEQ ID NO: 499467 - DNA, 943 bp, Homo sapiens
attgtcggcctcaggcgaggaggctgcactacaatgttgtcgcgaaccggttcgtggagttcaggtgtggtagtcgactgcttgcgtacactgagttccgaaaacggggcggggcctacgtgacggaaaaacgcaagaggtctgattacaaatgggaccataatgttcgcttctgaaggagtggagagcacgctgtatagagcacggccgactgatcagagcgcaggtcacacgggagtcattctgatagaggcactgtcccgatggtggttgctgagatccaagaggttacccatgaatcatgggacaacgtagatgcacagaggatcgaggtgcgtctctggattccttggggcagcacatggtggagcattttgctggcaagaggatatgcatgtcaatgtattacgaatatccagggaaggggttgtgactaatccccagggtgcggttctttctgggtgaactctgaagaacgacaggatcatgtacccagctctgaaaggtgtaaacaaagaaattcccagtgtgcgtaacccaccacatacagataacaagaaaggagctcttagaataggagtgaggttacattggcaccagaatgttcatagaaagttagaagaggctggggtacagaagattcaaatgagccaagagggcagggacatctagagggctgcgataaacagaaatgacagtgaagaccttacctaagccatgaacccctgatagtaaaagggcacgatctcaggaagggcgtacggacgagagaccgagaaattagaccgcacgcccatggtttcgcccggaccgagggacacaaacggaacagcgaaggatggagaaagaaacggggcaaggaaggagcacagggagaagaacaagagagaaaaagacgggacgaggaacaaaagagaaaaagaaaacaagaaagagacaaata

SEQ ID NO: 499468 - DNA, 111 bp, Homo sapiens
agagatcgtatcatggtcaggttatcagtttgagaggcagagagatgttgtgacagagttagacagtttggagaagcagatgtatatctactacaggcatgcactgtagtc

SEQ ID NO: 499469 - DNA, 201 bp, Homo sapiens
tctttctgttcacatggaacaaattgaggagatcgcttgagacgaacggcgagataaatctatccaaagactactagcagcactgacttggatctggacactgagtttgagatcctcttgccacgccaacggggcctgggccctctgtgctaccgctctcgtcagctactagattcgcctacacaaaggcacgtggatcgt

SEQ ID NO: 499470 - DNA, 671 bp, Homo sapiens
tgagtccttcagttgtttggggaaacgcatacccgacactaaaaaaaaaaaaaaaaaaaaaaggatttcccttccgccattccaggaaaacggaaacccccttcgtttacccggcaacattgtcgtatatctccccttcgcagggcccaggaacttggggttcttaggttgggaagcaagacagaaccggtctccagaaacttcccgcttgcagaaccacattgtgggcgggttcttgacttccggttttcccgcttccccaagccgtggaggccgactttccccagaacacagaagatattgtattgtttatacccaaaccagaaagggaaagttgtcccggaacccaaggcccctctcttccaccgccggccccccttaccctctccgggccgcccagggttcttgggttgtcgctctcccagcgcccccagggccgcacttcttgtgccgttctcccgaatgtggggcccctctctttgtgtatctcggcggcccccaaaacccttcgccttttcctttaccggtctcagggttgagttgtctcaagttttgcgcccctttcgaagggttcctccgccgaattcttcttgattcgaaacgaaagggggagggaaaagcttggggtttaaaggggttggccggaaaagggccaccagacttggaaaagc

SEQ ID NO: 499471 - DNA, 222 bp, Homo sapiens
ctttttgaaggggttttggttcccgaataaagatttttatggcgggtgatactggctttcccgaaatttccgagaccttatttttgagatctttggcctttaaaccctttttgggttgggtttccgccctattttgccaaagggcagccaccccctgctggggggccttcttggggggggctgggaaggggctttttaagaaattaaaaaggggtcctttta

SEQ ID NO: 499472 - DNA, 137 bp, Homo sapiens
cagggattgacagaatagtgacaacgcattattccacgattcagtagtagacatgaacaaagggccatgtgtactgatgcagggacactgaaactgtgtggtcctcttgtgagaagcttcaaggggaagtggcatct

SEQ ID NO: 499473 - DNA, 1005 bp, Homo sapiens
  misc_feature (3)..(3): n is a, c, g, or t
  misc_feature (132)..(132): n is a, c, g, or t
  misc_feature (373)..(373): n is a, c, g, or t
  misc_feature (443)..(443): n is a, c, g, or t
  misc_feature (612)..(612): n is a, c, g, or t
  misc_feature (877)..(877): n is a, c, g, or t
  misc_feature (886)..(886): n is a, c, g, or t
  misc_feature (925)..(925): n is a, c, g, or t
  misc_feature (935)..(935): n is a, c, g, or t
  misc_feature (995)..(995): n is a, c, g, or t
ctntttttcaggcaccgtgttaaattgttgtgcatttctgggagaggggggtggggccctggccacagcaaaagtgccggcctctttcttgggtggggtaagacaatgtccccccccccctttttggtctgnctcctttttaagtggcttcccctcattaaatgataagcatcaaccctttcccacccagggtgccgggggtgggggggggggccggtgggtggggtgctctggaaggggtagtgcggcggctctagcccccgtgcgtcctctgccctggctctggggggcctggccctgggctgcccccccttgctgggggtggggggccattcagttctccgccctacccccgggcatcttcccagggagntaggggggcagggtgtgggaggggctgtgtcaccctgtcgggtcccggacggggggtggccatgggtgcngtggcccccccgtgggggctgctggctgccccttgccgccccctcccccaactggctaccccggcgtcccggccttctggccctggggctccggggggccgccctgggggtcggggccggggcccacgggcctagctggccctgccggggggtcccccccaccgcctgncatggcgctccattcccacacgccagctcaaggctcctgtccatgcagctcaatgttacttgtgtgtgcatgtcctgtgtagaggggaaggctgcaggggggcactgctgtgccacccacccaggggttcagggcatgcagggggccctaagcctagtatacgagccaagaccaaaaagggttaaaggctctgtctcccctccctccccctctcccaacatgccccgccctccttgggcactagaaagttttgcgatgaatagcncgggagccntcctcttcatactcctttttgggcacccacatcttcttnaaagtgtccngcggggccaggatggggcgccaatccatgtggggtcagccgttcctgcggggctgagatntgattttgat

SEQ ID NO: 499474 - DNA, 131 bp, Homo sapiens
cactctccagcctctcaccgaggatcattccaaggctacactgtcgctttgccgaagatgacaaacagtaaattgcacagcaaataaatggcaccggtgataaagaaaaccaaacgccattgtgtgggatc

SEQ ID NO: 499475 - DNA, 389 bp, Homo sapiens
aggtagtggagggagaggagaagggaggctgcttttccccagggctgcacgctggagggctggacgcaagtaagcacgtgaaggggaagcagggagggagagagggggaaggatgaaccaatctacctggagcagcttaggagctaatgagccgggggcaagaggggaggcgaggcctggtgatgtggtgggttgatcgcctgcatccagttgtaaagcttggggctgctggggagggagtgggccgagtaagggactttcccatctgagtgggctcaggagacccacccctctcctctcagagcagcaggggaccagagaaaagccatcacttctttgggtctttgtggcggctcagcatgtgggataggggtaaaggggcctcccgg

SEQ ID NO: 499476 - DNA, 310 bp, Homo sapiens
aggtatagacgatagcacatgaaagccgggcgcaagtagatatagtaccgcaagggaaatgatgaagaaattataaccaagcataatatagcaaggacataagcccctcataccgttctgcattaatgaaataagctatgaaataagctttgcaagtgatagccaaagctatagacccccgtaaaccatgacgagctagcctaagaacagctaattagagcgcacccgttctaatgttgcacagatagtgggaagcatttatagggtagaaggcgacaaaccttaccggagcctggtgattagcgtggtt

SEQ ID NO: 499477 - DNA, 714 bp, Homo sapiens
  misc_feature (361)..(362): n is a, c, g, or t
  misc_feature (365)..(365): n is a, c, g, or t
  misc_feature (367)..(368): n is a, c, g, or t
  misc_feature (373)..(375): n is a, c, g, or t
  misc_feature (379)..(379): n is a, c, g, or t
  misc_feature (381)..(382): n is a, c, g, or t
  misc_feature (389)..(391): n is a, c, g, or t
  misc_feature (400)..(400): n is a, c, g, or t
  misc_feature (413)..(413): n is a, c, g, or t
  misc_feature (428)..(428): n is a, c, g, or t
  misc_feature (572)..(572): n is a, c, g, or t
  misc_feature (597)..(597): n is a, c, g, or t
  misc_feature (623)..(623): n is a, c, g, or t
  misc_feature (630)..(630): n is a, c, g, or t
gcgccgattgggaagccccaatccaaacccccttgttgggggccaccttgttcccttcggcggggaaaccgtttcctttccgcccattttgctgcttgtttcgcgcgtggcccctcaacccttgctgtgcatcgcgtccctgctcgtctcacgtacgcctactggttctgcgttaagagctttctcctgctcaagcttggcatggagacagagtccagctccgatggctggagacgcattggtccccacagcctgtagcgttgagtcccttgtgtgatactttgggctactactccctctcccttggggtgaagggacagagccccacgctgttgacatcagcctgcttcttcccctcacnncantnnagagnnngagntnnctgttcnnnccctgggangcgctgtgccagnacctttgagccttgncccacactgaggcttaggcctctctgcctgggatgggctcccaccctcccctgaggatggctggattcacgccctcttgtttccttttgggctcaaagcccttcctacctctggtgatggtttccacaggaacaacagcatctntcaccaagatgggtggcaccaaccntgctgggacttggatcccaggggctnatctctncaagtgtggagagggcagggtccacgccgtctgctgtagcttatgaaattaactaattgaaaagttcaagagaaaaaaaaaaca

SEQ ID NO: 499478 - DNA, 355 bp, Homo sapiens
cagctctgtctggctttgcagtctgtacttagggggaaggagtgtaattgtaaatgttaactgttttgattttctagtacatcagtgtgaatcttttgctccacccttactaggaagaaacctgttgcgtgtggagagctaagggtgacggttgtgagttgtgagcagagtccatggctgctgcctcattcctgttatttttgtgccatagagtaattgtttccaggctaggctggttggccttcaagccctgctgcctgccactaggcagggggattttcctgggcctccccaacagctagatttttaccctgagttgtttcataaaagacccttactgaagtagctgctttcc

SEQ ID NO: 499479 - DNA, 982 bp, Homo sapiens
  misc_feature (965)..(965): n is a, c, g, or t
ccccacttgtgtggtgtgtgctgttttttgttggcttgctcttctcttcgtcttctcgtcgtttgctgggcccttttttttcgcggtgtggcttcgtgtgtgccacacacacagcgagacgtcatggatggcgggatagaggagggggagggggcagaagaagagtagggcccggaggtacggggtgccatggcgttgatctccggggattttttggtgagacacgtttttttgcgccggccagtgtgtttagccgctgcttccctccgcccgtgtggctccctgcgccagggctgtgcaatgtgtctttctccgtattctcgcgtagtcgtattttcgggcgctgctcccgcctgtggggcttctcatggtgccctctacgtagtgtttgagccgctatggggcgccacactgcggtcctccagctttgtttggcccgcgaatgtgccccccctcgaagtcagctgtgggagagtttggatgcaagctgttctgccgctcttgggtttcgaatctccgggttctaaacagtggcacccgcctctataggggacactataagttcaagatagggcatgacgcaggcccgaaaattgcacacaggttcttcccccccccccaaattgagacaagataggttgtggaaacatttgtctcgatgtgccgagaaccatcttagctacttaacgaaataacccggcctactcgctcctctttcctgcgccacagaggggcaaccatataagtcttggccccctacattcacgatccccctgcgcacgtcagaagttttaggcagttagtggttgccctgctggcgcgctctatttgtcatgagggagaaaggagctttcctttatggtatttgtagcgagagtaagacgcacgttttcagaagcatgaaatatatgtgtctatgaatgggggggtgcgatgattatagcccatgttgttcaatttcgccngcccacaatagacgaga

SEQ ID NO: 499480 - DNA, 616 bp, Homo sapiens
  misc_feature (31)..(31): n is a, c, g, or t
cacagaaagattaccagggcgagcaccgggntgttaatttcagtacgagggatccgagttaagatgtgatgagcggttctggccggacagacccatcagtctgagatgtggggagcgcctctgccccgccaccccgtctgggatgtgaggagcgcctgggcccggcgcgacccgtctgggaggtgaggagcgtctctgcccggccgcccgtctgagaagtgaggagaccctctgcctggcaactgccccgtctgagaagtgaggagcccctaccgacccgcatgccaccaccgactgggaagtgaggagggtctccaccgcagcagacaccaccttccgggagggaggtgggggaggacaaggcccaccacgacacaggaacaggcagccccgatctgggatgcagcacggacgccagagaggagacacatatcaccgcaatgaccccagggccaaggacacaaccacacagagacccgggcgaacagatgaacagccagcggcagatccaagtcacacgggccaggacccccatccgtagagggaacggagaagggacgccaccaacacataggccgcccagggccgaccctgacccgggaaactccacgacaac

SEQ ID NO: 499481 - DNA, 184 bp, Homo sapiens
ggggaaaaaaaataatgctatgaaattgggggggggggtatttgaaaaaataacccttgcttatgtcaaatggagctgaatttgataaaaaccccaaatccagctatgaagggctgggcaagtttcctttttttttgatgtttcccccacctaaaaataaattaataaatttatataaattcta

SEQ ID NO: 499482 - DNA, 190 bp, Homo sapiens
tctgtctattgtgcatttgccttgatagccgtctgtgccatggctcttgttagtacaatgtcacacatgcacaacctcgtgctcagtgccatcagtttccccgtcaatatccgggcatatcttcaattctgtccaagacgaagcagaacatagactacgtatgtcacttttcatgtgcacgttctttggg

SEQ ID NO: 499483 - DNA, 535 bp, Homo sapiens
  misc_feature (4)..(4): n is a, c, g, or t
cggntcgtgggagaccaggcctgcaggggatggaaccttccagaagtgggtggctgtggtggtgccttctggacaggagcagagatacacctgccatgtgcagcatgagggtttgcccaagcccctcaccctgagatgggagccgtcttcccagcccaccatccccatcgtgggcatcattgctggcctggttctctttggagctgtgatcactggagctgtggtcgctgctgtgatgtggaggaggaagagctcagatagaaaaggagggagctactctcaggctgcaagcagtgacagtgcccagggctctgatgtgtctctcacagcttgtaaagtgtgagacagctgccttgtgtgggactgagaggcaagagttgttcctgcccttccctttgtgacttgaagaaccctgactttgtttctgcaaaggcacctgcatgtgtctgtgttcgtgtaggcataatgtgaggaggtggggagaccaccccaccccatgttccaccatgaccttttccaggactggtgtcctccc

SEQ ID NO: 499484 - DNA, 404 bp, Homo sapiens
cacagacattcaacctatagttgcacaccatgctgtgttacgtctaggtcgacctagacgtaacacagggagctgtgatcactggagctgtggtcgctgctgtgatgtggaggaggaagagctcagatagaaaaggagggagctactctcaggctgcaagcagtgacagtgcccagggctctgatgtgtctctcacagcttgtaaagtgtgagacagctgccttgtgtgggactgagaggcaagagttgttcctgcccttccctttgtgacttgaagaaccctgactttgtttctgcaaaggcacctgcatgtgtctgtgttcgtgtaggcataatgtgaggaggtggggagaccaccccaccccatgttccaccatgaccttttccaggactggtgtcctccc

SEQ ID NO: 499485 - DNA, 653 bp, Homo sapiens
  misc_feature (52)..(52): n is a, c, g, or t
  misc_feature (65)..(65): n is a, c, g, or t
  misc_feature (83)..(83): n is a, c, g, or t
  misc_feature (85)..(85): n is a, c, g, or t
  misc_feature (87)..(87): n is a, c, g, or t
  misc_feature (96)..(96): n is a, c, g, or t
  misc_feature (163)..(163): n is a, c, g, or t
  misc_feature (186)..(186): n is a, c, g, or t
  misc_feature (225)..(226): n is a, c, g, or t
  misc_feature (229)..(229): n is a, c, g, or t
  misc_feature (235)..(236): n is a, c, g, or t
  misc_feature (247)..(248): n is a, c, g, or t
  misc_feature (266)..(266): n is a, c, g, or t
  misc_feature (271)..(272): n is a, c, g, or t
  misc_feature (302)..(302): n is a, c, g, or t
  misc_feature (310)..(310): n is a, c, g, or t
  misc_feature (361)..(361): n is a, c, g, or t
  misc_feature (587)..(587): n is a, c, g, or t
  misc_feature (633)..(633): n is a, c, g, or t
  misc_feature (636)..(636): n is a, c, g, or t
ggccttgcttgaacaaccccttggctttcattgagcattggctttcgaaccntaattgaacaacncccccagatttcatgcangntnattgtccgngcattgattttcggggtggcaaacaaaccccctttgggaacctccccggcacccagcccccctcgcnagaaccgaccctggcccagcctncattccaggggggccagcagtttgcccagcagatgcagnnagncagaanncccagagttgnntagagtcagctcaggagnccagnntccggagttcggacgccccagcgcccacanacgacganccagcaggagtgacgctgcctgctcccggtgtgaccgcgtccttccctggnccgacccgaaggaagccttctggttgtctgccacttcctcctgttggactgcctgagagaggggaagagagagacctcggacctgcatgtcaagatggattttccccttttatctctgccctcctccactccctttttgtaactcccttacagcccccagacccttcttgaaacgagagccagcaagctgagcacagaccagcagcgacctcccttccagcccccngaaagctcggtcacttgagtgttttctaggggctggaagggaggtngcngctggtctgtgctcagc

SEQ ID NO: 499486 - DNA, 250 bp, Homo sapiens
gaacaggccggtctccatgacctctagtttctcttgggggctccgcccagtcgccaggctcttctggtcgtgatcctccctcctatggccctgtctctgaaggcgccaggagaaatccaaggagtgggagggtggagtcaggatgaggagtggacactggtcagctgccccttctgctggaagtagaactggaaccgagactgggcatagtccaagtaaccaaagtgctctggcatcccatttcttctgg

SEQ ID NO: 499487 - DNA, 135 bp, Homo sapiens
tcccaagtatgaggaattgaactgtggagctagatcactggctggaggttacggctatgaattgtagattctggacaccatttacatcactgataattcagtccataagaatgaataagccaaagggagcaattt

SEQ ID NO: 499488 - DNA, 365 bp, Homo sapiens
agcactactacgacacgggcgacatctagatcattcaaaggcacatggacgcaggcgttgaacctgtcaagcaccagggatgagatctagtatagggacgagacatctgagatgatggtgcacatgatgatgcaggcgatcaccgtcaggtagcttgatgacgcgaagctatggtgacagctggagcagatgaactatcgataccaatgtcactgtgaacatgatactttcagtcaaggagatgcatgacacaggcatcgatgaactgcacctgaacaggattaacatgtgagaccgtatgcctgaccagcagcccagagtgcctgctgcatgccgtcaccatctatggagactatgaccacccg

SEQ ID NO: 499489 - DNA, 878 bp, Homo sapiens
  misc_feature (26)..(26): n is a, c, g, or t
  misc_feature (44)..(44): n is a, c, g, or t
  misc_feature (57)..(57): n is a, c, g, or t
  misc_feature (62)..(62): n is a, c, g, or t
  misc_feature (80)..(80): n is a, c, g, or t
  misc_feature (105)..(105): n is a, c, g, or t
  misc_feature (108)..(108): n is a, c, g, or t
  misc_feature (130)..(130): n is a, c, g, or t
  misc_feature (133)..(133): n is a, c, g, or t
  misc_feature (137)..(137): n is a, c, g, or t
  misc_feature (140)..(140): n is a, c, g, or t
  misc_feature (148)..(148): n is a, c, g, or t
  misc_feature (179)..(179): n is a, c, g, or t
  misc_feature (188)..(188): n is a, c, g, or t
  misc_feature (191)..(191): n is a, c, g, or t
  misc_feature (213)..(213): n is a, c, g, or t
  misc_feature (244)..(244): n is a, c, g, or t
  misc_feature (247)..(247): n is a, c, g, or t
  misc_feature (275)..(275): n is a, c, g, or t
  misc_feature (281)..(281): n is a, c, g, or t
  misc_feature (283)..(283): n is a, c, g, or t
  misc_feature (310)..(310): n is a, c, g, or t
  misc_feature (327)..(327): n is a, c, g, or t
  misc_feature (345)..(345): n is a, c, g, or t
  misc_feature (350)..(350): n is a, c, g, or t
  misc_feature (362)..(362): n is a, c, g, or t
  misc_feature (382)..(382): n is a, c, g, or t
  misc_feature (385)..(385): n is a, c, g, or t
  misc_feature (415)..(415): n is a, c, g, or t
  misc_feature (429)..(429): n is a, c, g, or t
  misc_feature (441)..(441): n is a, c, g, or t
  misc_feature (486)..(486): n is a, c, g, or t
  misc_feature (501)..(501): n is a, c, g, or t
  misc_feature (513)..(513): n is a, c, g, or t
  misc_feature (533)..(533): n is a, c, g, or t
  misc_feature (553)..(553): n is a, c, g, or t
  misc_feature (568)..(568): n is a, c, g, or t
  misc_feature (571)..(571): n is a, c, g, or t
  misc_feature (584)..(584): n is a, c, g, or t
  misc_feature (636)..(636): n is a, c, g, or t
  misc_feature (642)..(642): n is a, c, g, or t
  misc_feature (665)..(665): n is a, c, g, or t
  misc_feature (678)..(678): n is a, c, g, or t
  misc_feature (685)..(685): n is a, c, g, or t
  misc_feature (722)..(722): n is a, c, g, or t
  misc_feature (740)..(740): n is a, c, g, or t
  misc_feature (763)..(763): n is a, c, g, or t
  misc_feature (774)..(774): n is a, c, g, or t
  misc_feature (798)..(798): n is a, c, g, or t
  misc_feature (810)..(810): n is a, c, g, or t
  misc_feature (850)..(850): n is a, c, g, or t
tgtcttgaaacaacaaaatttattcncttgcagttttgggggcnagaagtctgaaancaggnttttggcagggccaaccntcttcggaaggcactttggaataanccntctttgccttttcttagcttcngcnggcnccnggcattcngcggcgtttcttggcttccagttgcatcacnccaatcccngcntctatctccaaatggccttctnccccctgtgcacatttatctatgtgtccccntcnaagggcgccaaccattcgatttagggcncattcnanaccagtatgaccccatcttaaccaatnacatctgcaaaaacccnatttccaagtaagtaaanatcgngagggtctaggnggacgtgaattttggggganccngtccaaccccccccaatcccacaccttaanagtctttgtatatncttttgtacacnctgaattttttagtatgtgcatttattactttttcaagtaaaaanaaaggagaaaacaanacccccggagtnctgtggcactaaaaaaaaanattctttctgtccagtttcncccttggagggcacnacnatttagtctcccnaagccgggcttccaagtcctgcccttctccaaacttttaccaaactgaaganaaagtnatttttcaaaatgatctcaaganctgtcaatgaggnttaagcntaagcgccacagttagcctaaaatggcttttcatganctggtctccactaccccnctttcagtttcatctttcaatanaatcccctgcnccctacctgttccgccctggactnctcgcgggtttntgaactgcccaggccatttcatcccgccctattccggggntgcactttgctttagcgctgcttcttgc

SEQ ID NO: 499490 - DNA, 105 bp, Homo sapiens
ctctagccgatgcttattacacatgcacacacagcacacaagacggttgtacacacacgcacacacatgcatccccgcagctacacacacacaacacacagcaca

SEQ ID NO: 499491 - DNA, 443 bp, Homo sapiens
tattacgcgggcagtaagtataaacctcggaaacgaatcatatgtgtccagcgtttgtctccatgggggccgaaaaccgccggggatgcagttatctactcgcacaggagaattgaataagcgaactgtgttgcatccatacaagggacctgctgacacatgcagcaactgtggatcaaggtcaataacattaagttgagcaaagtaggccagacataaaacaggtcatgccgcacgattccacttcaatgaagttcaagaacaggcaaaactaccatgacagaagtcaagagagtggtgtcctctgggtgctgaagggcggggaaaagggactgggaaccttagtgggtgaggacagtgttctatatcttgatatgagtgttggtcaccaagccatacacttcatatttgtgtatcgtaaactatctcagtaaaggactgtc

SEQ ID NO: 499492 - DNA, 100 bp, Homo sapiens
ctagaggatcccgttcactttcaaccctgacccctctccttcataaagttattcagcttcctacactattaaagtttaccacaaccaccacccccaccac

SEQ ID NO: 499493 - DNA, 160 bp, Homo sapiens
ttccaagcatacatgcgcatatggccagcaggccacaggtttctatccctcagcaacccatgctctgtagtgcaatcggtggcacagggcacagtgccaccattcattcacagcaccttgtatccaatccagcatgcactgtttctgcatgcccaatgca

SEQ ID NO: 499494 - DNA, 300 bp, Homo sapiens
tacgagggggcacactgagctggatgacgcattctacaccattcccatcatgtacaaaatcatcagagctcgaaggagcattccacccacatatgaagagcacctcaatgctggcggtctcatgactcaggaggaggtgtctgacactgaatcctcctactaagccaagttgattgatcacgtatgtaacatggtccactacaggccccctgccctgaacctgcaggcccactggtagggcctggttcatccagaagcgcaaatcaccacctggagtacaggtgtgcccctcgacctcct

SEQ ID NO: 499495 - DNA, 967 bp, Homo sapiens
  misc_feature (967)..(967): n is a, c, g, or t
tgagtccggtcgctgcggggatccctggacgtgactgtggtaaactcggaaatgagctcacatcttcctgtgtgacacctgttagtcaactggatgggtctgcattgcgcgctgccgcttggcgaccgttccctcttgatgccggaggtctttgttgtgtagcttcgtcttgctttccctgtcatttctcctcaaatcgtatggccgcatggatttgcgaggtcccgggcttgaggaagtagtccagtgtcctatgtgatcacgcttcgttcgtcgttcctccatgggtctctcctttggtgcttgttggtcattcgatgcccgtgctgctcacattctgggaagctccatggatgatgctgacggccaatggtgaaccgtccagaacatagtccccgtgggccatggaagcgacttccaccatgaagtcttatatcccgtgcccgggaggaatctctagtcctggctggttttccattggttgcttgtctggttcctgcttagacggcctgttggatgctcatttcgcaggcaggccacgcatgctgggcgtctatggaatgctttaataaagctgggcggccagagtgttagtgtaggcggcaagaagtacatgggaggacaatggcctgctcaagaagggcgctgtgtagacgcggcaaggtgcggtgtcgggaatgcgtagtgatgttggacgcataaaactggacctgaggtgacctgcgacctatgggcgagcggccggacttagcgaggcaggtaactgcaacctgtctggcatgctaacgtggggtcaccagggaaaacgggcggagagacagcggcacagtggcaattcctgggggcagaagaaaagggcccccctcacagttccgaggcggtaaaacgcgccccgagtgggcttccacacaaggcgtccccaaagagacaactgccggctcgtgctgttttttcggctgactaggcn

SEQ ID NO: 499496 - DNA, 934 bp, Homo sapiens
  misc_feature (924)..(924): n is a, c, g, or t
ggcgcgtgctgcgcgcgcgctgttgagccggcgtccgtgacctgtagctgagcagcgcttcccggccggtgtgccctcggatttggacctgtgtgaatgaaaaggcgcgcaactgcggaggccgatttgcgcgcgtcccgccaccttgacccggtgggggttgctcgggccgctgagggcagttgcggccgccccgggtggtgggggcttcggtgcgccgcgcaaccggccggttcggttgcgcctggtggacccctttcgaggtgcgcacccggcttgtggctggaacaaccggcgtctaactggaggcccgtgggtcagcctggggaacggcctccgggtggcggcgcgtggacactcccgaaacaccttggtgggaccttaaccaagaaccgtggggaagcaatctgtgcaagcgaggtgtggagcccctttgaagttgcccgttggatcggcagccgggattctcataaaaggagagccaaaagccagtggctccgaagggaagagtggctcagggatcgtcacaaggcaccaaggtgaacggcacaacttaaaccgtgtggcctgacaacacatcgtgggctggggcgctgcccaagagtggcaggtctacggcaaaatttgtaccggtggagaatagctcatgaacaggttggcaaactgttccaccatggtgccgcaaattataggaataccttggggtgggccacgcaagcaaagagggatgagttggcactgacacacttcgccatgggggagggcagaaggttctggaataaacacatggctagagacgagtcgataaaggacaacagtccgaaaatggtagctagacagcgcagaaccatgtatggtcacagcgttgacgtataatgctctctgcctgccgtctctctcgtcgttcttccctctgatcgacgncaaacaaaag

SEQ ID NO: 499497 - DNA, 426 bp, Homo sapiens
  misc_feature (330)..(330): n is a, c, g, or t
tacttttattcttttatttttgagatggagtttcactgtcacccaggctggagtgcaatggagcgatcttggctcactgcaacctccacctcccaggctcaagcaattctcctgcctcagcctcctgagtagctgggatcacaagcgcctggcaccacgcccagctaatttttgtagctttagtaaagacggggtttcaccatgttggccaggctggtctcaaactcctcacctcaggtgatccacctgcctcggcttcccaaagtactgggattacaggcgtgacaacttgcgcccggccttaacatagggattttcatcctaggaatngacttttccccaaaaagattcaatcttagggcctcttgctgtagggcaagttccatggggatttcacaaaagagggcaggggaaacagttcccctg

SEQ ID NO: 499498 - DNA, 383 bp, Homo sapiens
tactaaattcgcggccgcgtcgacagacagatagacagacagacagacagacagacagaagcattcactgtgctacagagctggatcctcagccaagaatcctagaatttttacagtaattctcctccatggctgcattgttttacagctaagaaaacctgcgcttagtaatattaagtgattgtttttcaaagctgtcaagtagatgtttaaagttcagaagctgagtgagttctttcttgctctcattttttgttgttgttgttgtcttccccacccaccctgctctataagatcttaaggagccactgcaatgttccctgggagccacatagatctggctgcatagcaagcacatcaagtgaaaaaggtcgacgcggccg

SEQ ID NO: 499499 - DNA, 162 bp, Homo sapiens
agccctttttcatgggcacaccctgttctataattagggaggtcccttcttgaggtaagtcatgcgacttgaagactcttagtgaacttcgtgagaggaaacccaattccgactagtttaagcaggaattttttaaaaaatgagaattctttagttcactta

SEQ ID NO: 499500 - DNA, 326 bp, Homo sapiens
  misc_feature (243)..(243): n is a, c, g, or t
atgattctacttatataatgttctggaaaatgcaaaactatggggatagaaaacagacaaatagttgccagaaattggtagtggtaggtagatcgacttgacaggggaacaagggaattttcttgggggcgataggactattttctgtgtcttcattgtgacagtagttataaaactgtatgcatttgtcaaaaccaccctgacactaaatggacatttttttatgtaattaactcaaaaagnctggttttaaaaaatcaaaataaaattctttctaaattaaaaagtaatcccatttttaataaaagcagagctttcctattgaa

SEQ ID NO: 499501 - DNA, 502 bp, Homo sapiens
ttagccaaaggtcatgatatcaccgtcacttactgtgggacgaggcctgctgcttcccactcatgaggttaccttctgcatggggggagtgccagtccggtataacatatactgccttctctccgcaagtccccctggggagaaggtgaggcttctctaagtggggaggacggagcgaggaatggtatgcctcagtcatctcttttccctttcttcccatctttacgaatgaggctctacgtcctcaatcccgtggagttgtatagtccaagaccctcacataaggacggctaacaggaggtcaaaagctacctgtaacctgggtgggaacgtctgactcattctagacgttacgtcttgaaacaattgtgccaaatttaaatctaaaccacatttgccaaaagcagttggatcagaattaacactgatgtatttgcatcatctgccacttctttgctcacgtttcctcaaactcccaaatccagaagcatgacagtaccag

SEQ ID NO: 499502 - DNA, 573 bp, Homo sapiens
  misc_feature (177)..(177): n is a, c, g, or t
  misc_feature (319)..(319): n is a, c, g, or t
ggtgcgagcgtggacctgggacgggtctgggcggctctcggtggtggcacgggttcgcacacccattcaagcggaggacgcacttgtcttagcagttctcgctgaccgcgctagctgcggcttctacgctcggcactctgagttcatcagcaaacgccctggcgtctgtcctcaccnatgcctaggccctttgggaccgcttctcgtcgtcgtccacctcctcttcgccctcgtccttgccccgaaaacattcccccaagccccagatcggcgccgcgctcagcctgggggtcggcgaccgggaggaggggtttgaccngtccacgaagcctttgggggaaagaaaggcttcgggacatgcgagtccctggacagcagacaacagtggcttcgggccggaggaagacacggtattacctggggcaacttggggggggttgattccgttgccgaacttcgagctgctcagtgaccctgagggatgaacccactttgtgtgcccaactgattgccaggttgggccttgggccacacgggaagaaaggccttgggcaccaagggcagaccgggttg

SEQ ID NO: 499503 - DNA, 258 bp, Homo sapiens
taacgcaatacagattgttaccccactgagtcaagggcagggaccgaacccacaacctcatggttctagtcggattcgttaaccactgcgccacgacgggaactccaggcttaggtctttctgatctgatccctgggccaggagcaccatatgctgcagggcagccagaaatgactccccccccccaaaaaaaagtatgtcgcaggacacccatcctcggctaacacacgagaagcacactttgttccaactttaacg

SEQ ID NO: 499504 - DNA, 177 bp, Homo sapiens
  misc_feature (75)..(75): n is a, c, g, or t
  misc_feature (165)..(166): n is a, c, g, or t
  misc_feature (170)..(170): n is a, c, g, or t
gcctcgattgccccaccccaatcctaggccaagacattttaaccaaattcaaagcttctatcatgttttcctgtncccctcaaccagagtccctcctgctcctctctgctagtctggcccctgaaccccactccccagcacccgctacccgcctccctcattaanncagnagtagtg

SEQ ID NO: 499505 - DNA, 404 bp, Homo sapiens
  misc_feature (10)..(10): n is a, c, g, or t
  misc_feature (68)..(68): n is a, c, g, or t
  misc_feature (205)..(205): n is a, c, g, or t
  misc_feature (321)..(321): n is a, c, g, or t
  misc_feature (328)..(328): n is a, c, g, or t
  misc_feature (357)..(357): n is a, c, g, or t
  misc_feature (384)..(384): n is a, c, g, or t
  misc_feature (393)..(393): n is a, c, g, or t
attcactatnacatcttgattttgcccgtaggaatgtgaatctccctcaagtaaagaatccctggggncctggaagatggatgtcttacttcgttttctgacttcctcagtctctgtcagataatcagtgctatgtaaatgttaagtaaatgactttatttatttatttatgacacaaccttattctcacccagggctgggagtncagtggtgcagtctcggctcactgcagcctcagcctcccaggtcaagtgatcttcccacttcagcctgctgaatagctggggactacgggcatgttccatcacattcggctaactntttttcntctttttgtagagatgagggcttcctacngtgcccgggctgtttaaaactctgggntaagcaatngtccactcgtc

SEQ ID NO: 499506 - DNA, 522 bp, Homo sapiens
  misc_feature (197)..(197): n is a, c, g, or t
ggtctctgttgcttacgccgggggccggcgcggcgttggccgcccccggcctcgccgagtgcagcgcgcccgaaggccagtgcctgcgctccgtccgcggcccggcgcccagggtgggcggggaggccgccgcgcaagtcgccgcacgctacaccgccggcgccgtcgtttcgcgtcccgcttccggccaccgcggncgtcattttgttcgcgcggaagcgccgcggtagggtgggaacccaagcgggagagccgcgggatttgcgggcgccgccatgccgtcgtccccgctgtgggtggcggtggtgtgcttcagcaaccataaccggagcatggaggcgcacaacattctgagcaaacggtgattcagcgtccgatccttggaacagggactcacgtgtagtttccaagacacgttctcgacaggccaatgtttatgatttcccacatattgacagaattacaatgatcttctttaggaaggcgaaccctttacacagtggtatttttactattgttgtc

SEQ ID NO: 499507 - DNA, 158 bp, Homo sapiens
atactgtggtgtaccgtcaccaccacttccaaaatcatagacacacatgcacacataagacacttcccacaaaagcagtcctcaacacataaaccacacacctatggacaaacacctcagctacaaatccctgtaaacatgcacagacacattcccac

SEQ ID NO: 499508 - DNA, 267 bp, Homo sapiens
cctgagtgcagccactgcctttgtgtggtagttctcaatttgaattggacctgacattcctgggtacctaggcaatgacacacagcagtaggtagggatcaacactagaatagagctgttgttacgtttaccccaatattactaattgcccaaagtgtcagtccgatgtagttctcttcatgcaagtatagattcaattgctagttatctttgagtgagcctcctcgctatagtaacatcaaattgaagcaggctttctgcacctca

SEQ ID NO: 499509 - DNA, 297 bp, Homo sapiens
  misc_feature (13)..(13): n is a, c, g, or t
ccccccccccgtnttttttttgggggcgcggggggttatcttttccccaccggggggcctggctttttttggccccttggttaacctcttttggggggcccctttggggttggccccccgtttccccgcccggtttttcggggtggcccccgccttgcccgggtttttgggtttttttgcagtgcccgcctctttttggcccaaagggccctttttccctttttcctcccctccacattcactttctaactctttcttcttcttacccattttccccccttccccccctcttcaata

SEQ ID NO: 499510 - DNA, 112 bp, Homo sapiens
ggtagtaatataactgtagggacgatgagtttagcgatgggagtaggtataggttatgtacgtagtctaggccatatgtgtggagatcgagactagtagggctaggctacgt

SEQ ID NO: 499511 - DNA, 278 bp, Homo sapiens
cggatcttcgctatgatctagtgtgtgctatccgcaggaaccgcgagatggtctagagtcagcttacatccctgagcaggaaagtttacccatgaagatgggtgggatattatgtttgtttgtttggtttggatagttgtaagttgtgtgtgtttatgccactaatattagtattcattctggatggctagataaaagctgacagttactttattgtttgtcttttaatgcttcattcaagtattgaccctttgtagttgagcgtggggtaggacggt

SEQ ID NO: 499512 - DNA, 776 bp, Homo sapiens
ggcatacgaggtcattgaatcatgtgacggtggctggatcgaggaacctgtctttaatagctgtcccctgaaagtgactacgcggagtatacccagggtgcccattaatccccagtgcgtgaagattgatcctgcgaaataccgcggggtcgcatcatggcggggttgaccctaaaggcgagttctcgtatcagagacagttacctactgttgtggaaagggctccaagtgccattgtcgtgtcggatagagatggggctgacctgtgtgattaaagtgggaatatgacaatgctccatgagcatgctttgagactggtttacttattgcatctttttctccctttggaaaaagaaggcattgggtagagctataaagtaagtgagcttttgctcagtaaaataaatacgtattcagtgctgttttaactaattaatgaatctgacccagggtggattacaaattttgatatccgtttagcctttatggttggtgaagtatgtccataagactaagaagataaggtggtcgaaatgatcccggagacctaataagtggttccagcccttgacgaaaatcagctgcaccttgtggcccctattggtttccgcctagaaccttgagaacacagtttgtgtactgattctctctaacttcgtggaacgaggtgcgtgttctagttgtgataccctgaaatctttcatttataaacagataccacctttcttacatccacgcaatacctaaaagagctacaagtactaactttaatccgg

SEQ ID NO: 499513 - DNA, 372 bp, Homo sapiens
ctttttggcccttcagacacgattaccacacggggcccttttatgacagccaagataacaacattgtgcgaatttgctgtgtgggcttcccaagtggtgagacacaatctcctccgccaggggtctaccccccacccatatgatactctccccgaaggacaccgagggaggccaaaacagatgtgttgcacgaccacagattttgccatgggtcccccgcattaagaaaaaacccttctgggaataaatttttaacaaggaattttttaattgttaaaaaaattttaaaaattttggggcccaacaacctttttaaaataaaattggggaaaaaatcagcattttttccaaaaaactttttgttaaaaccca

SEQ ID NO: 499514 - DNA, 530 bp, Homo sapiens
gatctagaggctccccccgtgtctagccagtgctgtcggcaggtggcttaggcgtgggtggagagaagcagctactcctatggcagtggtcttggcagtaggaggtggcttcagtcccatgcagtggcagagccatggggggtggcctcagctctgtgggaggcggcagtaccaccatcaagtacaccaccacctcctcctccagcaggaagagctataagcactaaagtgcgtactgaaagctctcggtcccacagtcctcaggcccctctctggctgcagagccctctcctcaggctgcctttcctctcctggcctccagtctcccgtgctgtcccaggtagagctgggtatggatgctaagtgccctcatttcttctctctctctctataccatctgagcacccatggctcaccatcagatcaccctctgatatcacatcaggatgtactcaccaggggagctacactgtaactaaattataaattgcttgcctccagtgttctatctctgaggctgagcattataa

SEQ ID NO: 499515 - DNA, 202 bp, Homo sapiens
tgatgcgcccaatgagtgcatcagtttatcaagctcgacagtgagtataggcccactcatcctattggttgtttcatcgtcgataataagtcaggcaaacagttgacattgtatcatatactagagcagttgtcctcattagccctaactgaaacagatttcgaaacaccgctagattctgttcagctgctaagtatctgta

SEQ ID NO: 499516 - DNA, 139 bp, Homo sapiens
aatcctcacaaacactatcataaaacttaccaactataaagcatcatgtgaaccagcacaacaggaagtacacagcgagaggcagggctgctccaaaccccattcccatcaggttcacttgtgcggcggatggtgctct

SEQ ID NO: 499517 - DNA, 941 bp, Homo sapiens
gaggctgaggcggcggcggcggcgctgcggcgggttcggtgggaccaatcccggggcggtgcggctgtatcgggcgcgggcgccccgcttttcctgcaccctgctccggtgcctccgattacgtgcgatgccttgatgcgctgtgctgtgttgtggcccacgctgccagctggccacgggatgacggttgaagctgcgcctcatgcacgtgccttgcctgccgtcggtccctccgcgtggcccggcttctgtccccccctgcctggagccgtggccaacaagtggccggcccagtgttgctttgttggtggacccttgcgccgacgctttcttcctgttcgcgccagcccgcccgggggcgcccccggatcaccgaagcacatgacttgcgcgagaatccctgacgatgatgcacgcatccaggcagaacacgacagggctccgaaccacgggacaaccccaagacggcgtgcaagacagggacataaccttttccgtcaatttaaagacataggaccccgggctgccattatacacttatgttgcatgagccaccctccctttcgaaattacttcaatccgaacgtgggcgactaactgtccgtcccggaggccccagcaggacttgacccccttactgacaggtgtgttcataatctacgcgacgcactttaattctgtcaccccgaagacatccccgtttcacagacgtcccagttactcgtattgtgactcaaccccaaccgggccaggcatcaagtgccacaccagggagggttgattatcgctatcacggattaccaaccgggaactcagtggaacccctggccgtggtctggtctccacccatactctgatctgggtccgtagcctaccgtgtgtaaacggcccccacgtggcggtaatgcgagcggccttacgcacgccagtggggaaactaa

SEQ ID NO: 499518 - DNA, 444 bp, Homo sapiens
  misc_feature (46)..(46): n is a, c, g, or t
  misc_feature (75)..(75): n is a, c, g, or t
  misc_feature (97)..(97): n is a, c, g, or t
  misc_feature (135)..(136): n is a, c, g, or t
  misc_feature (143)..(145): n is a, c, g, or t
  misc_feature (148)..(148): n is a, c, g, or t
  misc_feature (339)..(339): n is a, c, g, or t
  misc_feature (364)..(364): n is a, c, g, or t
  misc_feature (399)..(399): n is a, c, g, or t
  misc_feature (430)..(430): n is a, c, g, or t
  misc_feature (435)..(435): n is a, c, g, or t
ttcgcactgctgcaggcccagctgcggggcacggacgcggcccgcncatgcaggacctcgcggctgggccgtggntccctgtgccgccgcgctgagnactttagagacgccttcacccaggagctacgcgcggcnnccgagcnnncgnggccaccaccaggtagccagaggggccctggcgcaaacatttaatcctggccgaggcgcttgcttttccttccgggctctacagtggcatcaatgtggaggggtcattccgggcactgcgcgcggcttcgaatcccgactgggattgttggcctgcagacatcccacgcataagagcctaggccagaccgnccgctccgttgaagtcttgtgattngacaagacacagtgttggagacagccctaagcctnacagagatgaaggtaggcttggtccagacanggcanctacggaga

SEQ ID NO: 499519 - DNA, 983 bp, Homo sapiens
  misc_feature (807)..(807): n is a, c, g, or t
ctagattgccagatctgtgagagttaacaatgtgtagactacttgtattcgttaagctcgtgatgcgatatatgtaggcatgctgtgtaaagtgtctgtatagctctttaattcagtcacgtattaagtacagaattatcatgtgcgtttctcgagtacttttgagtacaatgtaaatcgatgaagctggtcgatgtttatagactgttggtgagtcccttgggcttagtgtactgtaaagttgttattcctgtgttgtgttctaggaaatcgagatgagcggtgaagtcataaaggtcattcggggagtatcggacgtagatatattgaagaaagtgtcttatttgctcgagaagcatacgtgacactgcgtaggacggttgaaaattaataatcaggggtactattgcagaataagtagtagagatggatggcaaatgttaagggatccaaagtaaatgtctctcgaagtgcgtataaaggtggcggccgttaatgagatgtataaaaatatcctagaaaagatatctagagagattgtagtaagagaactagcaatatattgacattctgtgtacttgggaaacaactaagaagcgggtggagaagcataatattatgctcggaaggaaattcaagatagtagttaagagccttttgcaagttactgtaatgagccggttcgatagttgagtgaacgtttattaagaataggcggatgtaaaaacccgcagtgcaaaaggcctggagagcatgctaacttccatgagtgctgaggggtcaacgcaaaatgtccggcgaaacaantgaccgattacataatgtaacaatgccctgactaaagtggcaacggttgacagttgaacatatcctcaaggtgcccaaaaaagagacccctgttgccttgccagcgagaaggcaaaacctttccaaggggcatctggcatcaagacggacccatgggggaacacactcctcttgga

SEQ ID NO: 499520 - DNA, 857 bp, Homo sapiens
cggcacctggctgtgcagtacactggtgccccctgaactggctgtcaccgctgtagggtgttttgtggcaatggtgcttcaagaatgctgatccactgtgcgcaaccacctgcggacacacactgtggtgagatgtgcccttccagttgccactcatgtgtgcaatgacctttgctatctttggccaacctcagcctgccaccatgctgacccatacgggtgcactgtccctaccaatgcctggactgtgtgcaatgctgcttcacacatgatgctccaacctgcatgcatgcacctggcgtgtttgcactatgcgggcccatgtcagccatttgccctgatgaccccccagacactcccctatcactgagtctcttacaacgaacgatgtcccatacctacattgctggtgactatgtggcctgcatggatacctgaagccataggcgaggctttgcagaattgcattacagcctggagtccatatgccccgagacattcggacatattgaagcggctcacatgccttcgccgatgagtcacacaatctacctgaccaccacacccaccaatcttcacatgaagacttacaacaggagtactcaatgatgccacagtaagtcatggtatgtgtaagaactatctgcccattcaacatgtgaacacactcccccagtccatctatgtgcgccaatgtagttgaccaccccttgcgatgacttgttgcctatgttcttgccaccttgtgctggcccacagcgtcacagcaaggcgcgggatccatgtcagtactggtacaccgagcgttacgagttgacgcacagcttgaatacactcacttaactaacaactgtgtt

SEQ ID NO: 499521 - DNA, 109 bp, Homo sapiens
gcacgctgtacctcctacatggggcagactccaggaaccccagtggaccccggaaggaaaacagcccataggaggacagaagagatagaggggcacatgacccctggac

SEQ ID NO: 499522 - DNA, 353 bp, Homo sapiens
aaaaggttcatggaacctttttatgttctttcttgtgcagtcaaaaccaattgcaggctggatgcagtagctcacacttgtaatcccagcactttgggaggatgagatgggcagatcacttgagctcaggagtttgagaccatcctgggcaacatagtgaaactctctcactaccaaagtgcaaaaggaattagctgggcatgatggtacacacttgtggtcccagctacttgggggactgagatgggaaaattgcttgagcccgggagtcaaaggttgcagtaagccaagattgcaccactgcactccagcctgggtgacaaagtgagaccctgtctcaaaaaaaaaacaaa

SEQ ID NO: 499523 - DNA, 290 bp, Homo sapiens
ctagcggcattaagtgaacggcttccaacctacaccacagccatagcaactcgggatctgagctgtgacttacaccacaacaccacagctcatggcaacgccagatccttaactcactgggggagggcagggatcccatctgcatcttcatggacattaattgtgttcctgactgtggagctacaacaggcactccttgttttgtactttacataaatgcgatcgcacaatacataaaacagctttttactgaattctcagagagatccgttcacttaatgccgctagcg

SEQ ID NO: 499524 - DNA, 151 bp, Homo sapiens
tttggactctgaggcaggtgtgattgaggatgcaatgagctgtgattgtgccaccacactccagacttatagagaacttgcccaccaacataaccaatttatgaaagtccacttcattcaaaaggtataagaacctcctgttggggggctt

SEQ ID NO: 499525 - DNA, 412 bp, Homo sapiens
  misc_feature (220)..(221): n is a, c, g, or t
  misc_feature (223)..(223): n is a, c, g, or t
  misc_feature (325)..(325): n is a, c, g, or t
  misc_feature (329)..(330): n is a, c, g, or t
  misc_feature (335)..(335): n is a, c, g, or t
  misc_feature (339)..(339): n is a, c, g, or t
ctccatctttctctctctctcccgggctctatttcctccctccccatctctttctctgtgtctgtctctgtatctctctccctttctccctccctctctttatctctctctctctctctgcctctatctcccactgtccaaatctgtgtctctgtctctccctctttcattctccctctctttctctatctctctccttgtctatatctccccctctccnngnctctctgtatctctgtatctctctccctttctccttccctctcttcatctttctttttgaaacggagtttttctcttgttgcccaggtggagtcatggcacnatcnnggccnctcntctttattttctttcaaaccacaggtcagagacagaacctcctttcagctactcaatcgagaggagcggtgga

SEQ ID NO: 499526 - DNA, 363 bp, Homo sapiens
cggcacgaggtggaggcctggatgaaggccacgaggccagtgatgggtgggtgggggcctggcccagaatattgctgtgctgccccatctctaaatagagggaccttggccctaggctgaggggaacaggcagtgaggctcaccgagaggaagacagcatggagcggtggcacgaggcaccacacactttgtctaaagagggcattgctcattttctccagctgatggctgtcatggaagaatgtgggcccagtgtcgccacagcttccattttcaagagagaagccgtacatctgggttttatgtgaaaactcctaacttttaagtgttggctcacatttttaaaaaaaaccggcgcggccg

SEQ ID NO: 499527 - DNA, 387 bp, Homo sapiens
agatcgatctgtggaaatggtcactgagatggtgtgtccatgcacaaaagggcacaaagaggggaatacttgtgtgaacgcaatgacaggtgtactagacatctgtacaggtctggtggcagcagtcaggtttatttcatgaccttaggcaggacttctcttctgagctggtagaagcagtgtgatccagggattactggcctccagagtcttcaagatcctgagaacttggaattccttgtaactggagctcggagctgcaccgagggcaaccaggacagctgtgtgtgcagacctcatgtgttgggttctctcccctccttcctgttcctcttatataccagtttatccccattcttttttttttttctttttttttattggaag

SEQ ID NO: 499528 - DNA, 107 bp, Homo sapiens
tcgatctctcagcaggatccccctcccctgtcagccgaaagcttaccccctactccttgctaatgctgatatagctcgagggcaatgccatattaactatctcccga

SEQ ID NO: 499529 - DNA, 206 bp, Homo sapiens
gagtaactaattactgctatatactggagaagaattgaaatgccaaaaaaatcatctaccattatcagaaccctgcagcgaacattaacttattgttaaataaaccagtttgcaggtgcacaaactacatgagggtcttgtatccacgtaacacaggtggttacacaaaaacatgttatttgtacctgtggttaaagattcatcgt

SEQ ID NO: 499530 - DNA, 320 bp, Homo sapiens
ggggcccctttttccccttttttgggggggggggggggaaaaggggggcccccccccaggttcccctttttaggccccccttttttttaattggggggccttttggtccccccccccccgggggctttcggggggggggcctttaattttgggggggggggggggggggggggtaaattttttcctttttttttccggggggcggaaaaattttttcccctgggcctttccggggggggggggggggggggggttttttgggggggtggggtcccccttttggggggggggggtttttttttttttttttttttttttta

SEQ ID NO: 499531 - DNA, 1056 bp, Homo sapiens
cgcctggcgccggactcctctttctcccggaagcggagcaccgagccggcaaaggcttgggtgtgagacagcagcggtggcagacaccgcagaagcaaagagcagtgaggctcctgcattcgggtggagcaccatggacgaagctggcagctctgcgagcggcgggggcttccgcccgggcgtggacagcctggacgaaccgcccaacagccgcatcttccttgtgatcatgcaatgtacacaccgtgagtacggtgcttgacgggagctgcttctcagcctttttggcgagcatccatggacatcatgggtaggtgcgtggacaatgcacaccaatggagtccaatgggcatttgctattcgtcaatgttcgccctgcagctcacatggcctgcatgggcccatggaggagatgcatggccatgtgcactcggcccgcaacgacaccgaagccacatcaaggcttttcatgtgctcagtccctgatcatcgtggaagtcacctgagatgcttgaagcatgcacagaacttacaagcaatcttctgtcactgataccaaatgtcctacacagcaagaagatctgcgcggacaaactttaaggtgtatggagatatcgagtattgcagcattattaagaatacagtgactggagaaagtaaaggtctgggctacgtacgatacttaaaaccatcacaagctgcccaagcaatagacaactgtgatcgaagcttcagagcaatcttggctgaacctacacactacagcatctgactcctctgaacagattattatagtaatatgcggcaggaagcctgggcacatgacctagagcccctatgctaccatttgaaccacacttggacttccaagtattggcaggatgatagccagggcccgggacgcagcccccaaagcctgccacgagtctcacaagagcccctccctgcagaacgcgcctacaggcattggaaaagcccacgaacggacactggcggaccccgcgcaccccaccccaatggcgcgagggacgcccggcaagaggcacacagataacc

SEQ ID NO: 499532 - DNA, 161 bp, Homo sapiens
  misc_feature (4)..(4): n is a, c, g, or t
  misc_feature (28)..(28): n is a, c, g, or t
  misc_feature (99)..(99): n is a, c, g, or t
  misc_feature (116)..(116): n is a, c, g, or t
tcanatcattacactgcggctgtataanaaacctggtttggagggatttaaaggacacatggaatagtgaattcatgtccaaagaggcaccgggctttntaaaggaagtattcgtntgaccttttaatgatgggggcatgaaagttggatatttgtaagtt

SEQ ID NO: 499533 - DNA, 651 bp, Homo sapiens
cgcctggcgccggactcctctttctcccggaagcggagcaccgagccggcaaaggcttgggtgtgagacagcagcggtggcagacaccgcagaagcaaagagcagtgaggctcctgcattcgggtggagcaccatggacgaagctggcagctctgcgagcggcgggggcttccgcccgggcgtggacagcctggacgaaccgcccaacagccgcatcttccttgtgatcacaatacacactgatcgtgctgagaggttcgcttgatcagatctgggtgggaacaacagatcagctgtggtcagtcgcccagctcacaggctgagggccatggaggagatgcatggcagtgctcggcccaacgacacagccatcagtgcgggtgccgggtcggggtgcctcgggggaaggatgggcctgtggactcccttcacctgctgctctgcgggtagggaggagtgaacatccgtccgagtgacagaagactgctggggacagggctgttgaggaagtcctccacaactgccgggttgagaagggagatgggatgttgcccagaacgaccgagcggcacggtacgaaagagtgtggtcccttcctgcctctatccatctgatcctgcatcgtctactattgtattttgatctttaatc

SEQ ID NO: 499534 - DNA, 1749 bp, Homo sapiens
  misc_feature (1261)..(1261): n is a, c, g, or t
taatccggttcagtctaatccttttggtgagtccctcataggccaaatcttagggctaggatgatgattaataaaagggatgacataacttattaggtggcgaggttcagtggttgggtagggcctctaggggtgaggggtcaaagagggagggccaattctcttcagacactccaacatcaatcaagaagagggtaatcagctcactaaagacaagaacattttagtggtagaaagagggcaccgcgggcgggggaaataatgagcggctcaacagcccgccactctcgtatagagtggggtggattatttctctatagtgtatagcccgcgtgtgagttgtggtgtgatagactcacaagagtggtacaataacttatatagatagtatagagcggctagggagggggtgtgtggaacttattataaaaattggaggcgtgtcccaagagcgcagagagagtcaaggccaaagcattttgcaccgtagatgcgcgccggtggatcacacctattcatcgagcgctccttgggtgggggtgccccctagtgttgtgtgagacccccctatttccggcgagaattgggtgtccccccgcgaatatatgccgggcccctacatatcgagacccaccaggggctctctcgtgggtgtcttgtgcgctcttctgtggttttgtgtcccgagagagagagcatgtgtggtgctcccgcactgggggtgtcctacggggcgggagcaaagctacgtttgtgggcccagggggcttacgtgtgttgcgggccccctctttggtgcccccctcgggtggcggccaatttctggaaagaaggccccctcgtggcaatgttgggtgccctcgtgtgggcccccgggccaataaacaaaagcacgaggcaggcgagcatacaacagccgggggcaaaaactctccaaggcaaacgcggagggaggaggatccctcaagaggagagaacctccccgggcagccacacatacttgggtgggggacccccggctatggaggacgcgaagagtgagtcccctactggggagatgtggtcaacacccacactattcgagccccccgaggagagacagaatctctagggaacggtggccacaagcaccccgagtggggaccttggtgcggttgtgtcggttggggagaaaactacaccggggacgaacagcgcaccacaggaaaagtagactgcgtggcacaggaacaaccaccgagtaggcgtaaacgaacccccncccggagggggctcacacgggaggaaaaactaaccacaggctgtggccccccccggtggttgtgtgtgaccccccccacacacaaacgaggatgtactcgactcctccgaggtcccccgtgagaaggtggcacaccggacctggtaggtggagcgcacccacgtgcgcccacgagtgatcgcccaagcgaggccccaagagaaggatataccaatccacagaacacctaagactacgggggccccattgggtggcgcaccaaaagcgtgacaaccccaggataagagcggccccgataatgacgctgcaggagcaggccaccacagtcaccaccagtcaggtgctcccgccccgcgtagagttaagtaaacacaaacgttggtcgagcaagacgacgagcacaagcaacaaaacaaacacgcatcgttgtgtcagtagtatcgcaggtcgcttagcagcaaagtacagatacatcgaaacacacaggc

SEQ ID NO: 499535 - DNA, 141 bp, Homo sapiens
gtttttttaaaaaccccggggggggcccccccccccctttttttttttaaaaggggccccaaagcccccatttccttttccctttaaaaaaaaattaaactttccccgggggggggggccaaaaaaagttttttttcctta

SEQ ID NO: 499536 - DNA, 113 bp, Homo sapiens
atgaaaatggacatcccaccattcggacgtacccagatactgacctcgtcagtccctatccccttcaccgctccccacagctttgcacccctttcctccccatagcgatatag

SEQ ID NO: 499537 - DNA, 233 bp, Homo sapiens
cctagtttagaagtttcactagcagaaggtataggcgatagaaattgaaacctggcgcaatagatattgtaccgcaagggacaagatgaaaaattataaccaagcataatatagcctagttttagaagtttcaatagcacctagttttagaagtttccccaggcagcaatgcacatgctatgaccctacacatttacttagttttccctgctattgaaacttctaaaactagg

SEQ ID NO: 499538 - DNA, 183 bp, Homo sapiens
ttgttcttctttactcgatttcgcactcttgacattttctacaatgaatgtatattaataaacacagcgattattaccaattaaattaaaactttcaggttaaacagatagtacaggatcttgttctgccacccaggctggagtgcagtggcactatcacagctcaatgccaccttgacctcc

SEQ ID NO: 499539 - DNA, 442 bp, Homo sapiens
  misc_feature (46)..(46): n is a, c, g, or t
  misc_feature (77)..(77): n is a, c, g, or t
ccttttattattatgaggggactttcctataacccttggtaatgtncctttggatctgtagccctactttgtctganatagcccactcccaacttcccctttgattaacatcagcaaggtaccctcttttttcctagcctttgtcttttaaaaaaaaaaaaaggcccggtgcggtggctcacacctgtaatcccagcgctttgggaggccaaggcggatggatcacgaggtcaggagttcgagaccagcctgaccaacatggtgaaaccctgtctctactaaaaatacaaaaattagccaggcatggtggcgggtgcctgtaatcccagctacttgggaggctgaggcagagaattgcttgaacttgggaggcagaagttgcagtgagccaagattgcgccactgtactccagtgtgggcgacagagtcgagactctgtctc

SEQ ID NO: 499540 - DNA, 200 bp, Homo sapiens
  misc_feature (190)..(190): n is a, c, g, or t
agtcgcctccaatcagtatgtagtctagaccagatctgcagattggagagagagggtgccctgggtcaaattcgtctgtgatctcctcacctctcccagtgcatgataccaattctttcccttcattcccccaacatcctgttgctctaactggagcacattcacttactaacaccaggaaaccacaggngccttgtcgt

SEQ ID NO: 499541 - DNA, 186 bp, Homo sapiens
ccaacaccatttattaaatagggaatcctttccccatttcttgttttagtcaggtttgtcaaagatcagatggttgtagatgtatggtgttatttctgaggcctctgttctgttccattggtctatatatctattttggtaccataccaataccacaccatcaagtaatgtgattactcctaagcc

SEQ ID NO: 499542 - DNA, 272 bp, Homo sapiens
gggggccccctttggggttaaggggaaattttgggggggggggcacccccggcctttggggtttccccttgggggggtttttggtttttttccgggggggaaaaaaaggacctgggggttttggatcccccccccaacccccgggggtcccccccccccgggttttgcccccccacccagaagggggggggggggggccttggccccggggggcctgttttgtaaaaatccgggggttcccccttttataataaagcgggccttggaaccca

SEQ ID NO: 499543 - DNA, 127 bp, Homo sapiens
ggacgccaaaaagcaaaaataacggtaagggcgcccataaaaacctatactaggaagtaaagggcgggcaacagagaagcaggaggacgggaataatagtagtacaagatagtaggcatagaggagc

SEQ ID NO: 499544 - DNA, 158 bp, Homo sapiens
cgactctgaggatccctcagacagcggaccccccaggacagttggcgacaggacagcatgcgacctataacgggaagccctgaagaaaaagtttacgcgactccatgatgcggagcttcctccgatgaagacggctatgacgggggccggctgtctga

SEQ ID NO: 499545 - DNA, 225 bp, Homo sapiens
caggatccccgatttccactgctgataagacataccttcagactgggcaatttactaaaagaaagatttaattggactcacagttccacactgctgcgggatgtctcacaatcagtgcgtcacggccaggacggagcaagtcacatcttacgctccatcgtggcagtccaagggagctctgggcaggtcactctctatttttataaccatcacgactctcttcag

SEQ ID NO: 499546 - DNA, 146 bp, Homo sapiens
gtgttcacagaatgagattagtaaggaagccagtttatacaaatctgtgttcttgctagccataagaacacatcaaatattccatgaagatttcaagctttctttagacatatgctatttttagcactcgtgctcggtgccgggga

SEQ ID NO: 499547 - DNA, 116 bp, Homo sapiens
tttggggacttcagccttccttccagtctgggatgagtggggggtccagactacctgatgccccttccccaatttggagactttttgataatataaatataaatgtatattttgca

SEQ ID NO: 499548 - DNA, 329 bp, Homo sapiens
tgtatgatctcagcagagtaattagcatactcatcacctcaaacatttattattggtgttaataatattcaaaaatgttcttttttagcttttggaaaatacataataagtatatttaaccatattcatcctacatggctgaagaacaccagaactcattcctcctatctagctataatttcatattcattaaccaacctctccccatgctccccacccctttccatatgatccagcagtccttctactgggtatttatccaaggaaaaagaaatcagtatatcaaagagttgcctgcaccaccatgttcattgcaacacggtctctca

SEQ ID NO: 499549 - DNA, 106 bp, Homo sapiens
tgtacttttatttatttactatttgcagttttttccataatatttaagtttttcgatgtttgaaattgatcagggaccatgaaaagaaacttgtgcttcaccgaag

SEQ ID NO: 499550 - DNA, 101 bp, Homo sapiens
tcccggagcaggttgttgcagtccctcagctaagcagcttcttatgtctgctctcggggctgtggagacgcagtcggcgcctcttgttaactctgtgtgct

SEQ ID NO: 499551 - DNA, 242 bp, Homo sapiens
  misc_feature (124)..(124): n is a, c, g, or t
cctcttcatgagaacgcagtcctggccttggcccagatagagaactcagccgcagtggaaaaggctattgcccactatgaacagcagatgggccagaatggtgcagccgcccacggtaaacccntccaggagctgcttggaccgtgcacagggcacagtgcagagacgaggccattgaacgtcttctatgaacgaacctctttcaagtgatgtgcgaccaacatgttccagtaggcaaatta

SEQ ID NO: 499552 - DNA, 508 bp, Homo sapiens
ggctgaaaaggggggaaaatccttatggattttagggattggactgtggtcagttgggttgtattgcacacctaaatcctgatcataggcttttcatttatccggagagcctttattttgccagttaacccaaatgtgtttttcagaaaggtagacattttctactactttctttcctttctttcctgcctttttcccgtctgaccccaaacgttattgtccaaacatgactggacggaagcttttgtttcttgaccctgcaatatgacagactgataatattgacagaaggtgcagtttttgggctatagtcgagattttcgctaatcaatcatgttagcagaaaaaaagatgacttgattctgtagggctagagtcttaagacaaagtgcccatagtttagagacagtttccaaaggctttagtaccaccttgataataaaatggtggacccactctcccggaagaaacaagctctgaacagactacgtgctcagcttaaaaagca

SEQ ID NO: 499553 - DNA, 154 bp, Homo sapiens
cacaggttggcccttcacaagttctgatggttatacagtgagtgttctaaatgagacaacaatatgtcagttactaagtagtagacagaccttgcatattgaagtaaaagggtgatgtttacaattgacagtccaggtgtaacagtaggaggga

SEQ ID NO: 499554 - DNA, 262 bp, Homo sapiens
gattctgcctgagaagtcaccatttttctgctggaatactgatattacttactatattccccagaatatctaaagaacttcttaaaaatgaatcggctgggcatggtgactcatgcctgtagtcccagcactgtgggaggctgaggcaggaggatcatctgaggccaagagttcaagatcagcctgggcaacatagtgataccctatctcttaaaaaagaagaagtttttaaatttgaaataataataggtactggatttat

SEQ ID NO: 499555 - DNA, 326 bp, Homo sapiens
taataagttaaagctaatacaaatataaaaaggggaaagtcctctagattcaatgacatccacaaattgtacattatttacaccaaaagcacagggactcgtgtgggtgaacagactgcaaccaaagccgatgctgggtgtcctgaacggtagcaacccccgcgccgggggctcaagctcaactgagggttttgtcattttcaagtctgaaagtggctgatctcctgccttggttgtgacttctattcctggcagagggggtatttctccaatggggaggatggtttgaaaacaagactctgcttgatagaattttgggaacctct

SEQ ID NO: 499556 - DNA, 865 bp, Homo sapiens
ttcctggccggggcacaaggccctttgggcccctcgaccccctcggggcttccacccccccaagagtcccctgggggtcgctcaccccagcggtttgagctcttcttctttcaccgctgaacccttgtgctggagtcgcccgcgcccccattgggagcccggccttttcatagcgtttccggggagagatcgtcaaggccaccccgctgtgttttggcccaccacccctgttggtaattctgtcgcgacgcccgcgcgcttctataacgataatttctcttgccaccggcgtccgcccttcttcccccatggggcgcccaaaaaccccccacgtgaccacgtcctgtataaaacaccccgtaacgtctaaaagaagagtcttcccccctctctataaatgggtctgggtgaatcaaatactccaagtacctacagttcctcacagcctgtcaaatattacgctccagagactcctcctcatacaacgcttttattgtggaaacccgactacatcccactactcttcgtataaataattatacaccctgtcgccctgctgtatccacagtgcatgagtccccaatagatgtgagtcttaccacgctccactatcccctacaattttactctcacttgccgcttcttttctccataataaagcttttcaccactccccctttctttgtcaaaaaaggtaacaaattagtataattcttctagtattcttctttgaatcggaaaatatcctaattattagatacgaatgatcttccttcttaggtattttaatactttatcgtcagactccattcagagatcacatccaaataaaaaaataaaaccccgaaaaacgttccaacaaaac

SEQ ID NO: 499557 - DNA, 911 bp, Homo sapiens
cctccgtagccaccgcggaatgtacaagggagtggtgtgtcgttgacacacggccctcagagatgatcccgcccggctgcgctggtgaaaacatccgctccccgggtgaacacaaataccacgtgaactgggtggccccaccagaaccctccaagggacgggtgtagccaaattttccgggggggaacaacaaacaacggacacgcggttgggcccgctcattctccaccccccggggcaagggcggggataacaccacacgtcgcgagagaaaatggagccgccatccaaacaagggtgacaacggcgaaccgtggcgttcattgccgtgatggaggagaaaaccccggcgtgtcacgactcgtgccagcggggcacgcggaccaaacaaggggcccccggcgtgggagaacagttcagggggaaattgtcacgcccgcggccccaaacaagcgtccttccgggactgctgggcagaatacaaaggacccaagtgggagacatttgtgcgcgcccacccaagagtgaacaagaggaggcgccaccccggaacaaagggggacccgcaagttctcttccttccgccagcctagcagggctgccccttcctgtacaacgcactgcgttgtcagaacccttgcggaggtttcaacacacgctacgtggaagaaaagactctcagtgaaacaaatactgtcatgcgtgtaagacctcgaccaccacgcagttgtctgctgtcctccacaccagcacggtgcttacactcctatacttgatagaatagtaattgctaccatacgggtactactcccgtcgaaaacactggtttctccaggaagaattttccgcaatagaaggcagtactcaccctcagaaaaaagatccggaagaaccagaacaaacatagacaa

SEQ ID NO: 499558 - DNA, 817 bp, Homo sapiens
  misc_feature (1)..(1): n is a, c, g, or t
  misc_feature (122)..(122): n is a, c, g, or t
  misc_feature (127)..(127): n is a, c, g, or t
  misc_feature (186)..(186): n is a, c, g, or t
  misc_feature (195)..(195): n is a, c, g, or t
  misc_feature (200)..(202): n is a, c, g, or t
  misc_feature (207)..(207): n is a, c, g, or t
  misc_feature (217)..(217): n is a, c, g, or t
  misc_feature (219)..(219): n is a, c, g, or t
  misc_feature (228)..(228): n is a, c, g, or t
  misc_feature (238)..(238): n is a, c, g, or t
  misc_feature (240)..(240): n is a, c, g, or t
  misc_feature (248)..(249): n is a, c, g, or t
  misc_feature (252)..(252): n is a, c, g, or t
  misc_feature (263)..(263): n is a, c, g, or t
  misc_feature (265)..(265): n is a, c, g, or t
  misc_feature (269)..(269): n is a, c, g, or t
  misc_feature (271)..(271): n is a, c, g, or t
  misc_feature (275)..(275): n is a, c, g, or t
  misc_feature (277)..(278): n is a, c, g, or t
  misc_feature (281)..(283): n is a, c, g, or t
  misc_feature (301)..(301): n is a, c, g, or t
  misc_feature (350)..(351): n is a, c, g, or t
  misc_feature (383)..(384): n is a, c, g, or t
  misc_feature (404)..(404): n is a, c, g, or t
  misc_feature (406)..(406): n is a, c, g, or t
  misc_feature (408)..(408): n is a, c, g, or t
  misc_feature (492)..(492): n is a, c, g, or t
  misc_feature (496)..(496): n is a, c, g, or t
  misc_feature (498)..(498): n is a, c, g, or t
  misc_feature (581)..(581): n is a, c, g, or t
  misc_feature (601)..(601): n is a, c, g, or t
  misc_feature (603)..(603): n is a, c, g, or t
  misc_feature (632)..(632): n is a, c, g, or t
  misc_feature (661)..(663): n is a, c, g, or t
  misc_feature (665)..(665): n is a, c, g, or t
  misc_feature (668)..(669): n is a, c, g, or t
  misc_feature (675)..(675): n is a, c, g, or t
  misc_feature (722)..(723): n is a, c, g, or t
  misc_feature (748)..(748): n is a, c, g, or t
  misc_feature (792)..(792): n is a, c, g, or t
nttacctatatataaaaaaccataaggtctttccacttcgggcttctgtctgtaaactctcattaaacactttttaaaagcactgtgtagtacttctgacctagagcttttaaaaatatatnttttntctataaactccattatttccaagcttgaactcttctgtgaagttcgtcaagctttttntcccctgcngggannntaagntttgttaatntnttccttttntagagtaatnanaggatatnnttntttttttattngntganantggntnngtnnnatagatggaatccaagtntgtgctcttggctaaatccctctcgtcttaggaaatcctgtgcggaaannccactcctggccctgaagcgggtctagctttnnggtgaggggtaggtgtaaantntntccctccccggagaacgaatggggaactccccggcccaaaccttttagccgcttccttctccacgcagccggcagaggaaagtncctntntgtccccaatctcttaaaccctggggaaggagtggtgcattccagaagagcaaaatagtcttaatgccacaagacaaacttanatacacagacatacacaaantnaaaagttaacgatcgttctcttccaatgngccttaagctcccaggtctccagataagnnngntgnncccggnggcagtttgcgatgcccagaggcaaccagtctgcccaacgcgctcanncccgcggtctctgggcgtctcgcanccgggaagggctggcctcacttcggggacgccgctgctccactnctcccgcgggggcccaaggctcaaa

SEQ ID NO: 499559 - DNA, 449 bp, Homo sapiens
atttttacaaggaactatatataagctagcacataattatccttctgtgcttagatctgtatcttcataataaaaaaattttgcccaaaaaaaaaaaaaaaaaaaaaaaaaaaaaaaaaaaaaaaaaaaaaaaaaaaaaaataaaaaaaacaaaaaaaaaaaaaaaaaaaaaaaaaaattaacaaaaaaaaaaaaatacatacctcaaattaattatcaatttcactatataatcctcaatgtcttaaacgctactcgtcttgtaactctacagccatacccaattattttctactataatacaatatccatatctcatctctctcaccactcctacatcaatattcctagatcatccttttaaacattttttaatccctcttatttattaagaacttattactctataactgtatactcacatattaatctataatttctatacttaa

SEQ ID NO: 499560 - DNA, 396 bp, Homo sapiens
cactgagacacagtcgagctagttcctttccagagtcagactgtctctatttcttccttatgtaatcgctctagctcacgactttcagatactatgttgaataacagtattgaaagtgcgcgtccttctttgtgtaaacatactactatagaggaaccgcttataactataaatactaacatggggagaaacagctctcgttatgaggtctgtcagtactacttgctcgctactgtgtccaaggtatgttccttctattaccaatctgggagagtttgagtcatgaaaggctatcgagtttcatccaatgctttttcaagatcaattgaaatgatcatatggtttgggtctaccattctgttgataggctgtatcacattgatcgacttgtttatt

SEQ ID NO: 499561 - DNA, 180 bp, Homo sapiens
acattcaatagcggtgaagccatcacacccagccagatttagtgtaattcctaagggcccataggatttctggaatcataaagtcaccagctgcatttagaccctaacaggagagtcagcctgtcctttgaagctttgaagctaggcaatgatttctcctctctagctataaaaatccta

SEQ ID NO: 499562 - DNA, 642 bp, Homo sapiens
  misc_feature (635)..(635): n is a, c, g, or t
caaagtcactccaggagcaagggtgtcatttactgaaatgacagactctccatttcacatttttcccccaagtgcagagtgcagggaagcagatgggctaaatttttagagtcagggttattaatgtatactttacatagtaaactttccccttttaagtgtgcaggcctgaggtttgccaaatatgtgtaggcatttaatcaccaccacgatcaagatgtagaatattcccactatcaaaaagtttgctgtgtcccttgatggtcatgccccattccacagccccagccccagcccctggagattgctgtctgctttatgttccagtggttttatcttttccagactgtatggatgtgaatggaatcagatgtgattccaaggtgtttgatcttttccagatgtgaatggaatcagatgtacgaaatcctatggtagggggtcttctgagtctagctccttttgtttagcgtgatgcatttgaaattaatccatgtctcaggcatcaggagttcatttctttttctgctgagtagtatttcattgtatggatgtactgcaatttgcctatccattcacctgttgatgtacatttgagatttttggcaattatgaataaagctgctataaacaanaaaaaaa

SEQ ID NO: 499563 - DNA, 325 bp, Homo sapiens
cccctccccgggtaacatatgagactgtctctgttagaaaaataaaaagtccgggcgtggtagctcacgcctgtaatcccaacactttgggaggcccaggtgggcagatcatttgaggtcaggagttcgagaccagcctggccaacatggtaaaaccctgtctctactaaaattacaaaaattagcccagggtggtggtgcatgtttgtaatcccagctactcaggagactgaggcaggagaatcgcccttgaacccaggaggcagaggttgcagtaagccaagatcacgctactgcattccaacctcagcgacaggggtaccga

SEQ ID NO: 499564 - DNA, 350 bp, Homo sapiens
atccgaggattaaggcacactgcaacctccactctccctgtttcaagcaattctgtgctccagcctctcaagctcacaccatgcctcgctaatttttgtatttttagtagagacagggtttgccattttggccaggctagtcttgaacttctggcctcaagtgatcctcctgcctccaaaagtgctgagattacaggcatgagccaccatgcccgcctccttttttcttacattgctttgaagaaataaaaatctttttcaaattgattactttgattattcaatttgcttcgatgtgacctctgatcataggttgtataacagtggtgtagtctttgcagtggtgcctg

SEQ ID NO: 499565 - DNA, 346 bp, Homo sapiens
  misc_feature (246)..(246): n is a, c, g, or t
  misc_feature (308)..(308): n is a, c, g, or t
tcgctgcaaatcatcattaacagcgtaattatacaagcatatttaatgctgagtttaatttaatatgtaatacatatggtaattgtagggtaatacccacaacaactgtagtttcttactggcccaagagaatgcttatttaagtgttagacttccattctggcaaaatcttgcccaaatctgtgtttgctttctgcttgctacatttgtctcccttacttttcgtgagctaaagacaggcttttnccaccggcatcatcactgctatcatcattaacagcgtaattatacaagcatattataatgcngattgcagtgagtggtcagcagagggatcgtctagagt

SEQ ID NO: 499566 - DNA, 335 bp, Homo sapiens
tttttttttttgagacagatgtcttgttctgtcacccaggctggagtgctgtggccgaatctccgctcactgcaaccaccacctcccaggttcaagcaattctcctgcttcaacctcccaagtagctgggattacaggtgcgtgccaccacacccagctaatttttgtatttagtagagacgtggtttcaccatgttgaccaggctggtctcaaactcctaacctcaagtgatctgcccacctcagcctcccaaagtgctgggattacaggcatgagcactgcacccggcctcaattagttcttttaattcttctattatcacttttagtcgacg

SEQ ID NO: 499567 - DNA, 1378 bp, Homo sapiens
  misc_feature (256)..(256): n is a, c, g, or t
  misc_feature (259)..(259): n is a, c, g, or t
  misc_feature (269)..(269): n is a, c, g, or t
  misc_feature (288)..(288): n is a, c, g, or t
  misc_feature (425)..(425): n is a, c, g, or t
  misc_feature (878)..(878): n is a, c, g, or t
gcagggctttactggagagtgcgccgggcactccagccgatcgtggggatcagggtaggtgagctagtggccttttagcgaggtgcatgcatgcacagtagctagcagtgcggttctgctacgtagggattgaggcgtcatcctaccctcactcttgctgtgcattcactcgatcttacgagtaagtgagattcgcgcatgttatgaacgcagataactaagaacgaagatcagagaggaataatacacatgaaantangcttactgtncccaaaggaaaacgcaagnctcgttgagaggattggatttactagcctctctccataggacacttctggaggaattggctcctatgtcttgtgcacacgcatgatcaagattgaagctggtctcgtcagggtccttgtcgcaatagaggagaacantcgggaattgagcgcagcgtataacagtcctacgaatctatgcgccagcccatggagagtgtatttgatcccaagaattcataagtgatacagtacatgattccttgcgaggaggtctactcctaggagttcactttggactctgtcatggattattaaaggaatatatggcgagtcgcgtgcgtgcagagtgattcggcacagggaatgctagggcagaaatataatcgggtagtacaagggcgccttgctcaatgtagagcgatccttaatgggcataaatggaggagaaacttcaataacaggaaatattgaactcaaaaggaccaatgacaattgtccgcgcctggaaaataaggagaactcacagagagctggcacgaaggtagcatgaagcgatgtaccaggtatatgtggcgagagctatatagaagagaacttgaatggttgacnacctctggataactttctgaagttcacgtggattaatcagggaatctcgattcgtgagagaagaaactggtgaggattctctagtgggaagactccgaacttggacgtgtgctgaaggaactggatcttcctctacggatgcaagcctgttttttgaagtgcttactaattgacggggtgagaatttacggcgcgaagttaactccgagaagatctggtgggcgaagtacttactcgtatattgggcgcccggggagcaaaaattcccctgttgaggaccgggggcggcactggcgtcaaggacaacaacataggtgttaactatcagcggacgttaatagaaatgtctgctgcagcaagtttgatattagataacataacaccacctggcgcggagtgtagtaagagaagaggaggtgtgactaacacacaagagccgcgagcgcacgacagctacgctatatagagtcgcggacaactcacaactactgctccatctg

SEQ ID NO: 499568 - DNA, 358 bp, Homo sapiens
acctgcacgcggccgagggaggcgaggcactttggctgaaaggagaacctgggaggaaaggagagaaaggagagcctgcggatcctggtccccctgtgtgagaccaggccctccgggggccaagcaggagtcccacggacccgaggtgtgagacccggccccccgtggagaccccgggtctcacggaggtgtgacgtcatgacctcacgtgacgggagacctgcggtgtgctgcgctccggaaagcattgggtacaccaatttcacatcgtggagaagaacttcgtcatcaacgtggtctaacaggctgggtgccatcgctaaggaccccaagtccgagacggggccgcgtagcaggt

SEQ ID NO: 499569 - DNA, 453 bp, Homo sapiens
agagatatgtcgccgtcgacgatggagcggtgtgaacctcagattactgcggagggtacattgaaatgaatgacatgttcagcgatatatctgtgaaaatgaccttagtgcacgggagtcttgtttttcgtgtgtagttaaaagttaaggaaccaaggtaaaatagtaaatgttatcattgcagattcggctgccaagcatattgggctttactgaataaatgtgaatgagagaaatcgctgcttatcaaaagaacttccaaaatcactttttaaaaatcatttgcttttactgtttatggtcctttagtgtaggataataatactgccacactgtcaggtatagctagttagaatagcctgggcgacagagcgagactcagtctcaaaaaaaaaagaaataaaaatgtctccttctagtcttcccacattacagcatacgcccaggtatgca

SEQ ID NO: 499570 - DNA, 159 bp, Homo sapiens
ctatatctaattggggccgggcaactgatctgactagtcttctctcaaagacagacatacggatggcaaagaggtttgtggaagaatgttcaacatcactaatcatagggaaaatacaaataaacaccacaatgagatatcatttcatccctgtcatct

SEQ ID NO: 499571 - DNA, 429 bp, Homo sapiens
tactttcacagggacagaaagacaaaccttgcatgttctcacttatttatggaagctaaaaatcaaaacaattgagttcatggagatagagagtagaaggatggttaccagaggttggggggcagggggaagtgggttaatggttaatgggtacaaaaaaatagaaaggatgaataagaactagtatgtgatagcacaacagggtgattatagtcaatattaatttaattgcacatttaaaaataaaggagtataaccagatcgtttgtaacataaagagtacatgcttgaggtgatgaatataccgtttaccccaatgtgattattacccattgcatgtgtgaatcaaaatatctcatgtacctcataaatatatacacctctgtacccataaaaagacgtcaacccctatggaaaagtagggtaccg

SEQ ID NO: 499572 - DNA, 960 bp, Homo sapiens
  misc_feature (25)..(25): n is a, c, g, or t
ttcgcgatcgtggggcagagtctgntggtaacgcgcagagggcttgtgaggcccatatctgtgctggattccgtacctcccctgggttcgccgatttcttggccttgccgcggctacaacactggcccctataacactttgtttggcgcccccctcaaattgtgcaacccgacacgtgtgtgccccctgcatttaggtttttctcgcctacctggtgttcacccctcgcatcaccagcacacaatttggggggggccagccgcaggtcactctcccccgtgtggggcctactatcctccgccgtgccccacacctggcgaccaccctgcgtgttttccaccactcccccattattccctggcgttgtggtggcggtaaatctcgcgtggtataaccccccccctttcggcagtgtggagctaacccaaccgggggggttcctcaccagtggcccccacttaaaacacctctctgtgtaagatgcccgcgcgtctccaaatagatttttcgtccgggggcgcccctggttgttctcggcacccgttccgaatacagaagggtcttgtgcccgggccccttggttgggtgcagcccccgccgaacaatcccccccgacactggtggggtcaggagccaggacacgcgcaaacaccccccccgccggggagatccaaaccgccccgcatcgccgccacacgctgaggtaaacccccccctctttccttcaaggagaaaaccacgcagaataacaacgcgcagagcgggcgggcaaagacgccggctaaatcccaccacaccccgtaggtaggacgagcagcacacaggagaataccaccctagaacacgggagggcgggcggaagctccccgaggagcaggaagaatgccgccccgccgacccccccccccgggggcagggccggcagccctttcccaacaaaaaaacaacccaacaaaaaca

SEQ ID NO: 499573 - DNA, 970 bp, Homo sapiens
aggcatcataagaagtttattgggggagtgtattggagaacatgatgtacagtggtacgtgtctgatgatgcttgcaaagagaataatcaggatgagatgtagttgatatggccttatataattgtgagcagtggggttaggtaaggagaacattgcatgatgtcgtaattgtgcgtggatatggtggatagatgttctgggaaggatgaacttatccctgtggagtccatatgtaagttggtgtcctgatattgattagaagtatgaagcttgggtggagtgaggtaaagagattagcattactaagagaagggatcttaaataaggtaagtgattggatatatctcgattgatttatggaggagtcttacccatagttactgcttgtcgcgtgggtaatctgcggcgacctggtgatgggagatgtaatatgagagagcaaagattattttcatttatcccagatgacctatggacgtgccagaggttagcatgaatagtttgacacaatgtgatatttaattctagtttctctcaatgaataatgtattttgtaggaaatgtaagatttcattctgaaaacataattattggtatggacaaaattggagatacattttgttgaggctgcagatatccaactttattcagtggttcagattagattaggtggtactaagaaataagcaggttttcactaattaagtactggagaagtctgtaagaaaaatccgaatgaaggtcgggaaagggatgttacggtaggaatacccctggacggggtggggtaggtatacgccgcctttaataaatttgggcatgaacacagggtctttggagtggtgacgactcgacagcgtacgagtgtattaaaaaaaataacggggggaaagtatgggaaataacagaagttgtggaagagcatgggacggcgaaagttaagtcgaggaggtgcgcgataggtccacg

SEQ ID NO: 499574 - DNA, 580 bp, Homo sapiens
ttggcagatctgatcatgctcatcttctcatattattgcaccgataagtaaagcttgaagtgcctaatctatctctatcatttctgctgaattcagtcatggagaacaggtacacagctgatcagtcatttgtctattgacttcaacgcatgcataaaccaaaatcctcacaaatcttcatgccgttttaatcttccttactgaatttttaaggcataagtcacatcctacatagacctgtattctcatatgcaatgtaaaagggctgttctgtgaactagcaacattctagtgttctgcgtttttccgcacatactcctatagtttctgtggtgtgactggtaatatttacaccagtcacagaatgagttcagtctgtatcttcaccttctttctttacacaggtacaattggctcatgcctatatcccactggttgagaatgcaggtcaccttctggactctgatcatcgactgattacttgcctgcaaactctcatacattaaatgatcaagacaagcagagtcatgccacttgacttttctaccaagcgatgatttaatgacatgtctatgcaagg

SEQ ID NO: 499575 - DNA, 311 bp, Homo sapiens
  misc_feature (75)..(75): n is a, c, g, or t
ttgtgttttgaggggtttttccttcttatgggggggcttctctgggcctcccccaaaaaaatgcccgagggtttngggggccctggcccccccctttaaccgggccttggggggggcccccctttaaaccccagtggccaagtttccagtggccccggccccggccccctttttgggggccccggccccccccccttattggggggccgggcccccctcccttttcccccccggggccccggggccttttttttccaccttttttgggtttggggtttgggggtggggcccaataaatttttttcccccca

SEQ ID NO: 499576 - DNA, 590 bp, Homo sapiens
cgctctacgaggatcccgtcccacatagtgttgtaggtgtatatggtattgagaattctgtgacagatatctaatgctgggcaccagctgcagccctacatacagtttgaaaaaagaataccatgctgttacattagtgagataagtagacacgcaatacacaaaaaaccccgcggcacttctggtgaagaacaaaaaagatacacaagagttaagcgtaaagatcacaggcaatagcattcaaacagtggatgtgggtagagaaaggagtacccggcatgagtacctgctatagtttgactgaatcgctgatgtttaatctggcttgtcatgggccgttcacgacacgcaagcgctgtgtgaggtatgggtagtcagctggcataattcataaaccctacactgccatcaagccaatgctactgggtctcgagttacaggaagaaagtgcattagaatgcgaggcagtaaagcaaaaaactagaaacatcctggacaaagaaatactagcagttgagttaagacaaagtagtccaacatgggcctccgaaatattcaagttagaaagcatatgtctctgccaatgtacg

SEQ ID NO: 499577 - DNA, 227 bp, Homo sapiens
  misc_feature (33)..(33): n is a, c, g, or t
  misc_feature (120)..(120): n is a, c, g, or t
tctagagcatcctatataggagagagaactgangcagaggtcagtaaactgcctgggccacagagcagcagatgaagggctagacctggatccagaagctagggctctcggtccagcatncatccactggtggacatcaccattggggttattttttacccagcgaaggttacgtagaaggacgaaaacgcactcatgccagcaacgtgaaactcaacagtttcaaa

SEQ ID NO: 499578 - DNA, 276 bp, Homo sapiens
tagatgggcgaggtgaaatccttgccttcgttggccatcaggtcggtgatggactcggtcttgccgtagcgaaagtgcgtaccgatcaagtcggaatcgttgacccagccgtcatagatgttcttgtcggactgcatctgggtttgcagcttctccaccacgtcgccttcctgcagcaggtcgtgggtcagcttgatgccggtgatttcactgaaggccttggccagcaccttggattcgtactcgtggtgatctgagtatcgacggtaccactca

SEQ ID NO: 499579 - DNA, 865 bp, Homo sapiens
gagttctccctgaattgtgaattgcctgctcctctggactcctggatcctgtctctgttctccatgcatggtgtgtctgaagctccctggaggttcctacatggaaaaagttgacaggtgacacgttgagtggtgcatgagcatccccacatgggtctttgggtcgtggtggacacctcgtaccactgtttcttgggaggtagagataagtatgagtgtcatttcttccacgggacggagcgggtgcggttcctgctcagagactgtctataaccatgcaggaggacttgcgctattcgagctaagtcgacgttggggcgagtaccctggagctgagtagaactgcgagtctcgtgagtgactgcgacactcgatcagctagatgttatcttggaatcccagccttagaaaggacttcctgagtacatcagaggtcgctgccagtgagtgtgactcagccctacctgtcaggaacttcaatttaccaggggtaagtgatgagagcttaaacaagttgcctgcgtgccgtagtgttgactcactttctggttgactgttgtaatactcttggtaaagggactcactagtagtcactgacttgacgacctatcgtaacttcctggttctgctcttgtgacatagtggttctcttcgaggcggcattggaatcatcaggtggttcctggattacagtcaccgaaggagaaccggcttggggtgagttgtcctacagagccctgattcagaatgggagacttggcgccttccagagccttggtggatgctaggaacacgcagttcctcaaagtgccgaaggttacttcgctgccgagtgggagggacccatagtcgtatagtggcttcc

SEQ ID NO: 499580 - DNA, 289 bp, Homo sapiens
aaaacttcagtcagtttctcaacccattccttcttctcctgcctcaatgagtaactcaggaaactcctcaaacagtgccctccactctatcaaatcttcatcctcgccaatggttccagtcacatattgatcgatgggattggagatttctgctctcttcactcctgttttaaacttcatcgaaagcactcgtggatggtgtctaagcccaccaatagtttgccttatctcctgcaaggcgagtgcagtgtatacgagactgctgtcctactgatctataggagtggtg

SEQ ID NO: 499581 - DNA, 1863 bp, Homo sapiens
  misc_feature (1205)..(1205): n is a, c, g, or t
tggaccgggaccctttgaattctaaaaaaggtttataatcaatggaaggaggtaacatgtagccttggctgggcgacaaagtaggcaaaaatgttctctggcccctatcctaagtgtgagctggccccggttgtaagggctctatcccaggcccggccccctctggggcagctctgggtaaccgctgggcgctgaggctgtaggaatcctctgggctgggataccctatacgaggagtatgagctggagatgatataccgccacagggacacatatgagctcacccccacggatggtgaccagggtctggctctatagggtgatatactacacctaacggagatatatcacagggacatcagtctaacagaaactgtgagtggacatagagaacaaacgagagcacccgcgaaagagggcagcacactagggaggggagacttcccaagaacagcccaggaataaaacgcgctatcgtgaggcgccacgggggcagaacacaactatggggcgcacctgacgagacacgactcatagccttgaggcagaaacaacaccgcagcgacaaaaagcgggagggcgcgaccaacaggtaacaacaacaagcgacattctacacagagacacgagacgggcgtacaacccaccgacgaaggggaaaaatcatcttggtggaaaaacaaacaagcgaactacgaagggacaaagccacaaacaatacaagagccgcaccgcggacaccgccggagccacagacacacgatgagacggaccaccacaagcgacaatcgacaggaaaaaaacgaagcagaacacaccacagaataacgcaacacactcgacgagcggagcacacaccacaacaggcagcaaacaagcagtaagctaacagctagatcacacgaagcgcgccgggcggacgaaggaggaccgtcccacacaaggccgaacatcacgcagatagagccaccaacccgcacacaaccgccgtcatatagtcagatacaattcaagacacgagagagaaagaccaacaaacccccgattaatgaggacccgaccaaacacagccgccaagagattgtaagaaacgcgccccaaaacgaacgacaacgacagacgggcacaccatcacggagcgcaccaagaacacacacagacaaacaacaacgtgcgcgacacaaaacaagcccccggatggtagnccaggcaaccaccgacgagcgcagacacaaagtcagatatagagcaaccaagccccgtgccaacgaggggggggacaaacaccaccacacatcacaacaagcagcaacacatgatgaacaacacaacaggcccacgaagacagacgagataacagcgatatcgattaccgacgacccagagagggggacgactataaacaggcaccccgctgatagtaaaagcgcccagacgacgcaggaacacacaaacaaaaacgagagcaaacttaacaagaccgacgtgaagaccacaccaatcacaaaacacatttagacgggcacacgacgagggaagaagcacgccccccgaacgcagcggacctatcagaggaaaaacacccgcccgcggagaacaaaccaccgagagaagacagccgaagtcacataccacccactaacaggaacaacgcacagggagaccaccaaagcagcgacccaaccacacccgcgcggcgaacaatatatatggatgcaggacacaacacaacgagggtgggggagaaacaagcgaacatatacacggacggggactgcaagcaagggcggagcgagccgaaaaaccacagtcaacgcagagccgcgtcggacgacaaagcgacgggagcgtgtggcaccccaa

SEQ ID NO: 499582 - DNA, 128 bp, Homo sapiens
tactacacaaacagaccccgtagtatacaagactcggtcaccaatcatgggcatctctgtacctgtgccctctactactatgatgaccttcagcacgccttcgtacctgttagtaggaggtagcacta

SEQ ID NO: 499583 - DNA, 367 bp, Homo sapiens
  misc_feature (367)..(367): n is a, c, g, or t
gcaggattcggcacgaggttccctttactatatcctacatttttgtgacactaagttttttcccattccaggacaggtcaagccctttaaaaatttcaacagctttattgagatataattgagataatttaaaaaatactgcgcatgtgtcatgctggagccctattgatttcaacaaggatggcgccttgtgcaagaagagacccagagcccgtggatgggacatatgggttatttatgactttacagatgtggtccactggcagtgggctggacaggacacgctactatttgtgaagagagtgtaggttatataacaattctacttatcactcttcacttagcaacctctcatttaccctgtgtn

SEQ ID NO: 499584 - DNA, 178 bp, Homo sapiens
ctagccactgacccaggtcccagatgtgaagataccatgttccgaaacaggggggaaatcactctacaaactaactatatactacgtgaggagaatgcatactttataatataaaactgtctacacatagtagttagctgtaaaaagccatacgatcttctcttggcttggaaaaaat

SEQ ID NO: 499585 - DNA, 1243 bp, Homo sapiens
  misc_feature (916)..(916): n is a, c, g, or t
agcgtgagggatggacatgatgctgttggtgacacggggtgcttgttgcatcgaaccagtggtctggcggcggtgactccctcagcctgtgctggctgctatacctactgcctcccggctggacatatgtgtaggacttccctcatgggctgcgtcgctgagaaaacactgatgagtcagaacgacgagggacactaggcggtagcatctaaggtgtcagtttcggcagaatggatgcttccagacacgggtgcctggcatgaaatccaggctcaatgtattactattattgctgggatggttgactcatgtgggtacaagtagcgactccatcgaaagtattacaaatataatacccacttgacgtctcacgtgcgacgtacatgcactcctaaactacacgacatggtagactcgtgacacgaattgatggccgcaatacaacggtggtccctcgttcacgacgtcaaacaataacacccatgaacgacatagcaagaggatgacactagctacaacactgcatgagcaaaagggtaacccatacacctagaaagaagtagttcatgacaaccattcttccctaagacgtgcaactatttggaacgcgagtcaaccttgaaaaagcggtaacacccaaaccggattgccacttccatattaagcgtatgattacgcggggacacacaacattgcgcgccaaagagcccccatggcagggacgcttaccacacattttctgtggcggaccgaagcaacaaaatacgtcaccaacccgaattccaaaggacgacacaagacgcacacgcgtttgcaaaacaaccttgcgcaccgacacctctactactcaggcgcaggacacaatatcagaatagagggaaacgacaaaacccaaacgaggggaacaccaaggggnccgatgcgagcggggaaacaatacaactcgcaacagtaggccaaaggatgcggcggagcaaaaaacaagcgcgttggacttgactgcaacaaacccccaagtgacgtgtattgccacgaggaagacacagctacacaacacaccattccgaacaatggtgccacacaccgagaaggccctcacgcgttaaccattacatgagccaggtgcaacaagtacacacacacttcattgcaggggcaacaccgctcggagaccaccgcacacgcgaggaacgggaccacgcatgcaggcgcgagcaacaaaacacgccaacagggaacccag

SEQ ID NO: 499586 - DNA, 1595 bp, Homo sapiens
aactttaactgacattctattatagagaagggaagacaatgctgaagaacgtcaaactgtagcatatgcaacatgctgcacgcagggctggcagcacacgcacatttgcaagcacagtggcaataccactcatgcaactcatgctaaatggtaaatatagcatttcatggtttgtcttagtcatcagctggtcacacatagtgtagtcatctatgcctgagacctctaaatatctactctggtacagccatcaactccaaatagtgtattgtagacaacacctgtataaaatacataataaggaaactacgtagatactaccatagacctagtgtctattataaaaacatgtcattcagggtacgacataagtattggacaacataatagttaaaaagacacaagacacctcattacccgcagaacttacactcttttctactagcacacaaacaggacacgatcacggtaaacgaaaaaactgactaaggttactaataatactacagacccctcttgatgaacctctaagggacttggtcatcccaatatatgggcaagcacaactaagagggcacaatataagactggttaaaacatagttggggtacttacctatactggctatctgaaaatatggtaacacaatcttaccacttggcatgggtacataaacaggaataaccaaaggctaatacaacatttcatcttggatacccttgtataccaacgcattacatatgggtaagtatatacaaagtcgttgggacatgaacgcataacgcgagaggagaccccaagaggtagatgactgtataataccattctcgccaaaaaacatccaatgacgaacacctataacgtctggcagataaaagaatgccaacatatgaattagcaccgatgggcacacaacgattggaaccaaagtgacaaggtacaaaacaaaataaaagaatacaagaggaaaaaggaggcgaggacaacaaccccagatccacccgcggaaatagacaaacaacgagacgggggaaaacaaaaataaacacacatatgaaaacaaatgaaccactgaaacacacacataaccataacaccagaaccacaccacgagaaaagaacaaagaagcaccacaaagaacccagaatacacgatcaaaggagcacacaagaagaaggggacaaactataagaagaccaacacaacagaccaccaacaggactgaacccaaaccactaaacacccagacgcccaccgacaagagaccatacacacacgagcgacatacccaacgacacaccaaaacgcgagaggccaaaagatggaggacgacaacaacacacagagagctagaccacaccgatgcaacctcagaaacacaacaagaggccgaacgaaccaacacaacgcgaagaaagaaccaaacgacaaagcaaagagacgacagcacacagactacaaacagaacacgaacaacccgacggacaagcaccccaacacgcgcgacgcacgcaccgaaacacaccaccagaaacaggccgacaccacagccctaccacaacacatacgcaaccaagaagcgctagatgaagga

SEQ ID NO: 499587 - DNA, 298 bp, Homo sapiens
aaataaaccccccctctgtcccccagggtggagtccagtggccgtcttttaaaatccctgtgagccctgacttagcccatactggcccgttgctcctaggaaaaatccagggttgcgttcctgtgagctttggtcgtgatattttcatcagctgaccaatatgtaatcttgttttatgtgtatttctgtttaaagattcatatatatatgggtatatatatatatggttgagttgttcccgttgaactcccagcccccaggactagaacccatgcctaaataaagtttttttaccata

SEQ ID NO: 499588 - DNA, 289 bp, Homo sapiens
tctcggcacactgcgacctctgcctcctgggttcaagcaattctcctgcctcagcttcccgagtagctgggattacaggtgcatgccaccatgcctgactaatttttttgtatttttagtggggacagggattcactgtgttagccaggatggtcttgatctcctgacctcaagtgaaccaccctcctcagccccccaaaatgctgggattacagacgtgagccaccgtgcccaaccctctttaacagcattttaacatggcaactgggacatacaaaattacatgtgc

SEQ ID NO: 499589 - DNA, 109 bp, Homo sapiens
ccccgacgctgttcttcagactgttttggttctcctgggtcccgtaattccaagctgacccttctacagaagagtgcttgactgccatgtggtttccccagtcattagt

SEQ ID NO: 499590 - DNA, 308 bp, Homo sapiens
  misc_feature (230)..(230): n is a, c, g, or t
attctatggttaaatcaattcctgtgggatttaaaacaaagtcttaatcagtccatggctgtgtacaagttgaatgacaatccaaaatctgacaagcatgttgatgtccgagttgatggcttaatgctaaagtgtgtcatcccctctgaagtgaactctgaatgtcctccatatccgccgcgtgctatctctatccagagtcctgaaatgatcgccacattatacggggncgctgtccaagctgtcgaccttctgaactagattcgttggtctcacgactttcaatattgtgatttccgtagtacaac

SEQ ID NO: 499591 - DNA, 142 bp, Homo sapiens
tcatcgaaacctacagtatcagcacatatggagacttgagtgcgggaggattgcttgagtccaggagtttgagaccagcctggcaacacaccaagactccatctttacaaaatattttaaaatcagctgggtgtggtggtag

SEQ ID NO: 499592 - DNA, 312 bp, Homo sapiens
cggctcgaccctttcaattttccataccggctttcataatgggtactccttcgtcaaaggctgccgtatccgggagaaacataggtctggtagaactgcatattgcccatgcgggaactgggcagcggcgtctcgtccagctctgggatggtcttaatctcatttgcaagatattgctgaagctcgtcctgaacgtcctttaagcggccgacgaccgaaccgtagcgcagggcgagcgtttcccagccgttacgcttaaaggtctggttccacaggcggcgatgaacgcgcatcagcgcctcggtctcttcg

SEQ ID NO: 499593 - DNA, 429 bp, Homo sapiens
tgggggatactgcgagtatggtggcgtcaaaggtgaagcaggacatgcctccggcggggggctatgggcccatcgactacacaacgtgacgttgccgcgcaggaggactgccgcgctacaggatgctggccatagggattggaaccctggtctacgggcactggagcataatgaagtggaaccgggagcgcaggcgcctacaaagcgaggactttgaggctcgcatagggctgttgccagtgtgacagtctgaaaccggccgtaggaccttgcaaatgcttcgggagagcctggaggaggcggccatcatcatgaaggacgtgcccgactggaaggcgcagtcagcgcaccagacatcccacgtgacggccactcctcgatctctagctcctcacgacggcgcgcattatgcgggtttgtactctatac

SEQ ID NO: 499594 - DNA, 552 bp, Homo sapiens
  misc_feature (38)..(38): n is a, c, g, or t
agtgattcaaatatcatcaactggtgggtgcataatanaatgtggtatatgactccatataatggaatatctttcagcagtaaaagcggtaagtactgatacatgatgaatcttgaaaacattatgctgtcagagagcccagtcacaaaagatcatgcattgtatgattccatctatatgaaatgtccagaataggcaaatttgtatagacagaaagtagatgaatggctaccggattctcaggggaatgtgaggaatgggattactgctgaagaatatggggtttcttctggaggatgataaaaatgttccaaaattgatatggtaatggttgcacaactctgtgaaaataccaaaaacctctgattgtatgcatttaatgagtgagttatatgtgtgtgagttatatgtcaataaaactgttacaaaagaaaagaaataagaaggcttagagtcaacctctgtagaacactagtttacaacgtgctggtgtctccatctcatgggcttttatagcactcctgtagagattgctattgctagatcaagttg

SEQ ID NO: 499595 - DNA, 103 bp, Homo sapiens
ttagtgagaccatcctctggccgggctcgaggccctgacagcaacgtgctgctcctgaggctgccggaaaaagtgcccagtgccccacctcaggaagtgactc

SEQ ID NO: 499596 - DNA, 134 bp, Homo sapiens
ggttttattttctgatttgtaaagtaatccatgttgaaagtataaagaagcagaaagaaattgcctatcctcctgctacctgggccatcacatttagtattacggtattgggagtattcttagacattctcatt

SEQ ID NO: 499597 - DNA, 592 bp, Homo sapiens
  misc_feature (288)..(288): n is a, c, g, or t
ggtgggcagaggccccgtttcttttatgaggtcttttgtttggggcaccctcaagggactgccaacccacctaattgggatggtttccttggggtggtgcttccctcaagccgaattttgtgggcatcatcaatgccaaacaatgagccccatccttcttcctcccccttcctgccaaggcaggggtataccagcccagaagcccagtgactgccctttccccgcatatgcttttgatggggtcatctgctccctcctgtggcctcatccaaactgtattttcctttnctgtttatattttccccccgtaatggttggggccaggcccatcccttttcccctttctataatggttggaactaaacgtccccaaggtggcttttccttggcttaaaaatggaagggggggtgggatttgctcctgggttccctaggccctagtgagggcaaaaaaaaaaccctcctttcccttttttccccgtgaggccaagatcccctcaaaaggcaggagtgttgccctttcccctgggggccgggccttttttctgtgttttttaacccccccttttagggaattaacctggcccttgga

SEQ ID NO: 499598 - DNA, 134 bp, Homo sapiens
tggatttttggggggggggggccccgtgtttattctggaatattaagttttaggccctccggggctggggaccccccaaaggtgtttaaagtttcccacccgaccgggcctgttttttatgctttggttccttc

SEQ ID NO: 499599 - DNA, 377 bp, Homo sapiens
tcatcactccttattgacgattttcacatcgactatatcaggatatgggctgcaattttcctttttagtgtgtctctgccaggtttggtagcaggatgatgttggcctcataatgcgagttagagaggagtcccatctttttcgactgtttggaattgtttcagaaggaatgctaccagctcctcttgtaccactggtagaattcagctgtgaatctgtctggtcctgggctttatttgcattgggaagctattcaattactccttcaatctcagcaattgttatcagcctcattcagggatttgactttttcctggtttcagtctaaggagggatgcgcaggggcatcctctcagcacctcgcactgcaggcatgc

SEQ ID NO: 499600 - DNA, 489 bp, Homo sapiens
cggagaaaaacaatctcaaagtgaaagaaccagttctgatgcctgccaagtctttgagaatcactaagagaaacacaccttgtggtgaaggttctcagacacaggatcacttccagacgagaatccataagcagctcgtggacctgcctggtccatcctggattgtgaggctgattgctctgttggaattgagctgcgagccgcggttgacatcaccattgcagatgcttaagccaagtgttttaataaagtgattatcacttgtcagaaccaggcacagtggctcacacctgtaatcccagcactttgggggctgacgtgggaggatcacttgagcccaggaggtcgaggctgcagtgaactatgattgtgccactgcgctctaccctgggcaacaaagcaagaccctttctcaaagacaaagaacagtgaattgtccaattaaaaaatgggcagggggctgggtgtggtcgctcacgcctgtagtcc

SEQ ID NO: 499601 - DNA, 859 bp, Homo sapiens
gccacagtgagccaatattgcaccactgcactccagcctggacaacagaataataccctgtctcaaaaaaaaaaaaaaaaaaaagaaaaaaaagaaaaaaaaaaaatttggcccttgattcaagaattttacccttttaccctgggttaaaatggttgtggaagtgacttggtccaaattgctgcacaaagcgtgtgtttgtgctggaagagcgattttgactagggcagtgatttgacattctctgtcccagatttttggcttacctttcccgtgctgggccccttcccttataggagcatttatttgcgtcacttcccctactttacaataggttggcgctataggacttgcttttgggccagtggaatatgggtaggaaggcaaaatatcgcgccgggcgcaaattggcttcacacctgtattcccagcacttggggcaggatgagcggcgggtgggatcagctgaggtcaggagttcgagaccagtctgggccaccgtggtgaaaccctgtctctcactaaggtccaaatttacgccaggcttggttgcccggcgcctgtaaatcccacgctgcttgagcacggctgaggcaggagaatcctttgaaacccccgggaaagagacgcgaggtttgcaatttgaacgcaccagaatttatggtccatttgcacctcccaagctttgtaccaaaaatgtgaaaatttccccggtttccaaaaaaaaaataaacataaaaacactccgagaggacctctaattcgcggtggcggaaacaaaccgtatgacaatggcccgtgcactacgttttcctaaccatttttttacaggggaaaacgggcgcccataaggcctaaa

SEQ ID NO: 499602 - DNA, 279 bp, Homo sapiens
tcttccttaggggtagaaggatgtaatggaactttgttgtcttccaaaccaatgcaaatgcagggcttctcagctccctcccctgacagtaggctcaggaaaccaatagatgactgtttccagctcccaagcagtattcccgctgcatcagacgcaaggtgtttggctgtgactttagtctgaacttcgtgtagccttggatgatgtttgtccatctgcctccgtgaaggaaggatattattattgccttaatgtaaaatgaaaataaatcatgttaaa

SEQ ID NO: 499603 - DNA, 176 bp, Homo sapiens
cattctcagacagctggatactcgctataggtggccatgcgcagcacctgccacatgagccagggctggtacaacctctacgagacctactgggagcgtgtacctcatgtccaagctgcgcaagcctgatggagctggtatagtacatgctgctaggacacagctgcgcttcctgg

SEQ ID NO: 499604 - DNA, 222 bp, Homo sapiens
tttatcagatccataaacaaaaatttcttaaaaagcagtcataatataaaatagcagtctcccagttaactatcttcagggttttatacttcaggaacgttgacatcaattcagatttgcctacattcttgagaagccacggatcaaccacacaagtccacgagtcagacggacaaggcctcgagtacccctgaagcactcaggtcattgtgcgtttggtgc

SEQ ID NO: 499605 - DNA, 890 bp, Homo sapiens
ggtacaagatcgcggtgctggtgctgctgaacgagatgagcctgcacaggcgaggtgctgccgtcatgcctcatggatgctggctggacggctcaaccatgctgctccatgcccctgctgcagtggcccagatattacacttgtcaaaactttacaatgttaactttgaagagtcattgatccacagcgtgtgccaacattcatgtgcaggcatccagcaatcgacaacttgccattggcattgacagtgctgcagtttgcacacgtgcatcattggcacacccacggttttttttgcatcgcacctttccagcatttcctttcttcttgtgcacacattgaacacgaacgacgtgttcaacaagaaccacacatgtcggtacggtcagtgatctatgatatcatcgtgcgtggacgaccaaattgcaatccgtctcggggccgttacaatgagtaaccgcgtctttcatatatcaaggcacgataagattgattatacaatagcggttggtaaccacgttagggcgcagcatactctccagagcatataggtaaacattttcgcagacggccacattggcggtttgcaaggcacacacagcatggcacgcaaggttggggcagggccatatgccgttggcaattccattgtgtcaaccccttggcacccccagagtcagccaagccagtcgccacggagtgacttggccagacaaagtcacaacaacgcacttggacgacgacgagacaatgcgagagccaacacgctcttggccatccggctcgatcaattcgtctaacccatagcaaggaggcagaggccaagcgggtacaatccgtcgtggaccacagaatagcgtctgccacgttcagtcggagacgcgacgcaa

SEQ ID NO: 499606 - DNA, 685 bp, Homo sapiens
ttgaagccacagccttaccggccggcaaggactttctctacaaattactatgccggtctaaggaaaacgttcgaactcattccagacccccccctgttcggagacattttccgccgatttaaggacgttgaagttgccaggacagtcatggttcttgctgtagttttgtttgaaaccgtcaacacttgggtcaggttatcttctaccggacaccaaggcgtatggagttcgattggaaagaatcttcgcctcagtttaacctttgcccctgaagcacagttggaggaagaaccagaagaagagccttgaagacacctcagaagacgcagaagactcagagcaggatgagggagaagagatggatgcagggacagaagaagaagaggaggaaacagaaaaggaatctacagagaaggatgaattgtaaattatactctcgctatgaatcccgtgtggagagggaatgtgaagttttgaagtcatttcttttgagagacttgttttggatgcttccccaagcctccttctcccctgcactgtaaaatgttgggattatgggtcacaggaagaagtggtttttttagttgaattttttttaacattcctcctgaatgtaaatttgtactatttaactgactattggtgtaaaatcttgtcatgtgtataaaaataaaaaaagatccca

SEQ ID NO: 499607 - DNA, 229 bp, Homo sapiens
ccctgaacattttcgtcctgcattcgtgtcctgcattcgtgtcctgcattcgtgtcctgcattcgtgtcctgcactcgtgtcctgcattcgtgtcctgaactttcgtgtgcggggggattgtgtgtgttggagattgtgtgtgtgttggggactgtgtgtgtgttggggactgtgtgtgttggggtgtggtgtgttggaaatcatgtgtgttggggacacgaatgttca

SEQ ID NO: 499608 - DNA, 125 bp, Homo sapiens
cgggctaacgccgatttttcgtatgccccattcctgtctaccagtgtcaggagtgcgataaatgccgatatatcgctggtatcgaactccgatccatcgcgtacggctgatgtggtaccgtagct

SEQ ID NO: 499609 - DNA, 123 bp, Homo sapiens
gggtattgagacggaactatcgcttcttctacgcgtttatactctccctctcgataattgacggccttcatcttcgcatgtgtggtcacccacctgacgttgcgcgctcagagtaagcaactt

SEQ ID NO: 499610 - DNA, 794 bp, Homo sapiens
ctcccggctgtgccccgcactctccgctgcccacccgctcgcccgctcctccttctcctcccgagatgccactaggtagaccgaagaccgtgagactgacgtcgaagccacagccgagggcactatggcttctggagttacagtgaatgatgaagtcctcaaagtttctaatgatactgaaagtacaggcaatcttgctacacaagaggagatcacacagagagacagaaagcagtcctcttctgtttaagcgatgacaaccgacaaatacttgtagaggaagcaaagcagatcttggtgggtgacattggtgatactgtagaggacccctacacatctttagtgacagttgctacctctgaatgattgccgatatgcttagtacgatgccacatacgaaacaaaagagtctaagaaagaagacctagtatatatatactgggctcctgaaagtgcaactttaaaaagcaagatgatttatgctagctactacagatgccattaacaagaaatttacaggtattaaacatgagtggcacgtaacatggcttggactgatatcacaggaccgtaacgacacttggaagcagaacacttgcgcaggcaaaatgtaaagtaagatctcacatatgaacggcaaaaccaaatataaaatagaccagacaaaaatgacaatcctggatacattaaaagagactaccaattacctccaagctcaagaacaataaggaaaatagtatatacggctaaaagggacaaaaaaggaagaaatacacaccaacaataaaccacag

SEQ ID NO: 499611 - DNA, 211 bp, Homo sapiens
  misc_feature (92)..(92): n is a, c, g, or t
ggtattacagatcttatgagagtggaggtgagaagtggagtggttaggagcttgaagtgacgggtccactgaagttgtgcgcgtgcaggtcngtcagtgcggacagggcgttgggcatgtcgtccacgtgcgccaggggtaggtcagcgcgtcggccacctctcttgcctgtgtccctttaaccttgggcatgagcctgtggctcaaggtc

SEQ ID NO: 499612 - DNA, 173 bp, Homo sapiens
gccggtacctgataagaacaaacaccagaaggacatgaacgagaagtgggtaactcgatggcacacttctcgttcatgtccttctggtgtttgttctgtatcagacactccatcaggtccctgtgagcccataattcagaacttctgccacgatgtggcagataaccagatag

SEQ ID NO: 499613 - DNA, 924 bp, Homo sapiens
  misc_feature (295)..(295): n is a, c, g, or t
  misc_feature (320)..(320): n is a, c, g, or t
  misc_feature (513)..(513): n is a, c, g, or t
  misc_feature (924)..(924): n is a, c, g, or t
taccaagtcttacagtgattatttaacgtgtttccatgtatctcactttggtgctgtatttaaaaaaacccttccatttgtgaaaactctacgtcttgtacagaaagccacatgtgttcttttaagtgtcttcgagaacaaaaaagcctttacatttaattttacagtgttgtgccacctcgtagagcggtgccaactttaaccagggggaggcggccttgagaaacaacgaaatgtggggaggcggcgcgctattttacatctaatttttataacgcaaaaagtgtgttcgccnttgtgcgtcgtgtgtgtcgcaaaancatgttgttacgacattagtggctctcttataaattttgagctaaacacaatattctttcttctaacacaggggtagagaagtcgcttgtggtatactggggtaactccaataaactctccgtgaaaatctcctgggtaactctcttttctcccatatacttattcagacacagtgtgtgtgttttacccaanctttattttgtgggttgtgaacgaggtggtgaacttcgtttttattccccttttcccacaacctctctctctgtgtgcgcacaaaaaacagcagacacaggggcggttcaccgtgccgataagtgtgaacaacgtgtgagcgccacagagccatctctataactttaattttcttaaaatatagttgcgcccctttgtggtgaaagcgcgtggtgttgtcaccccgttttaaaaatacttctgcggggacaattcacagtgttgggcacccccaatgtcggcggtctcttaaacttcgcattggctttaaacagttgccgcgactcacaacaacggtggggcgcgcacaagtgcggtggcgtacatctaaagcaggcgtgctctgaacgccgttcttcacaaagccgccan

SEQ ID NO: 499614 - DNA, 443 bp, Homo sapiens
ataattagcagtaacagcatagggaagggggcatccattggcctggggaagtcaagaatggccaggcaagggagggaacattagatttaaaacttgtgagaccaatggaattaggccaattggaaggacagaaagaattcatttcaggcaaaggaaacagtatgtatggtgttggcaatactatctgtgagagtaagcatttggaagctctctaaacatccatcaataagagatttgtttaaaaaatacacagaatgactaaactgtggaataccatgcatgagttaaaaaagaattaaattaacttgtataaaacgacaaagaaatattttcaggacacattgttaagtgaaaaaaacaaacttcaggacagtgcatggaagataacatcatgtaaataaatcctatacatgaacacaataaaaatactttatatacagata

SEQ ID NO: 499615 - DNA, 1561 bp, Homo sapiens
  misc_feature (405)..(405): n is a, c, g, or t
gagcctcgcctttgccgatccgccgcccgtccacacccgccgccagctcaccatggatgatgatatctgccgcagctcgtctgtcgacaacgtgctccgagcatgtgcaaggccaggcttcagctggtgctgacagatgcaccccctgtggtccgtacttcccacatccactcgtggtgtgctgcccacagtgtctaccagaggactgtgactggtgcgagcatgtggtacagcaagtgattacctcatgtgaggctgacagcaggaccctagacgcaatgacgacggcactacctacactccttgaacgtaccaccatactgatgcactggacattcgttcaacacaaacttgcggacctgcacattggcaccgaaacatcttgagacaaccacacatcacatntactaacaaatggaagcctgccgctgcatggcctccactgacagcgcagacaacaccacagattgaccattgcattgtcaacctgaagtgacacccccacatgaacaaccacccaaatggccccaaccgccgactgacgagacagatagacaccaatgactcaatgtttctgcaagcaccccttctcacatccaacccacacagaccacatggtcacaccgtctaaagtactcttcccacagagacgtgctggacttattctcacctgattcaccagcactactgggacccgaaaacccaaccctggccactacagatgcatagtgcacactccacgagctgaactgcgcggatatagcgcacaccaacttatgcaatgtccccacacacatccctaacccgacaggctgaagctataagcacaccgatactcctacaccttgcccatataccttggaccgactcttggagtaccctgccgcatctggcactagccgaacctgtgcaacatgtcgaaaataccacttcaatacataagttacctcacaaacggaacccggcgaacaatcacaggtcttgcaccgccaccacaccagccccgaatcagcagccacacttccgctggcagtgcctcacataccgctgagaaccctcgtgaaccccgggtaagcccgcagtcacacattccacgactcacacaaggcccccgcacattactacacacagcacacaaaccctgcaacccaataactccaataccacactccaccagcccgtcagcgcccacactcactcccccaccccgacactcgcctcaccacagcccccgtcgcacaccacccacacacatcatcccacaaccaacatccacctacgacccacacctacaacacacactcactcccacccttacactctaccacctactcacactcacaccacatccccccccacctcatccctactctcaccacaaccccacacctcatcactccacaccacgccacactccaaacgcaacacgtccacaccctacccctcacgaacaacccaccatacccacttaagatcccaaactaccccatcctctctcacacactccaaccccctcactctttccctaaccacgtctacctcgacacacacccacccaacc

SEQ ID NO: 499616 - DNA, 287 bp, Homo sapiens
ttgatatgcgccagaaatttgtggagatatttatttttacaaatgcttcctgatgataccataatctcagacaatttggtaaacaacggatagttatctggaacataactttcagttacctctgcagtttttatgtgctgaactactgatcatcctagagataacccactgaaaagtcttctctaatccagttctacaataaggaacgtctttttaccgtttggtttgatataatgtcttccgaagaaatactttacttgcctgttttaatttctgtgcccatttca

SEQ ID NO: 499617 - DNA, 1204 bp, Homo sapiens
  misc_feature (343)..(343): n is a, c, g, or t
  misc_feature (345)..(345): n is a, c, g, or t
  misc_feature (766)..(766): n is a, c, g, or t
  misc_feature (1204)..(1204): n is a, c, g, or t
tggcccgactttttgacaaggctgcggtgtctggcggctattctcccgagccttcgcaatgccgccttagaggacgacaagaaaaaaaagaggcacgcgtggaaaagtctcggccaagaaaagacaaagacacccgaggtgaacaatctccgggggcagaggccaaaaagaaaaaaggtggctccaagaggcaaagttctcgggcacaaacgctctcaatatacacttatagtctctgtgtgtgtgtgtgcacaaaagctatcacctatatgtgtatatacaactctctgtgtgtaggaggagagttctcccaatcttatatatacacttatatatatcaccncncagcagctgtgtgtggtctctctctgtggaagagagcacagctgtgagagagatactctcgagagggcgctctcccgcgggtgcgccgaggggcgcgagccccctctctcgagagagagcctctcccttatagctataagagagacactcttctctctacacagctggtggtctctctccaagaggcccacgagagagcctctcacagagttgtctaatatctcctcacacaccccgcagagaaaattaatctacgcagcagagtgttgtgtgtgggagaatagtgtctctcccagagagttgtgtgctgtgggtgtgaaacaagaatagtgtctgtgtgaacactagttgagtgtcgtccaacacaccagagtgtggtgtgtcacctctttgtgtggggaccaaaacacatatataaaancccttttatattatacacatctcccaaaaaaaccaaacataacacaacaaacaaaacaactctctcgagaggcgacctctctacatagtagcgccgcggggcgcgcgcgagagagacacacagagagcgtgataaagagagacagtgcgcgcgcaccctgcagtgtggccacactatgggcgcgtgggatctctccgtgtgaactccccccgagggttttctctgtcgtgtgtagtaccacaaaagcggggcggcggggaaaaaaatactccgcgcgcgcggggaggctcacccccaccatatattaatgaggggagacgagcgaggaggataatatataaattttccgacaaagataaagacgcgccccggggtggttaaacccccccgtgggtatattggaagactacaaatggagggaggtaagaagaagaggan

SEQ ID NO: 499618 - DNA, 432 bp, Homo sapiens
catgtcatctatgtaaaacacaccttctacaaatccttgaaaaatctcaagttgcccctattggccattaacataaggaccggccgagctcgtccagatactaccggccccgctagttctctacgacctatccaatcccatcagcgagagctcacacagctgcatctggcatgtgctgcatcaggtggtactgtgcctctgtctgacccaaaaagttgacatcttcttcggaagattcttcggtggagtgtcaaaaagacagcagcccccattttgataaaggtctggcaaattagcttatatacctgtcttgaacgaagtgggttaggctcatgcacgtggctcaagtgctccagtatagaaaccagcgagagtaggtatgtaactgccaaagggacggttggctgttgtcggggttctttaacacctgga

SEQ ID NO: 499619 - DNA, 286 bp, Homo sapiens
gggatcccggaattcgggcgggcacaaggagggacacgctaacacaaagtaaagacaactctagagaatacagaactagcagaggccaggcattatggctcatgcctgtaatcccagcaattggggaagcctaggcaggaggatcgcttgaggccaggagttggagaccaatcagcgcaaaatagtgagactctgtgtctaccaaaaaaaagaaacattagccaggtgtggtggtggtgcacacccgtagttccagctactggggagcctggggtgggagaatccc

SEQ ID NO: 499620 - DNA, 281 bp, Homo sapiens
ctccagctggccccaagcatctgaagttggtcttaagatataagccgttttctaaagatgcttccactgcaggggcacagggctatggcagcatttctaatgcccattctgagcaggaacacagggcatgtgggcccaaaccacctccctcccaggggagccagtgtgaaccagggttggctgtaaggacagtcgccaactgtctggctttatggaagaggcgggaaggcccactcagcaactgctctctgggagcgtgtgtccttgggggccagctggag

SEQ ID NO: 499621 - DNA, 265 bp, Homo sapiens
  misc_feature (73)..(73): n is a, c, g, or t
  misc_feature (122)..(122): n is a, c, g, or t
  misc_feature (132)..(132): n is a, c, g, or t
  misc_feature (151)..(151): n is a, c, g, or t
gcgtgtccccactaagaacccctacaaccccgcgaacgccaaaagaaccttcagtttggcagcagttgtttanaattaggggattttgctaagcccgagaatattgacttggccctccactncctgaagaancgggagaaccaatgcactncaccacatcccagatgtcatcacctacctttcgagactcagaaaccagagtgtgtttaacttctgtgctataccacaggtgatggccattgccactttggctgcctgttataat

SEQ ID NO: 499622 - DNA, 715 bp, Homo sapiens
tcacctctagcattcaccagtaagtagaggcaccgcgctgccccagatgacacatgcctcaacgggccgcggtagccctaaccgcgcgaaggtagcataatcacttgttccttaattagggacgctgctatagactggtctccacgagcggttccagctgtctcctgagctcgtgaaccagtgtacactgtacctgctccgtgtaagaggcagggcatgagcacagcaagacgagaagaccctatggagctttaatggatgtaatgcaaacagtaccgtgatcattacccacaggtcctaaactaccaaacctgcatggagaaatttcggttggggcgacctcggagctagaacccaacctcacgagcagtacatgctaagaccttcaccatgtcaatagcgaactactatatctcagattgatccaatcaacttgagccaagcggaacaaggtaagcctctgagtggatagagcagcgcaatcctattctagagtccatatcaacaataaggtgtttacgacctgcgatgttggatcaggacatcgcgcgatggtcgcagccgctatctaaaggttcgtttggttcaacgagttaaagtcgctacgcgatctgagttccgaccggagtaatccaggtcgtttctatctactcaaattcctcctgtacgaggacaaggaaataagctactccagtaaccccccgaaagtagtgca

SEQ ID NO: 499623 - DNA, 274 bp, Homo sapiens
cgatcattatcatgtgaccgaggtggatggcacgaactataaccaaccctaggattagtatagatcagtagcacggtatacgtaatcgctaaaggctaatcactgctgttacccgtgagagagtgtggctaggctaagcgttaagagctgcattgctgacgtgctacatgcttgtcccttttgatcgtggtgattaagagggtgaactcactggaacggggatgcttgcatgtgtaatcttactaagagctaatagaaaggctaggaccaaacc

SEQ ID NO: 499624 - DNA, 193 bp, Homo sapiens
ctcccaatcgtgctgagcctccggaggtggcactgcgtgctctcgcacctcggtacgtgcatgcagtcatgggcagtgcgttgacggccctgacctggtcattggccgacctatcaggtcgtacagcctctgtggaccgcacctgtgtggacagcgtgcgagaccagacgcctggtagtctgacgccgatgct

SEQ ID NO: 499625 - DNA, 170 bp, Homo sapiens
ctgtgcagtccactgaggtggcaagcgaaggactgaacatggaagcattgtcgtgaccgacttccgtgcctgactttgaaatgtgtgactctcctgagtgacgcagtgactgagatagctgtccactccgtagtgtattggttgattaaatactttcttccgatccttca

SEQ ID NO: 499626 - DNA, 468 bp, Homo sapiens
ctcccctctcaccaccccattcaccatcagtctgaagccatggtcctggggcccgcctcctagtgctgaggtctgttctagaccctgagctccagagcctctggagctgcagggatgtccctgtggctctctgatgggcagctagaagacagacctgtgctggaagtctcattcaagggcccagagcaacccggatggtgccagttcttcaggaggttggtgtggagctgtcggtgtagaaacaccggatgctcaggaaaccccagaaggggctgcctaagtggtctctggagccctctctctggagagggctgctcctgtctgcatcccggagagggctgctcccaagccccagtgctgaggagctggcactgggcacggtgtggaggagttacactccggcggctccacctctcacagagatggtgtatagaagcccccaggtggtgtggggtgggtggagagcgg

SEQ ID NO: 499627 - DNA, 152 bp, Homo sapiens
  misc_feature (135)..(135): n is a, c, g, or t
tcgaagagggccggtggcatgtatagaactcatcactagacatcgtactacactacacgtactacgttgtagctcacttccactatgtcctatcaagtaggagcgtattgccatcataggaggcttcattcactngatttccctctattctc

SEQ ID NO: 499628 - DNA, 317 bp, Homo sapiens
ggaacaatacatcggacatgacctcgctcaaagagcggatcatagaccatccgacggatatagtcataatcacgcgtaagatgaatagtcggcacgagctggctaatgccagggagagaaatcatcgatttctctctctgtcaaagtttctggccgcccttgtgcttaaataaatgtcaggcatggacgaatagacgtcaattcattgtgctacatcaagtgcttgtggatgaggtaccaacatgggacgcttgccaaacattgagtcctcctcaaaaatgacaattctgtgtctggtgggatctgaacttgtgtga

SEQ ID NO: 499629 - DNA, 657 bp, Homo sapiens
  misc_feature (209)..(210): n is a, c, g, or t
  misc_feature (261)..(261): n is a, c, g, or t
atattagtgtgttttttgtacttttagaacagttctaatgtttgcatttgaacctatttgtttataagttgattttttttccttcgagataaagtgccttataggaagtaaattttgtctccctaaatttaaaactaacgattttattagaaggcaccattggctgagcatggtggcttatgcctataatcccagcactttaggaggcnnaggcgggaggattgcttgagcccaggggtttgagaccagcctgggcaacanagcaagaccctgtctctacaaaaaaataaaaaaattggctggatgtggtgacacacatctgtagttccagctactccagatgctgaggcaggaggattgcttgagcccgggaggtcgaggctgcagtgtgctgtcttcatgtcactgcgctccagcctggacaacagagcaagaccctgtctcaaaaaaaaaagagaaaagaagccagttttaagggaatattctcctgtgttacactgcaaattggtcctcaggcatagaattaaaataatgtgtctacctactaatttgtgaaatgagtcaatgacttaatggtgtggttaggtcacatttcaggcttaatcttttttaaaccagctgtttttccctagataattgtaagctaatatataagtg

SEQ ID NO: 499630 - DNA, 181 bp, Homo sapiens
taaagaacataatttgtgctctcagaagcttactagttagcagctacagctatggctagtgaagggccagcagcgcgtagggcccagcggagccgtagggcccagagggtacccaggctcaaattcgaaataatggcattggttgtttcttgagttaaaaaaaccgccaatgaaatcatta

SEQ ID NO: 499631 - DNA, 390 bp, Homo sapiens
  misc_feature (24)..(24): n is a, c, g, or t
  misc_feature (63)..(63): n is a, c, g, or t
  misc_feature (96)..(96): n is a, c, g, or t
  misc_feature (202)..(202): n is a, c, g, or t
  misc_feature (207)..(207): n is a, c, g, or t
  misc_feature (214)..(214): n is a, c, g, or t
  misc_feature (231)..(231): n is a, c, g, or t
  misc_feature (273)..(273): n is a, c, g, or t
  misc_feature (278)..(278): n is a, c, g, or t
  misc_feature (354)..(355): n is a, c, g, or t
ctactactactaaattcgcggccngtcgaccatgaagagcctgatccttcttgccatcctggncgccttaggtaagtaactttgtgttatgaatcncatgaaagcatggaatcttatgaacttaatcccttcattaacaggagaaatgcaaataccttcatatcccctcagcagagatggagagctaaagtccaagagaggntccgngaacgcnctaagccgtgtccacgngcgcaatagggaagcctgtgatgactacagactttgcgaacngtacnccatggtttatggatacaatgctgcctaataaatcgctacttcaggaagcccccgaagggaccaaattgagacttnngggaagaaaaaaaaatctctttttttctggaggct

SEQ ID NO: 499632 - DNA, 118 bp, Homo sapiens
cgagagaattcgtggtgctgctgtgtccacctgtacttgtggctgagggctggaggctgacagcaggggtagctaaacaggtgaactttgccaaagatcatcagactgtaagccagac

SEQ ID NO: 499633 - DNA, 127 bp, Homo sapiens
gattagaggatccggtttggctctatcaggggcaggaaaaggattgttgggttcatgaaaaggaggggccaagaggaggcaaagagagaaaagggagagaaccacaaatttgtggcgggggagtaga

SEQ ID NO: 499634 - DNA, 1180 bp, Homo sapiens
tgcccctcatttacataaatattatactagcatttaccatctacacattctaggaatactagtatatagatcacaaactcatatccacacctacatatgacctagaaggaataatactatcgcagtatactattatagctacatctcataaccctcaacaaccacgtccctcttagccaagtatagtgcctatagccaatactaggtctattgaccgcactggcgaagccgacggatgggacctagacacacatacctaggtcatccaatctccgaagcacgagtaatggagcataggacataacgtagcactaagacataagaagctagactccaaagggcatcacgagcgtaattcggtcaccaaaggaaatgaatattcactcagcaacgtggaccatgacctgtgagccaaaaaaaacacaatacaatcggcagtcacagacagcaaccaacacccaaaaggactaacaggcatccagacagataaaacgcccagggagggaaagagagagacgcaccgcagagaacaaaaaggacaacgactgcagcgagaagcccccagacgagaaagccacgggaacgagcaaagagagaacgccggcagaagaaagctaaaaacaaaaactggaaaaagcggagaccacgaaagaaacgacaaggggaaaggaaaaggacaaaacaaaagagcagagagagaggagaagcaagacaagaaaagcgagacgggagacaaaagaaacaacccgctggacaggacgcacagcacgaaggaagaggagacacccggaacagaagggacgaagaggcacacaagcagacgcgacgagccggcaggcacggaacgaagccagacacacgcaacccgcacacggcggagacgagcgaacgcaggagagaggaccacgcacggacgaaggccagagagacgccaggaccaagcgcgaccaagaccgaagggaggaaggaaaaacaggaccaccaggacgaggaagacggagtacaacagcagaagcaaagaaaacgaaaaaaccagaaaacaggaaggacagtaaaaaagagccggagcgcaaacagagggcaaagacaccacaagtgacgaaccgcagagagaaggacagaacaggagtaacgctgagaaacacaacggcgaaaagaagcaagagcaagacgcaaaaca

SEQ ID NO: 499635 - DNA, 477 bp, Homo sapiens
tccactagtgtaggctaagccaagctgatgttcagtaggttaggcatattaaatgcattgtcaacttacagtatttccaacttacagtggatttattaaaacaaaacacacatcataagttgagaaatatttatagttatcactggtatttagcatcaaaatactaaagtgttcatctgaagccaaccctggtaatctggctagacagtttggagctatggccggaggagtcaagtaagggccagaaaagtaagtatcttcaaaccctagaataatgacttcagaacagcctcgtgcagcagaaaatctgatgcccctcctttcttagactgagtcccattagagatcattgaaataaggagctccagagctctcttatttgacactatgagtactgcttcagttgaagggtgaaaaaaattagttaaagtaagaaatcacaagaaagaatacatttacagtgcctacactagtgga

SEQ ID NO: 499636 - DNA, 152 bp, Homo sapiens
gtcagcgctcgacacacaggaaggcttcagttggtcatagtgcagtgaagagagggcggtagctggcacagtcatcaccaggtttgcggttaggccgctccaaagggatactggtgccactcgtgcctcacgatcttcacgaatgcatccat

SEQ ID NO: 499637 - DNA, 274 bp, Homo sapiens
tttacctaagacacagagactcggatttctatactccagaaacatcacaatttttacctcaaaggtactagaagaaagaccaagggtatttattaaaaaacatttttctttaactctggcaattgtctatatgttcctagagaaaaagagggagaacccaatacccacaggcctgccacgctatcatgctaagaggcatctgtgcagatctttatcataatactttcctcaggttatttccaaatccaatttaatggatattcaactgacactc

SEQ ID NO: 499638 - DNA, 283 bp, Homo sapiens
  misc_feature (1)..(1): n is a, c, g, or t
  misc_feature (78)..(78): n is a, c, g, or t
  misc_feature (97)..(97): n is a, c, g, or t
  misc_feature (103)..(103): n is a, c, g, or t
  misc_feature (105)..(105): n is a, c, g, or t
  misc_feature (111)..(113): n is a, c, g, or t
  misc_feature (117)..(120): n is a, c, g, or t
  misc_feature (141)..(142): n is a, c, g, or t
  misc_feature (147)..(147): n is a, c, g, or t
  misc_feature (162)..(162): n is a, c, g, or t
  misc_feature (165)..(165): n is a, c, g, or t
  misc_feature (194)..(194): n is a, c, g, or t
  misc_feature (218)..(218): n is a, c, g, or t
  misc_feature (274)..(274): n is a, c, g, or t
  misc_feature (277)..(277): n is a, c, g, or t
ncgggggcattttcgatgtgtccattttcctaagagatgtgtgtatgagatgcctccgggtttctcatactatatatncttgctttggggggggggnttgttngnggtttnnntttnnnnatgggagacattgcctttgtnngtggnatccctggggttgtnctnggtctccgcttcccccccgagatgtctgngatggggggctcttgagtgtcagngttcgggggtatgggcgttcgccttcgaaagtgcggggggtccccgccttaaccgnccntggttc

SEQ ID NO: 499639 - DNA, 930 bp, Homo sapiens
catgcactgagttactggaagcccttcctggtcaacatgtgcgtggctacggtcctcacggcctggcgcttacctctgctacatggttcctgttcaacagcaacacatatgcctgaccctcctccactccacctccacccactgtccgcctctgcccgcatgagcccatgcccgactagcagtgcatgccgcggtaggtaacgggcctgccggaccgcgtacgacgagcctgggcccctggacgggacgttggttcttgcactaaaacccatcttcccctggatgtgtgtctcacccctcatccttctcacctttttgcccctttccactttgcagtaccaaatccacaagccatttcctctgaggcacgagtgaaccgagagctaccatgctggcggcgcagagggaacggggcctacacccgtcttggggctcgccccacccatgggctccctcccttggagcatcccagtgcgggctgggcacgcccacagcccccccccctttgacattctcgcacggcgacgcaactcttccactcccatattccactctacaacaactcactcccccaaatggcatcccatagcggcactagccattctccttgcaaccaactacatgtcctcacccctccctcggctcgtcagccctttgcctctcccggccctttatccccaaacgctcactaacttcaatccctcggctagcaactggtgaattgcagcgcttcgcccatggggcctgcttgcgtcagcaccagctacctggcgaccgccgacggcttgtcagccctctggccctcccagctcactatcgccggcgctccccgtccgccccgtctccgcccatcctcttctctctcctcggccccctgggctcctcccacccgcaccttcttgtcgctcccctgtcgccgccgcatccccc

SEQ ID NO: 499640 - DNA, 743 bp, Homo sapiens
ttatctgaattgaaaatctatctaggtttccagattaaatttctacctttcatatagagagtttaattttaataaaatgtttaattagagcatccttcccttttattctactttgaacaaatagtaattttaccccaactacttttcatgaagagtgctttgacacaacttacaccggaatttttactcattatggtacaccttatgacgtaccaacataacgttacttctacattgctttactttcgttagttggtcaatttctctttggtacctatgctggtacactaatggtggtttagaactagtctttatgtacactcctgataactgagaaacagaacctaaagttttgccttacattgctaaattggataaacctcatattcaataaactagtaaatgtagccactgtgactgattggtaaatcgtgttaacaaccattctaaaatgttgtaacctaatttacgtgtgaatacctgttaaacagaaaatactggttataaaagtctaacttcacccaggttacccaagtctgtgggcacaatttaatacttgcgtgctaatagtttttactagccttttgtaaactatacatagtgagtgatcattaccttaatattctcgtacgtttagacataatttgattggccaacataactctctgtttacgaaagccttactttaaccataacttttcagtgtgggcgggtttgcaaatcattgtacggttgaaacctgt

SEQ ID NO: 499641 - DNA, 300 bp, Homo sapiens
  misc_feature (43)..(43): n is a, c, g, or t
tctcgtaaagaaatggggggccgggcgcggtggctcacacccnaatattcagcctttaggaggctgaggcaggcggattacctgaggtcaggagtttgagaccagcctgaccaatatggtgaaaccccgtctccactaaaaatacaaaaattagctgggcatggtggcgggcccctgtagtcccagctacttgtgaggccgagactagggaattgcttgaacttaagaggtggaggttgtggtgagccgagattgtgccactgcactccagcctgggcgacagagcgagactctgtttca

SEQ ID NO: 499642 - DNA, 119 bp, Homo sapiens
gatacccgtgagttccaaatggagtccaaatgtcgactgacaaccaagtactttggaaccttcctacctgaggtggacaagaagtttcccaacatgaagatacagatccatgtctcagc

SEQ ID NO: 499643 - DNA, 452 bp, Homo sapiens
  misc_feature (440)..(440): n is a, c, g, or t
  misc_feature (443)..(443): n is a, c, g, or t
aaaaaaaaaaaaaaaaggggggagccgggccgccctttttttaatatacgtacaaaggatcggacaggtcacccagtggacccatttcacccacggctcggttgggccgccagtctttggtctctctcttcagcaagggtgaggcggataccctttcctcggggaagagaaatccagggttggttgccctggccaataacaaaaaggtgggaaagtcgagtggcaaagctgtggccatgggcatctttcacgtgaaccacgtcaaaagatccaggtggcctctctcggtgggtgatcacaccaattcttcctaggttagcacctccagtcaccatacacaggttaccagggtcgaacttgatgaaatcagtaatcttgccagtctctaaatcaatctgaatggtatcattcaccttgatggggggttcgtaaaccagaanggnaagagagct

SEQ ID NO: 499644 - DNA, 127 bp, Homo sapiens
gatgcccaacatggaccctttgggcatcactgcagaataaagaatgtaggccacagaacagcatcatctggtcactcgtatcgaccagtattgtttctatacttttgaagctttcttgcatggcctg

SEQ ID NO: 499645 - DNA, 754 bp, Homo sapiens
aggcaggaaggactcggactcctgtgtccagctttaaacagtctaagtcacgccctcttctgggtcacgtctagaatcactatctgctctccagcatcttctgtttgctggcaagcgtctgctgctactttggattcgtcaccaggggctggagctggcttgcgacaggagcatgaggacttcttggtcagaggactcgcacgactgttgctggtagagaaggatctgccagcgacagggcctcagacaaggacttcataccagatttgagagaggaatcctctaacatccacatcagtaccaagctgtctgtactccaaggagacattctgtatgagccattcctgaactgagcctggcaagacgtctggggcgaaatgcacaccgtctgaatgattgctgtctatgcagtcctcacagagagtccatcttgattgcaaatcgtaaaggtacccacctactgttggaggcctgtatccaagccagcgtgccagtctgcatctacaccagtgacatagatgtagcacgccccaactgctacaaaggaactatgcagtacgggcacgaacaagaatctctgtgactcacatgggcctctctttacccgtgcatgaaaaagcttgctgagaaggatgggctagcagcttatgcatctgaactaaaggagactattactctttgccagcataatgttgcctggacaacatgggagctgtgagtgtggcaaggctctccatcacccatattagtggca

SEQ ID NO: 499646 - DNA, 180 bp, Homo sapiens
ccagacagctccatcaggaaccaagcaaagcccagatagcctgacagataggctagtggtattgtgtatatgggcgggacgtgtgtgtcattattatttgagttatgctgttgtttaggggtaaataacagtaaataattaataataataataataataataaaggagctgacgttctta

SEQ ID NO: 499647 - DNA, 150 bp, Homo sapiens
tgactctagaggaccccaagcttgattgccgtagtacatatcatcacagttgagcatttgaagcaccaggtatgaatccaaaagctcatgccctgttctattggcccttaggggttttaaaatcccttgggcttcccgcaatagattctt

SEQ ID NO: 499648 - DNA, 131 bp, Homo sapiens
acgctcactcggcaaatcttacatctcaattcccatcctaaaaagcactcatacttatatgcatccccgcagctacacacacacaacacacagcacacgcatgaacacagcacacacacgtgcacagcaga

SEQ ID NO: 499649 - DNA, 376 bp, Homo sapiens
  misc_feature (26)..(26): n is a, c, g, or t
atttgaaaaaattagggtagggattnccaaaccgtcataaatttttaaaggccctttttctctccttttttttttttagaaaaggatttttttttaagtcccttatggaacatcccaataatgtgatactgtcttttttaagccccccgtaaaccctttaaaaatttgaaggtgggtcttgactcttaatgcatgtggacaattcccagcgttttattccgtcggggggtttgtgttgggcaaaaccatctgttatttacagcaaaggacattttacattccgttcatggggcccccccaggggaataagaataaaatgcttttatggctaagttgttaacctatgcccatcccctgccttttgggccactttata

SEQ ID NO: 499650 - DNA, 410 bp, Homo sapiens
  misc_feature (187)..(187): n is a, c, g, or t
gccccctgtggtccttctaatctcagtagagaggtcctggtagaaagcacagttttctagctggtgtgtccatccagacatttaaaaaatatgtacatatttatacatgtctgtatctatggaaaatatatggtgccattttgtgtctgggtattttcattctatttttagaaaatacaaatgggancattctgcagcttttctactcagcagtgtttcttttctttcctctgtttttttagaaggaataaatatttaataaaatatcactggaaataaaccactgaagcagaagtcttctagcattttgtttttacaggactttttgacgaaatcgcttaaagcaatatatttttttttcaaaagactggaaatccttttttaaaaaaagaaaaaaacaacgtttttta

SEQ ID NO: 499651 - DNA, 448 bp, Homo sapiens
agtgcagagccttagcctattaagggtgtgtattcctatagtccggacaagactcattctacaagaggtaagtgtaattcagagggccttgcttctactactaaccattctatcttgctacaccccttttccagtagctgtggaccaatgcatctctataaaggcaaatattatccagcaagcagtcaaccctgtcctttgcaattgctcttgtacacgtctttcctgctacaagtgttatagatgttactaccttatttaccccgaattctatttttgtccttgcagacagaatataaaaactcctgggcttaaggcctaaggaagccagtcaccttctgggcaagggctcctatctttcctccctatccatggcactaaaccacttctctgctgactctgtggaagagattcctattactgcagtacatacgtctgccaggggtaa

SEQ ID NO: 499652 - DNA, 185 bp, Homo sapiens
aggtacaagcaatattttagcaaacatgagaagtaggaaaagcctcagcttgacgaggcttttcattaccgttttttctttttcttctttttcgctttcagttgcggaatatcttcgtaaaactttttgttcttatccggctttttcgtcggccattcgtcttcgcctttttgcttgttccgctg

SEQ ID NO: 499653 - DNA, 178 bp, Homo sapiens
  misc_feature (28)..(28): n is a, c, g, or t
  misc_feature (129)..(129): n is a, c, g, or t
aggcgtcagagaaacaccgtttcagggnagtgaaaccatcataggattgacgatcgagtatcccaaaactttaaagtcttatcccagctcccagtcatcacacagctgtacgttggagctttgatccanatggatggttttaacacggagcatcatgctgtgcgatctgtatcgcttg

SEQ ID NO: 499654 - DNA, 197 bp, Homo sapiens
cattacaataaaaagaaatagtgtgtaggggatgttaattcagagattcaaatatcacattttcacttttattatatacaagttgcgaaatagaattgtccatttatatgggattgtattttattttgggtttttaataagttatcttgcttattaataaaacccaagaaatattatgtctttggtccttctctcat

SEQ ID NO: 499655 - DNA, 349 bp, Homo sapiens
agagtaaccctcatcaagaagcttctagcaaggtacactaaccacgaactagactaactgtaccagtgaacgggtactaacgtatcacttgatcctctgaaacgtggttgcgccattgtacacctttcgtaattaccttgagctcagggaggcgagtctgttggtgtacaaagtcagaggtgcggcagatgccttaaaaggcatccctgtcctctccttgtcttaaaagcagtgggaaaggctgcacagaatgtgaagcttaggagttttgtagtacaggatagtttttgaaggtaatttttgtacattctcatctgatccttaaaacaagcctgtaaaaaaggcagac

SEQ ID NO: 499656 - DNA, 171 bp, Homo sapiens
cacgaggccgaccttagctctcaccatcgctcttctattatgaacccccctccccatacccaaccccctgggcaatctcaacctacggcgcctaggttattctagccacctctagcctacgcgtttactcaatcctctggatagggtgagcatcaaactcaaactactccc

SEQ ID NO: 499657 - DNA, 370 bp, Homo sapiens
cgtcgacaaataaggctgctatgaatatagtggagcatgtttccttcataccggttggaacatcttctagatatatgaccaggagaggtattgcaggatcctccagtagtattatgtcccattttctgaggaactgccagactgatttccagagtggttgtacaagcttgcaattccaccggcaatggaggagtgttcctctttctccacatccttgccagcatctgttgttacctgaatttttgatcttagccattctgactggtgtgaggtagaatctcaaggttgttttgatttgcatttcactgatgattaaggatgttgaacattttttcaggtgcttctcagacattcagtgttccgtcgacgc

SEQ ID NO: 499658 - DNA, 226 bp, Homo sapiens
  misc_feature (118)..(118): n is a, c, g, or t
  misc_feature (130)..(130): n is a, c, g, or t
  misc_feature (159)..(159): n is a, c, g, or t
  misc_feature (172)..(172): n is a, c, g, or t
  misc_feature (179)..(179): n is a, c, g, or t
  misc_feature (182)..(182): n is a, c, g, or t
  misc_feature (191)..(191): n is a, c, g, or t
  misc_feature (210)..(210): n is a, c, g, or t
cggctcgacggtgctgcttcgtctaggttgagggctaagcttgggaaatggtgtgattccttgatcgtattcagttctgctctggactatcaaaaaattcctgggcaatatatacccnccggtttccccntccgttagtcgtatataggccaagaaagnataaaagaatacnatgatanaanaaggaaagnaaacttaagggtgaagatntgaatggattacccaa

SEQ ID NO: 499659 - DNA, 962 bp, Homo sapiens
  misc_feature (561)..(561): n is a, c, g, or t
gcacccctccgcgctggtcagtgtggacgcggaactcagcggacaaacgcgattgagagcagtgtgtggattacactatcactggaaaaatacgaattgagaatgaaggacaacagagactgcggaagatgcagcacctctggattcctgtctcagatggtgaacactgtaaggtcccagtagaacactggaaaagaccaatgaaataaatcagtcagttatgaggcagagcctaagagaactatggcaacatcatggtgactgtcccagaaagtgaactcgcacgtggagaagagtcctgctgaggtgcacgtgacggctgggatcctcctgctcacggaagggacgtacacgccagacgcgagtttgtcggccatccgctggacctacgctcgccaccgatgacgacccacgctcagactcttcttgagatggacgaacacaacattcttatcctgagacaaaccagcttgcagaattggcggtgtgcggtgtacggcgttgaacgtgtggcctgcttgtgggagatcacattcccgtgtcgagaaccagtgatgtgcncgtgaaggctaccgttgcgtaatgaatgttgacggacctcgcgatcgtactgacgttgggctaggccatttgaaggtagctaacctttcagcgcaaggcctcacttgggatacctccttgcaccccatcgtccactctatggcaggatagtctggcagaaacaggtccacgacactaactaatataccacagtggttcagtacctcgcatgaatacaagaatcccctgaacggcataaaagtcatcctggacagttggggctgtgggactgggatcatcagtctcttctgtgcacactatgcgcgggcctagagcggtgtacgcgggtggaggccagtgagatggcacagcacacggggcagctggtcctgcaaaacggtttgctgaatcttcgcgtgtcc

SEQ ID NO: 499660 - DNA, 231 bp, Homo sapiens
cggcaccgacattaccgaagagcgccgcgctcaggagcgactgcgtattctggcaaataccgacagtatcaccggactgccgaatcgtaacgcaatgcaggatttaatcgatcacgctattaatcatgcagataacaataaagttggggttgtgtatcttgatttggataatttcaaaaaggtcaacgacgctatgggcatttgtttggtgaccagttattacgcgacgtg

SEQ ID NO: 499661 - DNA, 109 bp, Homo sapiens
ctagtacggcggtgtgtgaatcggtcagttagtcgggaccgcaagttaagtcggtacgcgtattgaattcaagtatatattaagtatgcatgtgaccactagagctaat

SEQ ID NO: 499662 - DNA, 222 bp, Homo sapiens
ccaggcatgtggcaggcgcctataatcccagctactcgggaagctgaggcagaaaaatgcttaaaccggggaggcgggaaaccgcctttgcaaaaattatcacagtgagaaaataatggcagtgaaagaaagctgatctagccaacctccctcttgcctttagctttcaagctgcttttacttattacaacttacacttttacatacaacaggggtaccgag

SEQ ID NO: 499663 - DNA, 829 bp, Homo sapiens
tgtgtgagcagcgggtgcgtgaggagcccatctgccgcggggtgagtccgcttccctccccagggactcgcttccccagccattctgacctaaggcggttagagggatcgagggccgggcgagggatacgtcaggagaacacatccagagtaagagggggcaggacggggggactagagaaaagatgagcgaaagggtgaatcatcgtttcgtctgggggagcagcccgatgactgcgccctaaggtgtgggcgtggcgtaatagtgcgcccgatctccaggcagaaaagagccaagacgggcagggagggcgccgaggggatgagagcagtcggttatgggctcctagccaagcgatgcggttgatggttaatgcaccagaggccctggggttcagacaccctggggatcaaggggctgggaggagctgctggagtggaagtgggtttcccccaaggcttggggcagtcctgcaccacgctagcgcgtcgaaacctgccgagtttcgtctgaggcacggtacgagggtgacagccatccggtcagagggccttgactcatggtccatatgcccgtgaacctacagcacggggcgagggaagacgcggggattgcacgaggcagggcttcgagggaaggtggctaggcggggtacattccaccaaggaggggccgaaagtgggccacggtgcaagggggggggccgggggacagatgtggcggcagacacaagggacgcggcttgcaatggcgcctccggccctggggaggcagccgggccccgacgaaggcacactgggggccaagggtgctggcgcgagaaaagggc

SEQ ID NO: 499664 - DNA, 2929 bp, Homo sapiens
tgagagaccgtgttgcaatgttccgttcagcttggtgtcaatggcctgtgtccacctggcttccaagatagaagaggccccaagacgcatacgggacgtcatcaatgtgtttcaccgccttcgacagctgagagacaaaaagaagcccgtgcctctactactggatcaagattatgttaatttaaagaaccaaattataaaggcggaaagacgagttctcaaagagttgggtttctgcgtccatgtgaagcatcctcataagataatcgttatgtaccttcaggtgttagagtgtgagcgtaaccaacacctggtccagacctcatgggtagcctctgagggtaagtgactaagacttctcctctgctgtccaagcgctttggtgcagggacagcggcatcttcagccaatccagtgcaggctctccaccgaaggctggctctagactggttggcagcggctctgatgagcccgagaagaggcctgactccttgggtgcggagtctccctccgcacgatgctcccacgcgtccaacttgcacccaagcgggctttggtccctcttccaagtggactccttcaaggaagctgcagctcggtcagcagagaaggggcctgccgccagcgccctggaggaagaggaagaggaacccaagaggatggcttgtctcccagcagccacaccggctttgtgctcagccagttcatttgagtttgcatgtttctctgcactatggattttgagcatttagatttctttaatcaaaagcgttttagtgactccagtagacattttctttctgaggcatcgtgctttgcatgagagcaggccaaggttgaggggaaaagtaaagttaaagtcggttctctttcatagcaacacgtattgtctgacattcagccagcttttttttttttctaataatttctgtgcctttctgtcctgtatttactgtatttagaaaaagcagctagaatatttctccattaactcttgagattcacaggactgtctagctctgagtcctagcaatagactccttagaggagtagtacgtttatctagattttctctagataatgcaggcggaagacctgggttcccgggtggggcattgcagttcttcctgtgtttggcttccaggaattacatgaacgacagccttcgcaccgacgtcttcgtgcggttccagccagagagcatcgcctgtgcctgcatttatcttgctgcccggacgctggagatccctttgcccaatcgtccccattggtttcttttgtttggagcaactgaagaagaaattcaggaaatctgcttaaagatcttgcagctttatgctcggaaaaaggttgatctcacacacctggagggtgaagtggaaaaaagaaagcacgctatcgaagagcaaggcccaagcccggggcctgttgcctgggggcacacaggtgctggatggtacctcggggttctcccatgtcagtggtctcaatgtattgactttgtgatcgccctcctcggcgctatctgggatcactgcaagctccgcctaccagattctggtgattcttgtgcctcagcctcccaagtagctgggattgcaggcgcccaccaccacgctcagagtctcgctgtgttgccagtggaatcccccaaagaaggtaaagggagcaagccttccccactgtctgtgaagaacaccaagaggaggctggagggcgccaagaaagccaaggcggacagccccgtgaacggcttgccaaaggggcgagagagtcggagtcggagccggagccgtgagcagagctactcgaggtccccatcccgatcagcgtctcctaagaggaggaaaagtgacagcggctccacatctggtgggtccaagtcgcagagccgctcccggagcaggagtgactccccaccgagacaggccccccgcagcgctccctacaaaggctctgagattcggggctcccggaagtccaaggactgcaagtacccccagaagccacacaagtctcggagccggagttcttcccgttctcgaagcaggtcacgggagcgggcggataatccgggaaaatacaagaagaaaagtcattactacagagatcagcgacgagagcgctcgaggtcgtatgaacgcacaggccgtcgctatgagcgggaccaccctgggcacagcaggcatcggaggtgaggcggggttgcagtgactggtggccgcaagcccttccctggggagtacctgatggctgccctttgacccccggtggctgccctttgacccccgggtgtgctctcagcgcaagtggtcctagaacaggattctttttggaaatgtctgtcgactggaccttggtggatttggaaatggaactgagggaccggtgacacgtgcttcagaccggtctggggtgcggcgcacacctgggcccgtgcagggctcagctcggcagcagctctgagggcagctcaatgaaaaagtgaatgcacacgcccttgttggcgtggcctggcatggcctggtgctatcggcagccgctctccactccccgactgatactcaattacgtgaagccaagaaagatgatttttagaacctttgcctatattaggttgtacttatgtacatattttgcagtgtttcacaggagaaagtggccttaactgccccttattctctctccacgttgtaaataaacatgtgtttaatacaagttaaagctatgtatgaaaactcagaacttgaatcccgtcagcttaaaacttgtgtagggaatcctgacttttaaaatgtgagggtatttggatctgtgttgaaagtcgtatatttttatctgtgcggtgctgagtgcaggccaccagctcctaaatagaggttccctatatgcgcgtatgacatggtgaataaacacaactctctccacc

SEQ ID NO: 499665 - DNA, 264 bp, Homo sapiens
agcgaaatctcatacacggatcccccacgatattcgcccgcaaatatatatctcctttggcattagactagaattccactaatgagtcttcactctatccctccagctagcagtttactgttttgttaattcccctgaagttgacctgctaggacacagaaattctttgctgcctgtatcccttggagtaagaaggtagtggcatgagtggagtgtgtgttctttctccaattctattatgactgtttattaaacacttctgta

SEQ ID NO: 499666 - DNA, 149 bp, Homo sapiens
aaatgtgccacatcttcctcatcttccacctgggtttgaatcactcatcggtttcttctcctgagtcatcgctgctgtcattggcattcccctacccggatcttgccttcctccttcatcctctccaagtaggcttcagcctgtacaag

SEQ ID NO: 499667 - DNA, 1354 bp, Homo sapiens
  misc_feature (555)..(555): n is a, c, g, or t
gcacgtaccggcgctacggcttcctgcaggctgcctccgcgtatagctctcgccgagtagcttgttctcgacacgtcacaggacaccctgcagccctaacgatccaagccctcacccgtgggatcgctaaggtcatcggcaagtcagaccccctgctgatgagttacccagaaactgcaaagggctccgactgggtcccgacggggtgtcgcggagaaggtcagggcagcttttatcaggacgatcctacactagcttctaactgtcgctggaaccccgcgagtcaccggagggaccgccgtactaacgatggaggttccagctgttcaacaactgctacagttcgcggttcctaaggccagtccatcaatcgcgcggagccgtcacctagaatagggccgaggggtcccttgcgacatgcacctacacgtgtgccgcatttgtgccccgtgtgcgaagaatggcgtggctcagtctgtcgccacatggcttttccgcagtcactacctgcttaggggccgcgcctgtctgatggagcgatgcacaatggctttncagcatttgcccacctctgtgacagctgttccctttgggcctgcgatctatgcgctgcgcagctgcggcgcagcgccgttgagggcttcggccctctccccgtttacagcagctgtcggcatggtgtggcgccctcattgacctttccaggcacgagtggaacccttgctgagctttcacccgaggccagcacgccctgtgcacggtttgctcgtcgtgtggcctttctgcgggcccttcccaagcgggcgcccagggccccgcggggccccaaagtgcgccccgcggcatgggtcctcctttttgagtgtacggcgagaagctcctagaagaccccatgaactcaaagggggtggattacccaaggggggccttgctttgggcttccctcttgggttggcgcccccaagaaatcgccattccaccagaatgggattgcaacacggcaagcgggcggcctcatttttgttgggtatatgggcaccctcggagcccttttggacttaggccctgggcctcaaatagggaggcccccccattgtttgattctttagaacttggggctaagaaaggggggttttagcctttgcaagggggatggaaagcgcactgggacaaggttttcttggacgcctctatataggggtgctcaattggccccttttggcttggctggaacgaacaagtgtccactctggctcttttgggggagaagaaacctgaatcactgggacttggttgggcccagcatttggtcacgccttgacgagacaacagaaggtctacgcaaggaatctca

SEQ ID NO: 499668 - DNA, 415 bp, Homo sapiens
cagaggttaccgaatctcgaaagtggtgcaaagcacgataggtgacttactaaatgccaaaagctctctgactggcctttaaaaaaaacaacaacactttagcaaagaatattcagattaaaaaaaacagaaagggggctgggcgtggtggctcccaccggtaatcctagcactttgagaagccaaggcaggcgatcacctgagctcgggagttggagaccaccctaggtaacattacaaaaccccatctctactaaaatacaaaaaattagccgagcatggtggcgcatgcctgtagtcctagctactcaggaggctgaggcacaagaatcgttggaacctaggaggcggaggttgcactgagccaagatggcaccactgcactccagcctgggatgcacaattggtcgagatt

SEQ ID NO: 499669 - DNA, 313 bp, Homo sapiens
atagcacaactagggtcagttttgcaggtggtaagccatttaccaagatagttgtaggtaagaagggcagatttattagagaaattgtgaaaatatgttgcagtgggcagctcagcagagaaggggctacctgcaaagaggcaagggctggaggaaagttttatagggtcctgctgaagggtgctacgtgtggaatgaggtcattgtgcccgcaggttgtttgtgattagctgtctctaacaattgttcatacaataattgttcattattgttctcaacttggggctctccccaacctggggacccttcctta

SEQ ID NO: 499670 - DNA, 321 bp, Homo sapiens
gtcgacgatcacctgaagtcaggatttagagaccagcctggccaacatggtgaaatgctgcctctactgaaaatataaaaattagccaggtgccgtgcatgtgcctgtaatctcagctcttggagaggctgaggcatgagaatcgcttgaacccgggaggtggaggttgcagagagctgagattgtgccactgcactccagcctgggcgacagagtgagactctattaaaaaaaaaaatgaaaggagagagagatgaaagaaagaaagaaaagaagaaaagaaagaaagaaagagaaaagaaaagaaaaaagtcgacgcgg

SEQ ID NO: 499671 - DNA, 172 bp, Homo sapiens
gaggatccccatggaagaatgtgctcattctattatttcactacaaacagcatagaaagcaagggaagtggggaatttattctaaaatagaagggaggtcgtcatctacagcagcactcctcactcctcgtgtgccatttttagcaagtactcctgggcacattcttccaag

SEQ ID NO: 499672 - DNA, 576 bp, Homo sapiens
acgtgagtttatttagatgtagggcgtacatacgcaggttgttacgtgggtgtattgcgtgatgctgaggttgggatatgaatgatcccatcgggccaggtggtgagcatagttcccaagagttagttttttcaacccttgaccccttctctcccttccccccttagtagtccccagtgtctactgttgccatctttatgtccctgagtacctgtattagtctgttctcacactgttataaagaaatgcctgaggccgggcgtggtggcagatgcctgtaatctcagctactcgggaggcaggagaattgcttgaaccctggaggtggaggctgcagtgaaccgagattgtgccactgctttccagcctgggcaacaagagcaaaactccgtcacacaaaaaacacgaaaaaaagaaaaaaaagcaattccattatggggtatatatcccaaagcgaacaaagtattataccaaaatgacatagggccttgtgtgtgcctggcggcctattcacaatagcaagaccaggaatcaacgtaggtgccgtcaatggtggcttagataaagaaatctagt

SEQ ID NO: 499673 - DNA, 420 bp, Homo sapiens
agcaggaggggtttgggcaggagctttatgctgaagaggttggctaaaacatacatattcaacaggctacaggaggagctatgaatattcatgtaggtggttgcagtccatgcttattgaacaaacatgtgtggaacatatgatcccagccgggcatagtggctgatgcctgtaatcccagcacttggagaggctgagacaggcggatcacctgaggtcaggagttcgagaccagtctggccaacatggtgagaccccatctctactaaaactacaaaattaaccaggtgtggtgatgcatgccttttactcgggaggctgaagcagaagaatcgcttaaactcgggaggcggaggttgcagtgagtccagattgtgccattgcattccagcctggacaagaggagcaacactctgtctc

SEQ ID NO: 499674 - DNA, 142 bp, Homo sapiens
cacgccaagtcatcgtactttttgctaatttgaatgtctgtttgctattgttctttttaccacttcttttccaaacaatggaatgtatatattctatttttgtagttaacacttatttccatgtcaaatttacttggaacta

SEQ ID NO: 499675 - DNA, 718 bp, Homo sapiens
agcggggcagaacgcagctgcgtgcggctgcgaggatctcgtgggggcggagcggtcgccgctgccgtcgcagctcgggtcgggattagaacgattataaactccgggtggacgacgggcggcggcgttgcaatgtgtggcggaagcgctgggggtcagcggctccgtgcgccggcggacatctcggcggcgtctccatcagtatgaattagtcgcgggtcgtgggtgcccacggagacccgctgagcataaagggccgagagcggtggctggtggcgcctgggagcgtgggctcagacgtctaggccagcgttcggcggggctgtctgctgtcgttcgagcgatccgtcctggcggggacccgcgactgaagtctcgacggtgccctctggacctgtgtgcgcggtgaacccgggctggagtttgggcgccgggcacctgatgaactactaaccaagctatctacgggcttggtaccccctgcccctgcagctagagcggagaaacgtatgaacttctagacttccgccgagtccgggactccgtcgactgtggactacttaccaggctgaggggtagagtaggcggacaagcgggtgggggagcatcccttgttgctctgcaggccgacccgagcgtcggccctgcgctgggtccccgactgagactcggggggaccggcggaagcaagaggaagggtaacccggggcaaagggac

SEQ ID NO: 499676 - DNA, 605 bp, Homo sapiens
tgacgaggccacatgtgcgtgagcccatatgggccacacctgaggaagtgtgtcttgtgagaatgtgatgacacccctgtttccaagagatagcagcacacatggaggccatggtgggggcctgtcatggggtccttgagggccacagacaggctgagggaaggataggtgggcactgtccacaaggggcctcgggggaaccggttccaagacagacttatagcttgaccccgttggcgggctctgtgttgaaccacaactcatttaacaccttctcttgcgttatactcgggtgcctctttcatgtgaagggccttagacaccctgttataagggttggaccaaaggtctgtgcttctggaagccaaagtgcggacatatggcttgggctcttcttctctctggggttcttgtgtacttaggagtgacacagaggtcaagcacagaatgtgggtctcgcacgctatggacctcaaggagaggcctctgttggccttttcagaaaggctgtaaatgggatatgtggcgggacatcttctctgacgttacactataccttttgggtccgggcactgtgcacttttttatagagtcactctccggtg

SEQ ID NO: 499677 - DNA, 109 bp, Homo sapiens
gatctgatataatggtaccacagccaatggaatccagagtaaagtacaaaaacgccaccttttattgtcctgtcttatttcgcgggaaggagggttctactttacacat

SEQ ID NO: 499678 - DNA, 544 bp, Homo sapiens
  misc_feature (92)..(92): n is a, c, g, or t
  misc_feature (119)..(119): n is a, c, g, or t
  misc_feature (123)..(124): n is a, c, g, or t
  misc_feature (318)..(318): n is a, c, g, or t
  misc_feature (376)..(376): n is a, c, g, or t
tatgagctgatgaattgtatagtggtgaagtctgggcttttagtgcacccgtcacccgaatagtgtacagtgtacccaatagatggtttttnaatctccctccttttttttttcttttnaatnnaaactagaatggccttgtctgctcctgagactcttcatattccccacagagctaaatccaagctcagcatgatccacagtccatgtgatctaagtcctgcctgcatctctccagctcccctacccagtgcttgaactgtgcaagttacctaaaattcttgcacttagcagcgtattttctgcctgtcagttttnggctcacactgccctgattgtttaggatgtttgccatccacatcctgtcctctcaccntttctcccactccatttacctgaaaactggtatctttaagtcttagctcaaaagtctcttctgtgacagttttcctgacatctccgtcctcctgataaggccatcacctctccctctgagctccccacggtaccatggtccccgtcgtcatccctgcattgcggccgc

SEQ ID NO: 499679 - DNA, 154 bp, Homo sapiens
agtgcagaagatacctaaaacagctaaacacagcgtcagcttgtacagacactactacgactcctgcctgagattttcaggtttcaacacaaaacaaaaattagattcactgtttccagtcctacaggaaactcaggtcctttatttatctagc

SEQ ID NO: 499680 - DNA, 669 bp, Homo sapiens
ggcatcctcaattgtagtgagtcttcatttctctcatgttgcgtgacccttgaagctcaacatcgcgcttctgttcactttcaacttcaccttcaagttcacgaaccctggcccccaggtttctggatctgcttcttcccacccttcagtgccagctgctcagcctcatccagacgatgctgcaggtccttcaccgtctgttccaggttcttcttcatccgctccagatgggcgctggtgtcctgttccttcttcagctcctcagccatcatggcagcatcagtgatggccttcttggccttctcttctgcattgcgggcttcctggatgatgtcttccacctctccctggatttgggaaatgtctgtctccagcttcttcttggtgttgatcaggctggtgttctgggtgtgcaggagcttgaacacgctcactggcatccaggagctcctgttctgcgattttcctgctcctctccgtctgttccagagtggcccgcagctcctcgatctcagcctgcagcaggttggctctgcgctccaccatagccagctgttccttcaggtcctcctgggtccggagagcatcatccaggtggagctggtaccttgaggatggcgggacgagtcgaatcgaatatggctagtgtctgatgtttcctaaacaaaa

SEQ ID NO: 499681 - DNA, 181 bp, Homo sapiens
gtggggggcaaggggaggatagcattagggatagcaaaggggaggatagcattaggcaaaatacctaatgtagatgatgggttggtgggtgcagaaaccacatggcacatgtatacctatgtaacaacctgcacattctgcacatggatctcagacttaaagtatataaaagaaagatggt

SEQ ID NO: 499682 - DNA, 124 bp, Homo sapiens
cgggccagtggagaagactgagtaactaatggatggcactgaactgacgactgacggtttctcttgaaggagagagaaaaagagatttaaatagtaacaattataataaggctgggcatggtgg

SEQ ID NO: 499683 - DNA, 715 bp, Homo sapiens
ggagagaacttagtctcgacttctcttttttttttcttcaatccccattaattttgggccctgggggggatgtcatcttttcaatatgaaaaaaagcagcaagtcaaataaaatagaattcccaaatgtggataaaacaaacccaagtgtgtgaggggggaagcaaccgcaagaggaacaattgaaatgtggaaaaacgcatggaggagggttcccctctccttcgtggggactgactcaaacacgtgatgtggcagtatccaccagttccagagttcaggggtgtccatcccttttcgggcagtccaaaagggtggggatcaagagcacgttctggaggctacgggcaccaaggctggtctctttccccgcttccaacaacccccttgtgatcccttcccctcgtgaccccccggccgacaaggaccctcgacgctgacggcgacggacacgaagtccgaaaaccggcgacccggaactcccacctgcccacgcctgtggccagcacgatcccctcctccacgagctgccaacccccctgtcggccacacctctgcaaccgctggcaccaccctccccctgcccgcaccccccctccccttctcaacacctcaccacggcggcacccctgcgaacccccccccccaactcttacctcccctccaccaccaccacgggctctctcccgctaccccccaacaacctccgccaccgg

SEQ ID NO: 499684 - DNA, 494 bp, Homo sapiens
  misc_feature (449)..(449): n is a, c, g, or t
cttctagaggatcccgaaatgtcgtggctatatgcggcacatgtgtgagtgtcttcctggctacaactggtgataactcgtgaggacgacgtggactgagtgtgcctcccatgccctgccagcacgggggttcatgcattgaccgtcgtggccctgctatcttctgctccgtgtcccgccaggaagcgctggggcgtgctctcgcgaagattaagtgaggatgacgtgcggcccaggcccaccgagtggactcagggccccggtgcctacacaatggcacctgcgttgacctggtgggtggttaccgctgcacctgtcccccaggatacactggtttgcgctgcgaggcaaacatcaatgagtgtcgctcaggtgccttgcaggcgggaaaaacccgggactgcctgcgggacccaggcggaggttcccgttgcctttgtcatgctggntactcaggtcctcgctgtcagactgtcctgtctccctgggagtcc

SEQ ID NO: 499685 - DNA, 288 bp, Homo sapiens
tcactagcctcatgcagacgttgacaagtaaattaattatgactaaatacacggtaacatagtctgtgccgccacagttgaagtgctcaggagccacaggcagctggtgccactatagaggacagcacagctagagaagggttccatcactgcagacagctcttagcgcggtcagtgtgcagatggatgagccagatcgtcaagcagggggccctgtcagactctccagcgcctttgtgccagtttcaaaaggctttatctctgggcaggtgcaacttcttgccaagg

SEQ ID NO: 499686 - DNA, 175 bp, Homo sapiens
ggtgacagagcaagactccgtctcaaaaaaaaaagggccattttagatgacactactttaagtaatgtaattttgggcttaggggagcttgtttaaaataataaaatgcattggaggccaaaacagatggttaaatcatgattttacaggtgagacctggatttttacgtgaagc

SEQ ID NO: 499687 - DNA, 1103 bp, Homo sapiens
tgtgtcttttcttttgatactgaattcttgaggtttgtgcttatttcatcatgtgtgtatatgtgttgttcgttctaaggttaactgtggcgtgtttcctatcgtttgtctgtaatccctgcttcagggtagtcctatatttcagcttacttttctgttgatgaagctgaattcaggtgattgtgggctggtcaatcccttgtggctcgcattcttcctcatcgatctgttggtaattggaatatgcattctattctgtgtctcttactatttaatccatttgtagaatttggtgttattgtgaccccttatgtttcgctctattaagtctttctttccgtctgttcagagcgcctttatttataggctgacgacatgtgattcagataaagagtctacaagtgatgaagctgtccagctcgttataaccgaggctgcgttttgcttattggtcattcgcagcaaagtatggtttagtcataaattagggagttcaagtattttagaatcactccgttccctttccctgtctgctcctggagtgtttgaaggggccacgagcttatttcgttctcttgctttcttgttctttttgtgtttcttgcttgttactgttttgctggtcgcttgaagaagtgcgtgttaaacaatgagactaatcttagaacacttccattgaccttcttgttgcctgttcatttttgtggccaaggaagtagctttccccagtgtatgtcttgcagttcgtccgcgtctatatgcttggatagaggagacgattgcatgcagagcagtctctacgcttgtcgtatgtgtcaatgtatatctacttcttcttttccaggacctgacagaattcagggaagagtccctgggtatatgtccacacttagcaccatgcaaattgttggcgatgtggatggatgtgtgcataagagagagagagaatatgtgtgtgtgtgtgtgcgtctgcgagcgcacacacatgcacaagtgcgaatgagattgcggttgccttcatgttctgaggtatagggcaaattgaattgtgcactggtggtctgtctgtacagttactcatgtctatggaattggtttagtcc

SEQ ID NO: 499688 - DNA, 304 bp, Homo sapiens
tctgataggaacgaaacaatagtgacagtatgtttctgaacctgtcgctgcagtatagcgagtcagcgttgccgtaataatgtcatcacgaaaacgtacccactgcgcggcaggctcaatagccagctgattttgtccaggtattgaggatcatccagagtatcaagctgcgccagcagcaccgtgaaaatacgtttccacaaccagctactgtcgggaatttgcgctattttctctaaagatgatagggagttgctctcaccggaaagtagttgttgtgatatcacaccgccagcctgaggcg

SEQ ID NO: 499689 - DNA, 380 bp, Homo sapiens
tcccaaggaatgagaaatagaaaaacataaaaagaaacgccatagatacaaagtccaaattcttactttatggatgtaaaatgtaccaggtagctacaagaatacaccacggtatatacagccatgctcaagacagtggttctttgtgtaggtagtacaacagtgtattgccagcctacaggaggaaaggccagactcacagaagggtgtaacatttagaagaaagcaacactaatgattcaaacagcttcctgaattttaattatagtgtagtctcacagaaagccttatcataaattccataattctaattaatttaccaagataatgtaattacatttggtaaagtaaggtatacagcagttcctcatccttggaag

SEQ ID NO: 499690 - DNA, 709 bp, Homo sapiens
  misc_feature (16)..(16): n is a, c, g, or t
  misc_feature (37)..(38): n is a, c, g, or t
  misc_feature (51)..(51): n is a, c, g, or t
  misc_feature (56)..(56): n is a, c, g, or t
  misc_feature (89)..(91): n is a, c, g, or t
  misc_feature (93)..(93): n is a, c, g, or t
  misc_feature (96)..(97): n is a, c, g, or t
  misc_feature (99)..(99): n is a, c, g, or t
  misc_feature (112)..(112): n is a, c, g, or t
  misc_feature (119)..(119): n is a, c, g, or t
  misc_feature (124)..(124): n is a, c, g, or t
  misc_feature (137)..(137): n is a, c, g, or t
  misc_feature (156)..(156): n is a, c, g, or t
  misc_feature (158)..(158): n is a, c, g, or t
  misc_feature (162)..(162): n is a, c, g, or t
  misc_feature (165)..(165): n is a, c, g, or t
  misc_feature (168)..(169): n is a, c, g, or t
  misc_feature (175)..(176): n is a, c, g, or t
  misc_feature (183)..(183): n is a, c, g, or t
  misc_feature (317)..(317): n is a, c, g, or t
  misc_feature (324)..(324): n is a, c, g, or t
  misc_feature (338)..(338): n is a, c, g, or t
  misc_feature (343)..(344): n is a, c, g, or t
tgcgcaggagccgcanggccgtaggcagccatggcgnncagccggaatggnatggncttgaagccccacttccacaaggactggcagcnnncnctnngncacgtggttcaancagccgncccgnaagatccgcagangtaaggccggcaagccaangncgcnccncannctccgnnccccgcntcgggtcccatccggccatcgtgcgctgccccacggttcggtaccacacgaaggtgcgcgccggccgcggcttcagcctggaggagctcagggtggccggcattcacaagaaggtggcccggaccatcggcatntctgtgnatccgaggaggcgnaacanntccacggagtccctgcaggccaacgtgcagcggctgaaggagtaccgtccagagctcatcctcttccccaggaagccccatcggcccccaagaagggagacagtctgcagcagaacctgaaactggcgcacccagctgaccggaccggtcatgcccgctccggaaccgtctcatacacaaggagacagctcgactcactcacctgaggacacagaagattcccacgccttcgctcactcttcgcatggcccggccacgcccggcatcctccgggatacgggcacccacgaccacgggaaggcgcgcacacgctgtcgacacgaacgactccagccctccggcgcactggcaacccaaaaccaacc

SEQ ID NO: 499691 - DNA, 1039 bp, Homo sapiens
gagacgccggacccgttgtgagcggcagagagcggggtcgcagcgcagttatctgtccctggtacctgagaccgccgcaaaggatggatccgctgcgctcggggaacgcgacaatgtgcgctcgtggtcccgaacctgaatacctttgcacaatgccacaggatagttcccccagggacgaacccagcaaagcagttctcctaacatggagctctcgctcaactggtcaagtagcaaagacctggacagtacctcttcgtgcaggtactggtaaacccggcgaggtggcgacatcgcaacgggcctcatcatttgtgtccacatggagccggagagtacagtggtcgctatgaagagctggctcgtatgctgatgtggggctggaactgcgtggtgttcgcccaccgacatgttggacacggacagatcgaaggggacgaggattgcgtagctgtcttgacattaccgacgttgtcccgtccacgggcattgttgttaggcacgccattgctgatacttccgatgcaacgataaggacgtaacgcactggcggtatactgtcgttccattctggagcacgaattctcattggcgagagcggccatccgacaattcctcaacggcccaggaatagaaagccgagagtccaatttggccgggtcatggtactaccatgtcgtccatctgagttgctatgaccatatcctgaatcttcgagaacaaatcttcttaggtcccttgcgtgagaaaaacgatgatcaattcgtagagattgacaaagttggttcattctagtggcaatcaacattcgagagtggctcgtcttagggagtaagaacgagggtgaattaataattagaagcacaagtaattttgcgggacaaggattgagggtgtgatcaggatacaagtggataaatgcggatagggatgaaggagagacccaaaatagtgggacgaagtgtcaaggattgagatgagctatataaaacatgggatcagtatgaatagaaagcaggaaagcttaatattaggagaa

SEQ ID NO: 499692 - DNA, 222 bp, Homo sapiens
gagacaaggtcccggtggtgatacgatggccaccaagatcgacaaataaggcttgccgggcgtcgtaacaactggtgcgcgacgaacggctcggccgtcatctgggtgacttataaatatgacggctccaccaacgtccccggcgagcaagggagctgagtaccagcacttcatccagcagtgcacagatgacgtccggttgtttggcatccgaatacacca

SEQ ID NO: 499693 - DNA, 844 bp, Homo sapiens
cattcgagcttgatgtggggaggggtgtaaaagcggtcggctgagggtataattgtctgggtcgactctaggaggtctggtgagaaatagtgtaaatgtcattaaggagagacgggcagatatagatatgctcgggggagtcgtatgaatagtataatatgaggtggactggttgcacttcttacttctgtggaaatgcgcgtaatgtgtccgcagatcctatgaggcgacccaatgacatgtatgccctgcactaaattggcttaacgcaggagttaacttgttgcccgtcagactcgagtgcacctaagtcagcaagacagtccctcaaccaggtcctctttcatccagaatcaggctctacgattcaacatcaaaggaccgtttgcagtgctcaattgtgctcgttccacaggctatctctcacagggccctggagtgcggcacgacaaaaaagatcgccaatctcggttaatcttcgtactcatgagaaaaaccacctttagtacacaggaggcatgctctgatacttctataaccacgttgaacacgaccagacgtgtgtgcactcacttgttgcgtaaagtactatcactgaggctagggtctgtaacgagagtctcttcccgagctacctccgagttccatgcccggaccctgggccaaccaggaaggaaactgagaatgaggtcccaggagcgtcttggctcagagaactgcccgatcagaggacggagggagcgtactgtcaaagaaggaactgaccgcaggaatggatcttctcaagaaatgaccgggcgatgggcccctggggactggtttactggacgcgctaagtggcaaa

SEQ ID NO: 499694 - DNA, 100 bp, Homo sapiens
gcggaaggagcacctgacctcaggatttgaggctacagtgacagtaagctatgatggcaccactgtgctccagcctttgagatagcaagaccccatctcc

SEQ ID NO: 499695 - DNA, 787 bp, Homo sapiens
  misc_feature (214)..(214): n is a, c, g, or t
  misc_feature (324)..(324): n is a, c, g, or t
tctgggagcccaacaaggaaagggcctcattccctgtgcggtaattctctggggaatgttgggttccatccaaggaattggggggctctctgtgtcaaccaactctggatcccaaggattctaagttcccctgtgcctcctgggacaaggtgtgttccctggaaagaaaagcaaaggtctttgtggtctcccctgaagaaaggcaatggttccntcggtggctggtcatctttgtgctgggttccaacgtggtgtgccgtgtgccctccaaggcttggtaattataaagtctcctgtgggctgtgacccctctgtggggtgtgncccgccggacttccccaaggtttccacctactgtggtggttcatggttcagaggcactatttggcacagtggaaaagagccaacttaggtgggaacagcatagggaaacagaggacacaaataaaaaaataacaacacaaataaagaaagaagaaacagaacaaacaagaaagaaataaacacaaaataaactcgcaggggggtggggcccgggtatccccaaattcgtgcgctaataggtggaggtcggtatttacgacagttcacgtgtggccggtcgagttttacaaacggtcaggtgaactggggacaaacccgtgtggcggttacccagaagttaactctggcgttggcaaggaaaattcgcccattataggccaggatgagcggtaacttgccgaagggccgggaacagatatggccgtttccagtttgtgcagagcttgaatgggcgattgggctt

SEQ ID NO: 499696 - DNA, 694 bp, Homo sapiens
  misc_feature (256)..(256): n is a, c, g, or t
  misc_feature (368)..(368): n is a, c, g, or t
gatcggtttgcagacgccactgctatggaaaaacgtgtactattatatatggtcaaacccaccgtgttcttcgaaattgccgtcgatggtcgatgcccttggatctgggtctcctttgagctgtgcgctgaccaggtccctcagacagcagataattttcgtgctctgatcactggcgcgaaaggatgtggtcgtcatgggttcctgctgttcagcacgatacttacttccatgcggtatactggtgctcacgcgnttcggctgaccgttctccatctgtaccataatggacacctaggtggacaagagtccactctactgtgggcagacaatttcgacatgagtgacgacaccttcgagtcctaganagccattaccagggttcctcggcactacttgttccaatgtgcatacattgcctgtaccccaaatacataatggcgttacccatgctttttatcaatctggcgacgtagcctagagaactgacgttggtgtggagtcggcatacgcagttgtgtgctgctccgagcaagaagtgaccaccgaatgcgcttgtacatatttgtcggtcggccaatgagaggtcgcgttcggcgtctcaggatagtggccaagaatctagcgctgaaagatcacgcaatgttgctgcacctggtggactaatctccgcaatacccgtttgactccgtgt

SEQ ID NO: 499697 - DNA, 234 bp, Homo sapiens
  misc_feature (94)..(94): n is a, c, g, or t
  misc_feature (121)..(121): n is a, c, g, or t
  misc_feature (136)..(136): n is a, c, g, or t
  misc_feature (156)..(156): n is a, c, g, or t
  misc_feature (184)..(184): n is a, c, g, or t
  misc_feature (217)..(217): n is a, c, g, or t
  misc_feature (219)..(219): n is a, c, g, or t
  misc_feature (234)..(234): n is a, c, g, or t
gatcattggctatgacagagaacccgtctctcaagcagcagctcttctcctatgccattcttggctttgcctgtctgaggccatggggcttttntgtttgatggtcgccttcctaatcctnttcgccatgtgaggntccatggggggtcaccgganctgttgatactgcaactacacaccattnttggtgctggggtgtgttaagatttaaccattnancacaacgtttctctn

SEQ ID NO: 499698 - DNA, 148 bp, Homo sapiens
tccccctcccaagcatgagaatactgcctctgaaatgtgtatgtcaacacagcacaccttaagaatactcaggaaaagtatctaataggctctacaagtatgatcacaacttagtgaacgctatcaatgcaattcctcatccttggag

SEQ ID NO: 499699 - DNA, 434 bp, Homo sapiens
aactctgccgtgcgccagctgtacttacttccacaagaacttcggctgaagatggatcccaaagcccaaagggtcccatccaaattctgcccggggccctgcccctacatttggaacctggacaccagttcacaaaggttctggccctgtacaacagcataaaccgggcgcctcggcggccccgtttttggtaccccaggcgctggaacccctgccccttgtgttattcgtgggccccaaacccaaagtggagcaactgtcccacattattgtgcgctccttcaaattcaactaaggttccgccccgccccgccccgccccggcagggccggccccccccccccccgccccccctgcctttcccatggggggtgtatttaaggacacccgtgccccaaacccccctggggcccccttaaaaatggagagaggga

SEQ ID NO: 499700 - DNA, 850 bp, Homo sapiens
atggctcctgcggcgcaagtaggtctacaagtaggctacttccccgtatcggatagaagacgctatatcgagcgtttcatgatcagcgccctcgatacagtcattttgccttatctgtattccatagctcactgttatgctccttttcctaacgagatcacaacatgaactataggtaatacgtaacatctcgagacgcgtcaggaaatggcagaaccggtctgagacatatcatgaccgccatcatcctaagtcctcatcagccactcagtcattcgctagggcatcctatatacataactcaggacagaatgagtcgaaaccgatcaccttcactttatccatcataacttaattgtgggaagaccaaaatgagtacttgagaggactactgacgttccggcctgaatgtaactggggtgtcgcataacactgcgtttcaatcctcgcttacaattagctttccggcagcgcattataagttcccttagggagacctcacgtggcggaatcgtagcagagattcgttattgcaacgttggcacgcacttcttgaggttagtgcacgtcccccgcattcgccatggacccccctcatgtcgatgactcaattctagtcacaatttactcgggaactgatacctttggccccattccattcgacagctggggaacgcctagcacgtgttggggggcctttagaacaaaaacaaaggactggcagaaatcccccggggaccggttcttagaaactccatcaccctgaccttttgagcctggctttgcaccagagccgggacggtagtagtaacgtggatcgaatgctctgtgaaatctagtggccgcatag

SEQ ID NO: 499701 - DNA, 138 bp, Homo sapiens
tctagagtatccctttctcatggagccacaggctcactgatgcatccacacggctggggagaggcgtcagtgaagaccaggtcctccaggccctgctcgacgactttgattacaaactccgtgccgcagcctcgtgcc

SEQ ID NO: 499702 - DNA, 426 bp, Homo sapiens
aatagctgataacattcatctgtggttatgaatggcatccactgggcaaagtcctttgaagcagcagtgacctttaatgagctaaatggaacctgactataaacgcaaacctagccaggggaccttatctgcaagacaggatcaggaggcagagaagctcccagtattaaggtgtgaggttgacttatgcaatacatttgagcatgtcatttgttcttccagctttctccccgtttttctaaattgggagtagcaataattttaaactctgaaaatataaaattccctcagaagtaccttattcttatatattagaaatcactactgttaggaactcttttgaggactggcttatgacaaataaagaattctctgcatcttactatgtttttagcaatagataattaaaatatattttgacaactc

SEQ ID NO: 499703 - DNA, 104 bp, Homo sapiens
aagcgttgtcacggtgcccccaatggagatgatcttggctggagtgctatagaccaggagatggaatgagagacacatccagctttctaaccctgtcgcaatag

SEQ ID NO: 499704 - DNA, 1140 bp, Homo sapiens
cgatgctttacgttgtttctccccggcaggcactttggttccggcttgggaacctcgccctttggggcacctggcggtgtgttcctcgcaaaggggtggagtctcccgttttttttatccgagacctacgtgggcgagggatccttcctgtgtgcatgctagtttatccccgcgcgaattatttgtgcgctggggcttttctcagcggcgggcgtgggcctcctgccacagggggtaattccggggggaccccctggtgccagacgtgggaagccgaatgggccggaatctttcacagcccgcgtttggtggaaacttgggggaaacgggcttgcgctcagagggaacacaagcccaggcctgttaacaacaaagggctcccctcgtggttttcggggacctgggattcacacaggaagaaagcaccttgggggtaatataagggggccggggggcacacacgcgcacaaatgggggtaacaacccctgtgcgggggcccacacccactgctgggcacacacgcgcccacgggtggcaaacgctctggcacggtctggagactgggacccgcctggagctggacacaccaggcgcccccgacggaacactaaccacctgtggagaactccacatttctcccacggggcttccacaatcgtcgtcctatagttaataccccttctccgcttcctccacggcctccacaaaagtgggaagcctcggagaaggtaagaacaggggagggacacacctggtgggtttctacctgagacctcacacactcgggggcacaaagggttttgaaagacaccaacgctctctccctgccagcgcccaaagcctgggcccgaaggcggcggtttgtgcaataatcttgcctcgcccctgtcttttaaaggagagcaagcgggaacggagagcgttcggggcctcctcacgtgaaggtggtggggctgccggagtttgggctgtggggccctctgggccaccgcttcttgagggaaagcccacgggttcggaggagaccctggagaaaacacaggaacgggttctgaagactgaaattgttttaccagctccccgggtggacttcagtgtgtgtaattgtgtaaatgagtaaaaccttttatttcttttta

SEQ ID NO: 499705 - DNA, 145 bp, Homo sapiens
agcggccctgcagaggctcggcaggtgtcttgatataatcatctgctgagggtggagctgagggctggaaggggagctgagctgacgctcggaaggtgtcttgagattatcttccgctgagggctggaagctgccccgcagacgc

SEQ ID NO: 499706 - DNA, 511 bp, Homo sapiens
agcggaggttacgcagctgtcttccaggtgactggacgtgttgatcagcggctcgctgggatttggctgacgtggccccagcgcgaagctgcaatccccattccagaatggcagaagaaatggacagagtaacattagactgcagacacaagaaaccaggtacagacagaattttggcagaagaaaacggccatggatgttccagcagacagcagaagaggaacacggaaaagcaaatggcagtaacccctggagacggtcagctactggatggattgccatcatctgaaggctggttgacaaatacattgacacatgagcagcagaggccatcatttgcgatggcacaagctgaggatcccaacaggcaagccaaataacaaccgagcccacatcgctcaacgaatatgctgctactgagaaacatgagaatgcggaatacactggatataacacagaaataactgaaacctacgggccagcagcacacatacaactccaccgcatacaa

SEQ ID NO: 499707 - DNA, 690 bp, Homo sapiens
ctacttgggaggctgacgtgggagaatcgcttgaacccaggaggcagaggttgcagtgagccaagactacaccattgctccagcctgggtcacagagtgagactccgtctcaaaaaaaaaaaaaaagaaaaaaaaaatttagccgggcttaggggtacaccctttagagtccgggggctcgggaggcgtgagggggggaggaatagcttggagccaataggagttcagggccgggccggtgagcttagtgattcacgccagtggcaccttaatagcctgggtgttgacagaacaccgagaaggacccgtgttttcttaaaaaacgaccacacacaacacaagcaccacacacaacacacaacaccaccaattagtttcagaaaagactcaacgttgaacacgcagaaatagtgtactccaggactcgcgggcccacattgaggaggatagtgggcaggataaaccaattagagggtgttcacatgccaattagaaaagtgcgttggagaaactgcaaaggtgtagtgaaccccgaagtatttcgcacaacagtgcagctaatggtggtgccccccacaaccattagccagcaggttttcggaaagaacccggttaataatgttaagaattctaaacaaacacgaggaggggaattggaacgccccacaaaggggggtttaacaagccagc

SEQ ID NO: 499708 - DNA, 377 bp, Homo sapiens
cgtgtctgtggtcccagctgctaggaagcatgaggcagagggatcacttgagaccagctgtttgaggtcatagtttgctatgttgcacctgtgaatagccactgcactgcagcctgggcaaaatggcatcaccctgtctcaaataaataaatatttgagttggactgtaatttttaggtatcattgttcatatttatttgattaggactggaattctcctgctacagatttttctgtttttagaaagcaatacaaactttcatgtaactcagtgccatgtctatcttcctcctcaatgtataacttgaactatagactaattatctcaccatatttgttttatttctgtcatttcttgtttgcttttgaggtttctc

SEQ ID NO: 499709 - DNA, 415 bp, Homo sapiens
ctgggaggcggagcttgcagtgagctgaggtcgtgccactgcactccagcctgggcaatagagtgagactccatctcaaaaaaaaaacgttcagttggctgggcgcaggttgtcacgcctgtaatcccagcactttgggaggccaaggtgggtggatcatctgaagtcaggagtttgggaaaagcctggccaacatggtgaaactaaaatacaaaaatgagccgggtgtggtgtcaggcgcctgtattcccagctacttgggaggctgagacgtgagaattgcttgaacctgggaggcggaggttgcagtgagccaagattgcgccttgaccctccagccggggcattgggtgaaactccgtctcaaaaataaaaaataataaaataaagccgttcaataaggagaatttggaaa

SEQ ID NO: 499710 - DNA, 857 bp, Homo sapiens
  misc_feature (8)..(8): n is a, c, g, or t
  misc_feature (46)..(46): n is a, c, g, or t
  misc_feature (212)..(212): n is a, c, g, or t
  misc_feature (245)..(245): n is a, c, g, or t
  misc_feature (344)..(344): n is a, c, g, or t
  misc_feature (360)..(360): n is a, c, g, or t
  misc_feature (362)..(362): n is a, c, g, or t
  misc_feature (376)..(376): n is a, c, g, or t
  misc_feature (390)..(390): n is a, c, g, or t
  misc_feature (393)..(393): n is a, c, g, or t
  misc_feature (403)..(403): n is a, c, g, or t
  misc_feature (409)..(409): n is a, c, g, or t
  misc_feature (477)..(477): n is a, c, g, or t
  misc_feature (486)..(486): n is a, c, g, or t
  misc_feature (491)..(491): n is a, c, g, or t
  misc_feature (499)..(499): n is a, c, g, or t
  misc_feature (503)..(503): n is a, c, g, or t
  misc_feature (518)..(518): n is a, c, g, or t
  misc_feature (520)..(520): n is a, c, g, or t
  misc_feature (525)..(525): n is a, c, g, or t
  misc_feature (529)..(529): n is a, c, g, or t
  misc_feature (558)..(558): n is a, c, g, or t
  misc_feature (572)..(572): n is a, c, g, or t
  misc_feature (575)..(575): n is a, c, g, or t
  misc_feature (587)..(587): n is a, c, g, or t
  misc_feature (590)..(590): n is a, c, g, or t
  misc_feature (596)..(596): n is a, c, g, or t
  misc_feature (599)..(599): n is a, c, g, or t
  misc_feature (601)..(601): n is a, c, g, or t
  misc_feature (604)..(604): n is a, c, g, or t
  misc_feature (616)..(616): n is a, c, g, or t
  misc_feature (624)..(624): n is a, c, g, or t
  misc_feature (628)..(629): n is a, c, g, or t
  misc_feature (631)..(631): n is a, c, g, or t
  misc_feature (637)..(637): n is a, c, g, or t
  misc_feature (644)..(644): n is a, c, g, or t
  misc_feature (651)..(652): n is a, c, g, or t
  misc_feature (654)..(655): n is a, c, g, or t
  misc_feature (657)..(657): n is a, c, g, or t
  misc_feature (663)..(663): n is a, c, g, or t
  misc_feature (702)..(702): n is a, c, g, or t
  misc_feature (756)..(756): n is a, c, g, or t
  misc_feature (786)..(786): n is a, c, g, or t
  misc_feature (795)..(795): n is a, c, g, or t
  misc_feature (797)..(797): n is a, c, g, or t
  misc_feature (800)..(800): n is a, c, g, or t
  misc_feature (811)..(811): n is a, c, g, or t
attgtttngattgttacaatgaacttgcattcttttgtatgaaganaataatacagaggaaataacaacaactaaacctttggcctggattatcatcggctggaaattcatgttggatgctagtttttattgataacaagttattttttgttttatatgctaaaaatgttcattgaatgcctcctatttggctggcactgcctaggcacttncacaggtatttcatcctaatcctcacaacagcnctatgaggtaatcattggtcccagtttacagaagccttgggtgggagattattgcttgatatacttctatttgccacagatttttgtgggcaagaggtncgtgtcggctggggantnactggtcaagagcnctgattggccaggngtncctatttgtngctgtnagattcaaataatcaaaatactagaatttttcccccacaagaatgatgggaccaatggcataagagtnaaggaaggngagtnagtgggtntctncctttgaagcaccantngagtntgcnttggtcagccccacacaggtgggcgggangaggtggtggaggnggngaggcggtggtnatnagtgtnctngnttnagtgggatgagnttactcangagnncngtgatntggggtntgaactnntnnantgaaanagttgggtaaaaagaaaataaaaaatttaaatatggggntaataggtaattaaagaagttaaaggtgggataattaaaagaagtatatagagnaaaagggaggggagaaaagagtgaaaaaangagtaaaananaangggaattaaanataagtgtaaatatttaaatggtggaagataataatggtgaaaagt

SEQ ID NO: 499711 - DNA, 795 bp, Homo sapiens
  misc_feature (8)..(8): n is a, c, g, or t
  misc_feature (46)..(46): n is a, c, g, or t
  misc_feature (212)..(212): n is a, c, g, or t
  misc_feature (245)..(245): n is a, c, g, or t
  misc_feature (344)..(344): n is a, c, g, or t
  misc_feature (360)..(360): n is a, c, g, or t
  misc_feature (362)..(362): n is a, c, g, or t
  misc_feature (376)..(376): n is a, c, g, or t
  misc_feature (390)..(390): n is a, c, g, or t
  misc_feature (393)..(393): n is a, c, g, or t
  misc_feature (403)..(403): n is a, c, g, or t
  misc_feature (409)..(409): n is a, c, g, or t
  misc_feature (477)..(477): n is a, c, g, or t
  misc_feature (486)..(486): n is a, c, g, or t
  misc_feature (491)..(491): n is a, c, g, or t
  misc_feature (499)..(499): n is a, c, g, or t
  misc_feature (503)..(503): n is a, c, g, or t
  misc_feature (518)..(518): n is a, c, g, or t
  misc_feature (520)..(520): n is a, c, g, or t
  misc_feature (525)..(525): n is a, c, g, or t
  misc_feature (529)..(529): n is a, c, g, or t
  misc_feature (558)..(558): n is a, c, g, or t
  misc_feature (572)..(572): n is a, c, g, or t
  misc_feature (575)..(575): n is a, c, g, or t
  misc_feature (587)..(587): n is a, c, g, or t
  misc_feature (590)..(590): n is a, c, g, or t
  misc_feature (596)..(596): n is a, c, g, or t
  misc_feature (599)..(599): n is a, c, g, or t
  misc_feature (601)..(601): n is a, c, g, or t
  misc_feature (604)..(604): n is a, c, g, or t
  misc_feature (616)..(616): n is a, c, g, or t
  misc_feature (624)..(624): n is a, c, g, or t
  misc_feature (628)..(629): n is a, c, g, or t
  misc_feature (631)..(631): n is a, c, g, or t
  misc_feature (637)..(637): n is a, c, g, or t
  misc_feature (644)..(644): n is a, c, g, or t
  misc_feature (651)..(652): n is a, c, g, or t
  misc_feature (654)..(655): n is a, c, g, or t
  misc_feature (657)..(657): n is a, c, g, or t
  misc_feature (663)..(663): n is a, c, g, or t
  misc_feature (698)..(698): n is a, c, g, or t
  misc_feature (729)..(729): n is a, c, g, or t
  misc_feature (738)..(738): n is a, c, g, or t
  misc_feature (763)..(763): n is a, c, g, or t
attgtttngattgttacaatgaacttgcattcttttgtatgaaganaataatacagaggaaataacaacaactaaacctttggcctggattatcatcggctggaaattcatgttggatgctagtttttattgataacaagttattttttgttttatatgctaaaaatgttcattgaatgcctcctatttggctggcactgcctaggcacttncacaggtatttcatcctaatcctcacaacagcnctatgaggtaatcattggtcccagtttacagaagccttgggtgggagattattgcttgatatacttctatttgccacagatttttgtgggcaagaggtncgtgtcggctggggantnactggtcaagagcnctgattggccaggngtncctatttgtngctgtnagattcaaataatcaaaatactagaatttttcccccacaagaatgatgggaccaatggcataagagtnaaggaaggngagtnagtgggtntctncctttgaagcaccantngagtntgcnttggtcagccccacacaggtgggcgggangaggtggtggaggnggngaggcggtggtnatnagtgtnctngnttnagtgggatgagnttactcangagnncngtgatntggggtntgaactnntnnantgaaanagttgggttccaagccccttccacctttccatctngggctactaggtacttccagaagttccaggngggctcctncccagaagtttgggccaggtacttnaaggcagggtgggcaccagtcccggtgactgc

SEQ ID NO: 499712 - DNA, 439 bp, Homo sapiens
taaagtttttaaaaaagaattccaatggccccccctgaaatatgtagatattttgctatttatttaaaggagtattttaaaagatattgaactatctgaaattggcccgtaatcaaagttcccatcatctgaatgcttttccctgaggtagaatgtgagtctcaaaaaagactgcattacgggcccctttttgccccctttctgtctttttattttgcagaacaacaacaacaacaaaattgggccttagctgtatttttttgtctaggggagtttgtttctgtctgacaaagcaaccttttttgcaaaaaacagtggatgtatttaatactgtatcatacccaaaaccctgcaggggtatataaatgctttctgtcatactgtgttttcagatgcagaattttaaaattaaaaaaaccccgcctttatgggacagtga

SEQ ID NO: 499713 - DNA, 1354 bp, Homo sapiens
  misc_feature (492)..(492): n is a, c, g, or t
  misc_feature (521)..(521): n is a, c, g, or t
  misc_feature (1338)..(1338): n is a, c, g, or t
gctggagcgtgggtagtgcgcgcgaaggggttgggcgccgccgtgattggcgggtggaagtcgcggtggccgctggctggttgcggtgttctagtggtctgggtggacgtctgtctgtctgtcagtcagttgcgcccgagcggggaggggccgtggacggcccggactgagcgtggggcatggacgaggtatccgtggcccgctcatctgctcgtcagattgcgcctagttgctgcgcgtctaggtgctgcagccacatggtgagtggtggacagtgcgatctccctgttgccctggctatgctgccagatgtgcctgctttctgccaggacgagccatgctgtgctcgggttggcttgtgcctggtgtccgatggagcgggcaatgggtgccgggtgctctggagtgcctcgcttagaccctttgcgttccttgctgcggtgcaaggctttctcccaagctttccggcatcctgtgtctcttcgggctatngacgaagtcctgcccagggccctggggcnttgcaggcgtgaccctacagaccctgcgcgcacggcttggtcagctgcatcctttggctcctgcgggacgccgctgtgcgtgctgatagcgctgcgcacggagctgcggcctgctccagccgcgtccgtcgtgtgttgcccccgtgggtggcgcgtgccagtggatggtggttgggggttgaacttcgaaggtaccagcaatgaagggatctccgttggggacactgggggctttcgaccggttgcgatcttccagaggtgggcgtgaaccggcagaaaaaacttgatttgggacgtacggtgtttaaacaggggtgcttcgaatagacgaccgaatccttgctacccacagtcaacaccattccctggggttggtaactcgtgacatttttgcacttcctcacagaggagcacattggccagtgcaacaaatatttgccaatctgcgtcctatgaacagcttcgcggaatttacgccaaccactgtgtacttgtgggccgatatagacggcaatttgtgacacgagcgtgggaatagcgcctcccacaactttattgggtacccgtagaggggtgcttgtgcgatcacgcacggtgtctacccagggtctatgtggactagagctagcgctggcacagataaacccctgaagaggaagcgtgatccatagtggaccttgcccttaggagcagcgggcctgacccgcgagtatagcgaccggcgtgtacttaagcgatgtgtgtagtcccaaacacagagtgctacggcatatctgtggcccgtagtcctacttgaagcactattccctctctggtncttaggatggtagtcg

SEQ ID NO: 499714 - DNA, 333 bp, Homo sapiens
cgactctacattactaccagacacccttagacaaaccatttacccaaataaagtgtatgcgatagagattgaaacctggcgcaatagatatatggccgcaaggggaagatggttatataccaagcatatatatatgcaaggacttacccctatacctcttgcgtaatggattaacttggaataactttgcaaggagaggcaaaggttagacccccgaaaccaggcgaggttccttagagacaggttaaagagcacacccgtctatgtggcaggtgggtgtgcaagatagaatattagatcaaactttttggccacagaaccctctttcccttg

SEQ ID NO: 499715 - DNA, 905 bp, Homo sapiens
gaatattcataggtcgaggcctggtttaattagtccgatggggcgctctggctgatctcctgtgtcatccgccgggccccggctcggagtgctcccggcggagaggaaggcggcccgcccgggccctgggaccccgcgcgagtcggcgcccggccgaggggctgcgtagtgccccgccctggccaggcccagccgggccctggacaggggcagtggcattgtatcatagcactgacctgacctcatgcagcaccctggcaatgaccttcagtggaacgtggagaacttcgttgccatcccagcaatcagcctgtgcacgttgccaccccaagaagtggtagggaccggcctcggttccccttgggcatagagttgcgtgcgaaagttcttcgagaggaacaggcaaacgctaattagacagacaaggtgggagatattacccgttgagccccctatggcaaggacaaaagcgttatccccaaagccaaggaccaaaggagcaaatttcgaagacaaagctacaaagccaacgaaacgacccaaatcgcttgagaaacccctatccggcgcgtcaagagcgcaaaattttgggcggcaaccggcgagcaaagatgcccccgccaataaaactttccattttgtgacgagaagaaacgtgcgaaacaacaaatatttcctcccaaaaaaaagaaaggagcccacatgacgcggagcaacacggacggaagacgactttgggcacccattttacccatcaacccgcgcccactattcactgacaacaacacaaagtccttttcccacgaaaaacagcagaactactgagactctttgacacaaagagcccctttaccccatatggaaatttggtcggcaccacacgtggaggagagtcttagtgcagc

SEQ ID NO: 499716 - DNA, 441 bp, Homo sapiens
cgcaggcagctgagataatcctcaacaagccaggattcaagtacaaggcctgtctgcaaccaggtgagctctctgggccttctctcctttcggttcttcatgccccctcttcctgtcctaatttgccaaattatctgttggtttggtcccagttatcttggtgacgtcgaagattatctagagagcaaagcttctgtcacgaaaaggcgtgaagatttcttgtatgtaccctgcttggacaagtatcagggaaaaattgggaatgagtttaatgctgactcgtgtgtaatattggggggaggtccatttgatcaggcaggccttggaatcatcaattagacactcagggaaaggtggactttacctctaagctatgaaagatgaccagaaagtgcatgggtgaaggtgattaggaggtaataggcatgggtacccgagctc

SEQ ID NO: 499717 - DNA, 430 bp, Homo sapiens
acgagaatgttgtcgaagagtcgatgcatggcaataccgctcactaggccgcagaccttgagagattgatcgagaaggacgacgcggcggcatcgcgatggaacatctgtaccgtctctcgcgagtaatccaggagatccttgccggccagactgagcttggcaatcatgtcgttggtgcaggtgatgatatggcagccgatatcatccgcctggaagatgttcagcacctcacgcgggctggcccacagcagttccgccttgggattggaggcaagaatgtccctgcacccacgcatatgcgccaccgggtcgatgcccgtatccgctacacgccccgcgaaaacagaaatgatgctcggcacattctcgtccagcacctcggcaacggccgcgacctgctccggcgtcatgatcgccgtgacattgag

SEQ ID NO: 499718 - DNA, 124 bp, Homo sapiens
  misc_feature (79)..(79): n is a, c, g, or t
aagatcatcacaccagtgcgctccagcctgggcaacaaagcaagactccctctcagaaaaaaaaaaaggggtatccggnccttaaggttcaccaattcttagaacccaacggaatcaccggtcg

SEQ ID NO: 499719 - DNA, 794 bp, Homo sapiens
  misc_feature (19)..(19): n is a, c, g, or t
  misc_feature (100)..(100): n is a, c, g, or t
  misc_feature (131)..(131): n is a, c, g, or t
  misc_feature (151)..(151): n is a, c, g, or t
  misc_feature (203)..(203): n is a, c, g, or t
  misc_feature (281)..(281): n is a, c, g, or t
  misc_feature (307)..(307): n is a, c, g, or t
  misc_feature (317)..(317): n is a, c, g, or t
  misc_feature (359)..(359): n is a, c, g, or t
  misc_feature (386)..(386): n is a, c, g, or t
  misc_feature (406)..(406): n is a, c, g, or t
  misc_feature (430)..(431): n is a, c, g, or t
  misc_feature (434)..(434): n is a, c, g, or t
  misc_feature (449)..(449): n is a, c, g, or t
  misc_feature (453)..(453): n is a, c, g, or t
  misc_feature (455)..(455): n is a, c, g, or t
  misc_feature (458)..(458): n is a, c, g, or t
  misc_feature (460)..(461): n is a, c, g, or t
  misc_feature (473)..(474): n is a, c, g, or t
  misc_feature (477)..(477): n is a, c, g, or t
  misc_feature (482)..(482): n is a, c, g, or t
  misc_feature (488)..(488): n is a, c, g, or t
  misc_feature (490)..(490): n is a, c, g, or t
  misc_feature (492)..(492): n is a, c, g, or t
  misc_feature (503)..(503): n is a, c, g, or t
  misc_feature (506)..(506): n is a, c, g, or t
  misc_feature (730)..(730): n is a, c, g, or t
atactttctttttagtatntacaagccaacacagaactcattttattcaagaatgaacacaatgtacaaaaaaagtatgcttatattataaaaatatgtnaattttatcttctgggtgcttaggagaagtnattttaaacaaaatcaaggnaaacttgttctctataatgagtctgctataatttaacaacaaagtgaaagcnaatgtacttacgaagtatttttaaaggggcactgataatgctgcactggaaatggtaaacccaatgttaactaaagtnaacatttccgctctaagcttactggnaccacttcangcctaaatcatgggaaagtacctcttttacagaatgcagatnactgctaacaatccacatgactaagtnttcagtttcccttgcttaanatttgttaggatatatttgggggnnggntaggagtataatggntgtngngtngnnaaatggtatttnnttnggttnagtttngnantgggatatggngcnatgggggagaaatgaggtcttgagatttacaaccccctttataaaagtgggaaagctgcctccctaaaaaaaattatgtccaaggtgtaataccgtatctttttttgtagttttcttatttcttgattttattggcacctcccaggcactttggcatgtgctcctgtataaagtgtagttactgtgcctgtagagttagtggcagctgcagagtagttataggntgacaagtccacttttggcttaccatggagatctgctccaacacatgctggtcgttggagcagc

SEQ ID NO: 499720 - DNA, 723 bp, Homo sapiens
  misc_feature (364)..(364): n is a, c, g, or t
ctcacacggatgctttagctttcacttcatctagcccttcattaagcagccctagcaggactccacctcctattcttgcacgaaacgggatcaaacaagcccctaggaatcacctcccattaccgataaagatccaccgttcgcacccattacatacagagagtcaaacgacgccctgcggcattacttctcgttccttcgtctgccgtgtaaatggacattaaacacatattcgtcagcgcgagacctacctaggcagacccacgacgaagtatgacccatagccgaagccacttgaaacagcgccatcaccctacgatcaagtcccgaagtgagtatgttgcgcctgagtgttcgctcgtgnacacaatatctcgcggatcctggcccgtaacgaaagctgaggaggcgtcctgtgcgcctattactagtcgcatgcctcagtcctagcaacttgataccccacctccgaagatatctcgatcaagcaaccgaggtaagtcacgcacccaacgaatgactgaagtcaagactgaagcctcgaagaacgaaagtgataaccatacgacaacagctaaaggacgaagctgatctctgtatacgtagtgatcctgtaatcatttgttagtggccacaagtaaacatcctcggactgcctgcctcgagtgcattgtacggccaaagcagccgactatctataaagctagaccaggccatgcccct

SEQ ID NO: 499721 - DNA, 440 bp, Homo sapiens
caaacaaatagtgtataagtctttaagtgaattacttgattatttattttagcattgtaaaccaggaaaacaatcaaaatagcaaaaaactcttaatcctcatttacgtattaagtggattccaacctgtgcaatcatctttaaaatctccagtaatgcctgggcgcggttgctcacgcctgtaatcccagcactttgggaggctgaggcgggtggatcacttgaggtcaggagttaagaccagcctggctaacatggtgaaccccacctctactaaaaatacaaaaattagccaggtgtggtggggtatgcctgtagtcccagctactcgggaggctgaggcaggaaaattgcttgaacctgggaggcaaatgctgcagtgagccaagattgtgccactgtaccccagcctgggcgacagagtgagattagtctcaaaa

SEQ ID NO: 499722 - DNA, 1097 bp, Homo sapiens
gctgcactcttgccatacctgactgctcagctggatgaggagctgggagtgtacccctgtccagagccgtgtggtccaatggcaaggagccctgcccacctcatgagcctgtttgtgttgtgtgaatgcccatgatcatctacaatggtgctggcacctccctgcgatgggctggggcagacatgcccctgccatgctaccctgcctcttccagtgtcctgcgccaacagctgctggagccacccgggctgtatgaggtattgcctaaggctggtgcactgaactccaacgatgcctttgttctgaaaaccccctcagcctgcctacctgatgggtgggtacatggagccatgcgatggcagacaagactggggtgcccaggagctgctcccccttgctgctgggcaccaacctgctgcaggtggcagaaggcagcgagccagatggcttctgggaggccctgggctgggaaggctgcctaccgcacatccccacggctgacaggacaagaagatggatgccatcctcctcgccatcttagcctgctccaccaagataggacgtcatgtgatcgaagaggtccctggtgagctcatgcaggaagacctggcaacggatgacgtcatgcttcctggacaccctgagaccagggacttatgactgggttggacagggatcctccaagaatcaacacacagaacagcaagccttgaccttcttgcattaactcggttaccgttcgaagcaacggaaccacaagacgaaaacggggaatctgcgaacagacctattcaacagttgatgcactccaaggccttcgagcctaccctccatctgagtgacaggttcacttgcatggtaatggtctcacttggtctggtgaccctttagacaagggccatggctgaacgctggcgagccataagagagcttcatccccgccattataacgctcacgcctttttaaacgacttccataaggagcctgatcagcgagcaagtcatataaatcatagatcgacggagcatctaagaaaaacagaattactaaaaaataatagaagaataaattgttagaataaataataaatgaaaaa

SEQ ID NO: 499723 - DNA, 376 bp, Homo sapiens
  misc_feature (90)..(90): n is a, c, g, or t
ttataacatgtattattttctggtagcacatttatataagtgatttaagaggtcgggcgcggtggtcatgcgtgtaatcccagcatttgngaggcgaggcgggcggatcacgagatcaggagatcgagacatcctgactaacatggtgaaaccccgtctctactaaaaaatacaaaaaaattagccgggcgtgggggcgggcatctgtggtcccaattacttgggaggctgaggcaggagaattggttggacccgggaggcagaggttacagtgagcagagatcgtgccactgcattccagccggggtaagagagcgagactctgcctcaaaaaaaagaaggcttagtgtgcaactcatcagagttgcacagggca

SEQ ID NO: 499724 - DNA, 367 bp, Homo sapiens
aatctaaacccactatatgttagaggttgccagcacacaatgaataggcaatcccagtcaatgatgctccaaaaatgagactctatatgcacttattcttgccttctgtagcttctccaagacagacctccaaaagtgattacatgtgagacatacaggcacagtatagtgaaaagaatcgaggacaggcactgctggcttaatgcatccttgaagtcactcaagaaacaaggtgctttcctttcgattgtcacgtatcaaaccacacaaaaagccgtcccgtcctctgtagctcatgtgcccagcactgatgagcgtgactctttaggagtctcacccagtgtagggtgttagtgtctggggtacc

SEQ ID NO: 499725 - DNA, 121 bp, Homo sapiens
ttacgagtaacgatcactcacaaacccacatcaccctccttaacctctacttctacctacgcctattttacaccaaccccgtagatcgtggtggttgtaaaccccacgatcaccaatagga

SEQ ID NO: 499726 - DNA, 198 bp, Homo sapiens
catgcactcatccagcgggcatttgagtttgtagcccatgtggtatcatgtagtagataaatgtatggaatcgggctggcctacatctgattcttgagtccatatgtgacagcttaggctattcttgactcgtgcatgtaacagcttaggcttctggaggtcactactatagagccactggatgagggcatggggtac

SEQ ID NO: 499727 - DNA, 497 bp, Homo sapiens
tgcccatcccctcagagcagcttcccccagccagccgctgtgtatccatccaccaccagcagctgccccacggcttcaccaacatggcccatgttacccaggcccatgtcaaactggaatcacagcagcctcggccttcaacctggagctgctgacttggtctagttgatggagctgcccacctctcgatgtcttagtatacactcacactatcagttgtcgcgaaataagactaagctcttgtattgcgtgctttagactcggtacacatcgagcattattcgaatacttggcttcctttcttgcagcgcttgatttgcttggtgaccgagattactagtgactagtttactaactaggtcattcaaggaagtcaagttaacttaaagcatgtcacctaaatgcacttgatggtgttgaaatgtccaccttcttaaatttttaaagatgaacttagttctaaagaagataacaggccaatcctgaacggtactccc

SEQ ID NO: 499728 - DNA, 325 bp, Homo sapiens
ggtttatataatccaaggagaatatgaataaaccccccgcccctcttggtgccttgaaagaaaagatgagaaatgatgaaaaggttgcctgaaaaatgggagacagccctcttcttgccaaaaaaatgaagggattgggccgagctggaaaaccctcctttccaaatgctgactggccctggtggtttttgctctcgacagtatccccaaaagctgacggctgggtgtttcagtttgaaaaaattttgttgccttcattttccctgcaattttgggtaaatttttcaaagatttgaattaaataaataaaattcatttttccaga

SEQ ID NO: 499729 - DNA, 300 bp, Homo sapiens
catttattggccggacgcggtggctcacgcctgtaatcgcagcactttgggaggccgaggcgggcggctcacgacgtcaggagatccagaccatcttggctaacagggtgaaaccccgtctctactaaaaatacaaaaaattagccgggcgtgtgtgtgcgggcgcctcgtagtgtccagctactctggaggctcgaggcagagagaatcacattgaaccccgggaggcggagctctacagatgtagactcgagatttgcgccactcgtactcctcgggcaacagcgagactccgtctca

SEQ ID NO: 499730 - DNA, 456 bp, Homo sapiens
  misc_feature (40)..(40): n is a, c, g, or t
  misc_feature (108)..(108): n is a, c, g, or t
  misc_feature (185)..(185): n is a, c, g, or t
  misc_feature (194)..(194): n is a, c, g, or t
  misc_feature (201)..(201): n is a, c, g, or t
  misc_feature (204)..(206): n is a, c, g, or t
  misc_feature (209)..(212): n is a, c, g, or t
  misc_feature (214)..(216): n is a, c, g, or t
ctactaccaggctgatgatgccaatgtggtactgaccgtnacctcgaggtggacaccaccctcaagagcctgagccagcagatcgagaacatccggagcccagagcgnagccgcaagaaccccgcccgcacctgccgtgacctcaagatgtgccactctgactggaagagtggagagtactggantgacccaancaaggcngcnnnccnnnntnnnatcaaagtcttctgcaacatggagactggtgagacctgcgtgtaccccactcagcccagtgtggcccagaagaactggtacatcagcaagaaccccaaggacaagaggcatgtctggttcggcgagagcatgaccgatggattccagttcgactatgcaggccagggatccgaccccgccgaggatggctatccactcgaccatcctgcgcactgatgtccaaccgaggcctcccagaac

SEQ ID NO: 499731 - DNA, 149 bp, Homo sapiens
aattttttttttaaaaagggggggttcttaacaggaggccttttttaattcaaaaatgtggttttttcccccccccccggaaaaataattttttttttgtgtgtggtgggtgggtcggaaaaaaaataaattccccggtttgccaggga

SEQ ID NO: 499732 - DNA, 346 bp, Homo sapiens
gtaacacaatggtaagtatttgtgtatctaaatacagaagaggtacagtgaaaatactatattataagatatgcaacacatgactgtaattgttttaggaaagctcagtgaagttgaagaaaaaccaaaaatacaatccaacaaaattacaaaaataatggattactaaaataaatttaaaagagaagtcaaactaatttttaaaaaacatagaaattatggagctgaaaaatacaattaatgaaataaaaaatgcaatagagagtgtcagcagcagagttgttcaaacagaaaaaaaatctgtaaacttgaagataggttattcgaaaatatacagttagagacc

SEQ ID NO: 499733 - DNA, 1010 bp, Homo sapiens
  misc_feature (548)..(548): n is a, c, g, or t
ggacctttccaacattgcgctgcggatctgtggtggcgttctgtagcctgtctcgtcctgcgtccactggatgctctcaaagtattcattaacaatacgtatgtgatccccatgatacgccctattacaccaaagtttaccaggacgattcggattaggaatggtgctgatgggcttctatcgttcataactagtccggtgctgctgatgaagatacgcaagtcaaggctttgaaacgcttcagcgcctgctcctggtcatcactaaccagatttacttggagtacatgtgaaagaaaacgtcagtctgcctgtaaatttcagcaagccgtgttagatggggagcgtggaacgtcactgtacacttgtataagtaccgtttacttcatggcatgaataaatggatctgtgagatgcaaaaaaaaaaaaaaaaaaaaaaaaaacgccaaaaaaaaaaaaaaaaaaaaaacagttttcggcggcgcacttgtgaggcccccgaaagaacttgttacaaacaccattctgtgtgtgaggccgccgggagcnccacatagtgataagatacactggtggccaaacggtgtgttccccaaacgagaaactcgcgagaacacacacacgggctactagggattctacctaccacacaataatataaacacccgcccgaggagaaacaccagagcgccgtgttatagaacaaaacattcacacaaaggagagcctacgagggcgcacaacaggggagatatacaaacaagagaagctcacaccaggagggaacacagaaaatataaaaaaataagcccccccgacagaggagagtaaaacacaagagcagaacgaaaaggcacacgaagcaacacacaataaacacagacagcacacactgactacgacaaacaagacacaagcggaaagccgacagacacaagagcgacaacacacaacccaacagcaaagacgaagcaacaagaagcaaaacaacaacaccaacagacgcgacag

SEQ ID NO: 499734 - DNA, 172 bp, Homo sapiens
  misc_feature (19)..(19): n is a, c, g, or t
  misc_feature (27)..(27): n is a, c, g, or t
  misc_feature (111)..(111): n is a, c, g, or t
cacacccttcccttgcttngggggtgngcaaaagcaatacactggccactagagaggaccctagagctctagaatcccctcccaacacgcacacacacacacacacactcnctgtctcacacacacacactgagtcacacacacacacacacactaaacaagcctttaaaac

SEQ ID NO: 499735 - DNA, 723 bp, Homo sapiens
ctccctctgatgccgagccgaagctggactgtactgctgccatctctgctcactgcaacctccctgcctgattctcctgcctcagcctgctgagtgcctgcgattgcagcctcacgccgccacgcctgactggttttcgtattttttgggtggagacgggttttcgccgtgttggccgggctggtctccagctcctaaccgcgagtgatccgccagcctcggcctcccgaggtgccgggattgcagacggagtctcctccactcagtgctcaatggtgcccaggctggagtgcagtggcgtgatctcggctcgctacaacatccacctcccagcagcctgccttggcctcccaaagtgccgagattgcagcctctgcccggccgccaccccgtctgggaagtgaggagcgtctctgcctggccgcccatcgtctgggatgtgaggagcccctctgcctggctgcccagtctggaaagtgaggagcgtctctgcccagtccgccatcccatctaggaagagaggagcacctcttcccggccgccatcccatctaggaagtgaggagcgtcctctgcccgggcgcccatcgtctgagatgcagggagcacctctgccctgtcgccccatccgggatgtgaggagtgtctctgccccggccgcctactgggaagtgaggagccctctggctggccggcgcccgacgggaggagtgggggggtcccc

SEQ ID NO: 499736 - DNA, 235 bp, Homo sapiens
gcacgtacagctgaggtgagtccctcagccccacctgccctggcctacaccccagccagcgtggcggccagtgcagggccaggtgggcatcatacgaagaccttgtgccagggcatcagcgcgcagcactggcaatgagtggccttgctgggtgtggcaggcaacagcgtggatggcctcctcatgcttcttgcggtgggccgtgatctcctgcacgcacgttttgttgtctcag

SEQ ID NO: 499737 - DNA, 345 bp, Homo sapiens
cgctcgagtttactatagatcagtcatcagtctattcagtaataatacttacttgcccaggatttggctgggcgcggtggttcacgcccagcactttggaaggctgagatggatggatcacttgagtgccaggagttagagaccagcctggccagcatggtgaaaccccgtctttacaaaaaatacaaaaattggccaggcatggtggcgtgtgcctgcagtcccagctactcgagaggctgaggcaggagaatcgcatgagcctgggaggtggaggttgcagtgagctgagattgcgccactgcactccagcctgtgtgacagagtgagcaactccttctcaaa

SEQ ID NO: 499738 - DNA, 167 bp, Homo sapiens
gtatttttagtagacacagggcgtcaccgcgtaaaccaggatagtctcgatctcctgacctcgtgatccgcccgtctcggcctcccaaagtgctgggactgcaggcgtgagccaccgcgcccggccaacgtcattttcttttcaggagtcccttctgtcgtcttctc

SEQ ID NO: 499739 - DNA, 347 bp, Homo sapiens
  misc_feature (48)..(48): n is a, c, g, or t
  misc_feature (57)..(57): n is a, c, g, or t
  misc_feature (59)..(59): n is a, c, g, or t
  misc_feature (193)..(193): n is a, c, g, or t
  misc_feature (212)..(212): n is a, c, g, or t
  misc_feature (284)..(284): n is a, c, g, or t
  misc_feature (290)..(290): n is a, c, g, or t
  misc_feature (306)..(306): n is a, c, g, or t
  misc_feature (325)..(325): n is a, c, g, or t
taaacgtgttttgcttcctgttttttttctaacctttttattgtttcncttctactntnatttcacatccttttcttcttagtcaaataagttgaaaaaatatatttttatagaacatgttgctatggtgatagtttatgaaaatatactttatccctgtttaagatctttattaagatcttgctatatgatnatcctgacctggggtgctntaaaaggtaagggtataaacccacttccttcctgtagattccattggttttctaagcattttttcctgtccnaggtanttctgacaataattantggtgtagagagtgaatanatatttaaaaattgtgtgtgac

SEQ ID NO: 499740 - DNA, 334 bp, Homo sapiens
tatcgcccaacacgtaaccttcccgagcatgcatatttattttgagaattgaatgttatatggccaggtgcagtggctcacgcctgtaatcccagcactttgggaggctgagcgaggcggatcacaaggtcaagagatcgagactatcctggccaacatggtgaaaccctgtctctactaaaaatacaaaaattagctgggtatggtggcgtacacctgtagtcccagctactcaggaggctgaggcaggagaatcacttgaaccgggcgccagaggttgcagtgagccgacatcgcgccactgcactccagccaggtgacagagtgagactct

SEQ ID NO: 499741 - DNA, 372 bp, Homo sapiens
  misc_feature (119)..(119): n is a, c, g, or t
tgagtgatctagaggatcccgccgaggggtgtcccaggacagtaactcctaggagtgctgagagctgatttgtttcaggtcagctctggccttggagatgccctccctgggaatcaggncagagcagagggcatctgtgccaggagggtgtgctctccgcgtcctgctgtgggagttccctcagggaagcaccttggccaccctgacactggtgtgtgcgagccccttctggaaacagagttgcagtgccctggtgaatgcttcttcagggcataggcccctctgtctaccaggtcatgccttcctctgccacttgaagtcagcaaggacgccaaaggggaccagccttcccttcattctcctgtcacctga

SEQ ID NO: 499742 - DNA, 317 bp, Homo sapiens
  misc_feature (23)..(23): n is a, c, g, or t
tgttcaccctcccccccctttcnccaaatggggggggggggggggcgggggggggttttttttacccaggctttttttttttcccccccgtttccctggggaccccccccccccttttttttcccccctttaagaccccggggccgttcccccccccgggttttttctttggcccgggggggggttcccttttttccccgggaaccccttttgccctttgggcttttttggggccccttttaaaccggttttttccaaaaaccgggggggggccgggccgggttttccggggtttttttgccccccggggcccccca

SEQ ID NO: 499743 - DNA, 1573 bp, Homo sapiens
tggggttcacccataatttaatgagtcaaaatcgctcccctggcgccaaagtgagcagtacccaacattgtcaggggttgggagctcatatttacaaaacccgaggcgcagatagaaaaacgcagagagaaagaacaaaaaagaagacaccttgaacgcacagtggaagacttattaaattattctcagggaaagaagactagttgtgaattttttgtgtggtgtgtgaagtcgccctccgcagaggcgcttagtgtgtctgtgacacactctctcccagagagtgtgacacagaagtgagagtgtgtgacacacacctctttgtgtgacacaagtgagagaccactctcgagtgtgtgtatactcccaaagaaggtgtgtgtctcacctactcgagctctcacagacactcccatcacagccgcagtgtgacactctgagagacactctctctgtgtgggcctgtgtgtgagtgtgtctctctctgagtgtgtctcacaccgagagcaaacagacacatcaacatatatctcgcagcgtgagacaatatctcatacacaaactatatattcttacacgctcctccttatacacagagagagcagcactgctgggagaataaatactcccccagcaggtgtgctcacacaacaacaccgacactactctccctcaagaaaagactgtgttgtccaccacgcagtgtctataaaggagggaagcgcacccagcccgcagagggcacacccaaaaaaaacacgggtgttttctccccaaagaagacaccgcatgtcgagagtggtgggggccccccaggcgggagacttcttgttgagagctctcactctcctcactcttcccaaggtgtgacacagttgtcgccggtgttgtgggacgcttcctgtggtgtcgccccccaaagcccctcttctgttatatcaacagttgagaagtgttctcccccacaattcttaccagacgagcatgatgtaagtcttccaatattacagaagaagaagaaactaccaaggtgggcggttggtttctaccccccccccaactattgctggtgaaacagacaaccaaaaacccccccccacaatggtggtgcaccaaaattgtgtgacaacgagtagtgccccccaaataaaaggtcccccaagtcgcgcggtggcgcacccacgtgtacacccccaacaataagtcccccgggtgataggaaaacctctctccccgggaagagaattaaccgcggggaccaaatttccttctgccccctgtgtgcaccctgttgttaggttgcccccccctcttgtgaaaaggaaacaaaccccccggcgtgagggggccgcccctcttttggcgacccaacttaatatctcccctcgttgtgtgaccccctctaccgaccggcaagggagcatcattttcccctctcgcgcgcgtgttgatactgggcccccgacgccgccctatgtcgtgagtgagggcgcgccccctcccggggggggggtctacaccactcgtgtggtagcgcggcagagcaatcctcccgcgcatcaggtccccgtag

SEQ ID NO: 499744 - DNA, 238 bp, Homo sapiens
tatcagccacatgacatagtgaggttagcacatgatgtagggcgccaagatatggctagcagcgacgtccacaggtgtatagatagggttgaggtcagagctctgcgcagtcagtcaagtatcttccacaccgatctcaacaaaccatatatgtatggacctcgcttagtgcacaggggcatatgtcacgctggaacaggaaaaggccttcccgcaactggtacggcggggatattgc

SEQ ID NO: 499745 - DNA, 1324 bp, Homo sapiens
agcggagggctcgtcccaggagtggggggttgcttccgggtcgctgctccgcggaaacaggaatgttgcccatcctacctctgccctggtgaggtcacgtggtccccagaggctggagagagatgccctgatggggcgctgctgagcgcctctgaatgggattgttgatatttggaagacaatcggatcttgcttagccaagcgcagatcagcccttgatcgacaaacgttacgagacgacttgtgagattggcgtgaccgacagaaccgggacaattcagtggtgcgcagtggtcgacgacggacatggcaaactgtgaaaaatattttactcgagggcacgactgcgtggaggagacacagggacagtggagatgttcaatgagaaacctccgcccgcacgttaaagtcattcgctgcgtgccttgactagcattcgccaggtaattacagggggtttgcgtacggcagaaaccgcgtaggagggcagtttaaacctagtttgggttccaatcttgtcccaataacactgttcggtatggacatatagcaatcgcatcttgtccaagaggcacaaatgtggaagtcaacccgtttgaaggacccaagacggcctactggccatggtgaaagacattgcaataacccgtgggcccgtcctttcctaacatttcgattggcccagatcccaacatttactaaacgcgacgtggacattgatcccccgttttggccaccccaagttaggcggcaataagcaaacaagattagccaatttggctcacaaggcacgagtcacttcgacacgtggccaggtatctcccatcactgggacacttaggtgcgcgtagtttgcaactggacagcgaaccaaggacccgccctctatccccacgaacgattttttggagaccccgcatttgggtggggatgcaaaatagccagaattatttgttggcacagcacggaacatgtggcaaggtccacagcacgccccccaattgccggcttggtcacgacactgttcggaaaaccctagtggcccttgggtaggatcccctaaggaaatctagacacacccatggacaagagagcgtggaacggactatccctttggggcacagcgacacggaccgccagaccggggacacaagtacacgcaagtacagaggcgacagcacagcacacgacacggccctgcgaaccccgacagcaactggcgagaaactagcccccagggaatcaggccacgcgacacgaccaacaagacaaccaagcaacacaggcccccccaaacacaccccggtcaagcgccgccaccacc

SEQ ID NO: 499746 - DNA, 345 bp, Homo sapiens
  misc_feature (4)..(4): n is a, c, g, or t
  misc_feature (67)..(67): n is a, c, g, or t
  misc_feature (69)..(70): n is a, c, g, or t
  misc_feature (111)..(111): n is a, c, g, or t
  misc_feature (113)..(113): n is a, c, g, or t
  misc_feature (116)..(116): n is a, c, g, or t
  misc_feature (126)..(126): n is a, c, g, or t
  misc_feature (131)..(131): n is a, c, g, or t
  misc_feature (139)..(139): n is a, c, g, or t
  misc_feature (148)..(148): n is a, c, g, or t
  misc_feature (155)..(155): n is a, c, g, or t
  misc_feature (157)..(157): n is a, c, g, or t
  misc_feature (159)..(159): n is a, c, g, or t
  misc_feature (168)..(168): n is a, c, g, or t
  misc_feature (173)..(173): n is a, c, g, or t
  misc_feature (183)..(183): n is a, c, g, or t
  misc_feature (192)..(193): n is a, c, g, or t
  misc_feature (199)..(199): n is a, c, g, or t
  misc_feature (202)..(202): n is a, c, g, or t
  misc_feature (206)..(207): n is a, c, g, or t
  misc_feature (257)..(257): n is a, c, g, or t
  misc_feature (339)..(339): n is a, c, g, or t
gtcnagcataaccttaaaatagtttgctcttttttattcctcaagaaaaattagggcaaggttaaanannccgaatttttctgatcttgttcattaaaaatgaaaaatcancnatnttggttggantttanaaaacgcnttaatttcntttcttntnanctttcatanttttnagtatttcantccaaagcnncatttntcnatgnngtcaactttttctattgtgaattaaaaatatatccaactcttattttgcnacttatttatgaatatcgaacttcaataaaaatattcattattgtgctttggtcttggcattgggggaaggggtaatttttnttttaa

SEQ ID NO: 499747 - DNA, 192 bp, Homo sapiens
ctggcccgtatgtatccctaacactgaaaataggatgaaagccctgtttactgcaattccttttacccagtgtatcatgtctacctatcaacagaaaattacaaagcatacttaaaaggcagaaaatgcagttggaagagactgaacaagcattaaaaccagagtcagtcgtggcaggagtgttgggcgata

SEQ ID NO: 499748 - DNA, 186 bp, Homo sapiens
cacaataggaccaatctatcaacacatatagaagaacaaaagaaagatatcaagtacacatgacaacatacacctccgcataagcctgcgtcagattcaaacactgaactgacaatacccagcccaatatctacaatcaaccaacacgtcctaattaccctccatctgatgctgtccggggatcct

SEQ ID NO: 499749 - DNA, 205 bp, Homo sapiens
cgtaaaatctctatgctcatggtgtgcggaacttcacgatctagctgactgcctaccacacggctgggaaacttgttagcgttgatatgctgaactgactgtaaagtgtcatagtcaatattcaagtgtgaatagcagggctttagtgttagtactgtcttatgtccctgtttctttttttctcccagaagcgtttcacttccga

SEQ ID NO: 499750 - DNA, 1187 bp, Homo sapiens
  misc_feature (383)..(383): n is a, c, g, or t
gggcggtcgggccgttgcgtgtgtgtcggtccctgggatcccgacgctcgagtccgtgcatactagaccgatctgtgccgagtagtcctgaccgatgagtcgctcggattctagcctgtgggcctatcgcacgttcctgggggcgatcgcctcggcaggacgggcctaggcatctatggtccggcgtgagctggcgacagcgcgccttcgcgcgcatcgtgcgcccacgcgctgcctgggcgcctgtgctcccttccttcatccattcctcgagctgtagtgagacccagagcgttcccaggcgaacgcacatagtgccttaggagacgtagtatacttgcgagaaccggggtctgcacttcggcgcgtagtaatactaaagngaggtatgcacatggcatgggtacaggcggctgaaccatactttcactcggggtgcccggggctgtcactccatggcagcgcagaaggggaccgcctcagaggggctcccggcagcgtcttgcgtggtaagaagcttgtgggctccttgctgtgtgcgacacccacattgaacccggtactgcccgtcgatatatgggcaatcgggcacttagaccaagaaacaagactaccattaaagtgggtaggctcatcgattcgacacttgacaccctgttgtcgcggaaaaggtggttggggcaccggtgagggccaactataaggtagagcatacgaaaaaccccatacattgggccttcgtcacgcacaccttgcaagatggcaacgcaagtagagaggttccccttggtggaatttagcacaggcaatccctcgccaaaggggttgtggcaaataagagccacgaacggtgacaagatcgtttagccttcagcttggaatgaactgaacaagttcgcacttggccgcagaatccccaaaggtgtgggccgctgacatttctatcggtcgaagtttgtcccaataaacagtttgacaggaaaccggtgggaaccacccagaaaggagtagtcccccccgaccgagatggccataggggatagatatgctcaggatatatcccataaaccaggtgagacactactggaaggctacaacggacaccaagggaaggggtcacagagatataggggatacatgtcggcggttgtgtacccctttgatatatggaggaggccgatagggaa

SEQ ID NO: 499751 - DNA, 186 bp, Homo sapiens
cgcgtcgtgatgctggtacaaggttgtgggactgcatgctactgtctacagcttgtctcaagtggatctagcaacttcatctgccctctagatcgccgatcacctctagagcacccaccttgctcattcactaaatagccccatgagccccctaggagccacacccaggagccttcacccaggagt

SEQ ID NO: 499752 - DNA, 729 bp, Homo sapiens
gagcagttcagtcgatttcctcgtttaccccggccccctttctcttgctcgccccgaacccctctcatctgcctggtggaggatgaagcggtgcagtgagcccagactcagcagcggcaccggcggtggcgtgcgaagtgggtggccggaactggggaggtgaagaagcggaggtaaggacggctgaatggagcggatagcagactcagacctactttccctgtgacttccttatacctcttatagatgcagacgaggaaagttatactgacttctgtacgatgtgttatagtagtgcgtgagatgtgggtggttgtagcgcgtgagtgtttagtggttgtggcgttttgtagcaaggcgtctgggtatgataatgcaccgagcttgagcattccgcgataacctcagtgccaagcctggctgtgagccttggagctagtggacccataggagagcggtggcgcagagcagagcagagagctactctcacttacatgttagtctgtatacactcaggccatagggagtgaaagccttgaaaggtggcgaaggaccagcggatcatgggaatgagacgagcatagaaatccggagaagacacacagggggcacattgaagtagagacccacatgagggagcataccacagaagactgtggacaaaggagataaagggacacaagataagacacagggacattaaaaacgaatgatatggcaggccctgag

SEQ ID NO: 499753 - DNA, 668 bp, Homo sapiens
  misc_feature (581)..(581): n is a, c, g, or t
  misc_feature (591)..(591): n is a, c, g, or t
  misc_feature (593)..(595): n is a, c, g, or t
  misc_feature (599)..(601): n is a, c, g, or t
gggcaggcacaggaaggcaacggcagctgtggcagacggtgttgaatcgccaacatataaccgatggaggccgcgaccagcagtgggatcaccgaactgatctgtttatgcaaccccgccaggaaactcaccacttggggatcgaaccccagcgccagggcgcattcggacagaatcaggaagccggcggacaccaacaggcacggcagaatccacagcagcccctcacgaatcgcacgcagcgactccgtgctggccaggaccgccaggcgctgggtcaggaaaagtttgaacagggtgtgcgccatgggccgtcctctgcctgtcaccgactgccgctgaagatcagcggccggaaacaccgctaacgctacacgccctgatagccgaagcgaaagcctttatccccgccccagcccggctttttaccagtgaatgcctggctgctagactaaatccctacagatttatcgaactttctgacttgaatcatcccctaaggctgtctgagtcggtatcatccgcacggtttgtgcgtgttaaacgatgttacaacctgtctgataatgggtacgcactanggatcttgcntnnnacgnnnacaggccaaaggagagaacctcactatgcaagacaagcgctcaagtaacatgcgtcctctattcgtc

SEQ ID NO: 499754 - DNA, 263 bp, Homo sapiens
  misc_feature (55)..(55): n is a, c, g, or t
  misc_feature (116)..(116): n is a, c, g, or t
cactctgaggaccccatgattcacgtggtgatcttccgccgcacctggctgattntcaaagtcgtttgagatgaaaacaggctacgatgggcagtttcttcatagtgagctgcttngtggactcctggtagctattgcaaccgctgcacttaatcttggcgctgctgcccacgtgctctggtctggtgaatcgtcgcatgcagtccgtgagcgtggtggttcccgacacgtggctttccccgtttaccacgttgaaatccata

SEQ ID NO: 499755 - DNA, 308 bp, Homo sapiens
tgttaaaactagggggataggggtataatgcgccgtcacagtcattctcaggcccgccgccaaaacagatagcctgccccttccttgtactgatccctgatgcggcgtacttatacgcacgctccatcggcctacgacaaacagacctaaaatcgctcatggcacactcttcaatcagccacatagccctcgtagtaacagccattctcatccaaaccccctgaagcttcaccggcgcagtcattctcataatcgcccacggacttacatcctcattactattctgctattgaacttctaaaactagg

SEQ ID NO: 499756 - DNA, 236 bp, Homo sapiens
caacgatgtcctcagctctacaaaacataataaactagccggctaggtgcggtagcttacctgtgatcccagcactttgggatggccgaggtgggtggattatgaggtcaggagatggagaccatcctggccaacatggtgaaattctgtctctaccagaaatacaaaaattagctgtgtgtggtggcgtgtgcctgtagtcccagctacttgggaagctgaggaccatcgttgac

SEQ ID NO: 499757 - DNA, 101 bp, Homo sapiens
cgccaacgcaggaccaaggagaaacacatacatacagctcacatgactcagctgaggtccgtacccgtgcgccaatcatcagagaccctcctctgtgctgt

SEQ ID NO: 499758 - DNA, 236 bp, Homo sapiens
gaaggggtgatgcggtatggaggctccatgttgtgaatcggcgccgttcgtgcttgttagcggggaatccgggtagccgcggggtgagcgtgtcggggagcctgggccctaagtgaagatggaggcccgctgtggcctgccgcggacatcctgagtgcggatggcggcagcaggactacgaactcgtccagagggtcggcagtgtgacctagggggacgtctatgagggcagaaat

SEQ ID NO: 499759 - DNA, 417 bp, Homo sapiens
  misc_feature (273)..(273): n is a, c, g, or t
agcgggtcgctgccgctgccgctgccgccgtcgttgttgttgtgctcggtgcgctgagccgcggctccgcgagccggttccgtccccttcccgccgccgccatgaagtgcgatgttcaaggaggaccactcgctggaacacagattgcgtggagtccgcgaagattcgagcgaaatatcccgacagggttccggtgatcgtggaacaggtctcacggcctcctccagaatcgttgaccattgacaaacggaagtactggtccatctgatattncactcgtggcctcagttcatgtggatcatcaggaaaacggatccaagcccttttccctttcctgacaacagggcgatcttcctgtttgtggataagacagtcccacagtccaggcccctttaaaacccgttaacttgcgggcag

SEQ ID NO: 499760 - DNA, 627 bp, Homo sapiens
  misc_feature (189)..(189): n is a, c, g, or t
aaaagaaagtaaataaaaatgcttctggtctcttgaatcttcattgggcctatactagaataagtcttgacagcaaggacttccaagcttcttcctgtatctcccatcctctagtcacttcagtgttttatcaaacaagctacgtgtaggctttccacaaagtcaggttatgtcagaggtagcgttagnacgcaatatgcttgatcatagtatgtagtgagttcaaatgaacacatcattatctaagcgtattacaatagttaaaggtgcgaaaagaacatgtactgccttcactgctatgcgctaagaaaaattctgagaaactgagaacattcattggaagccagacaacaggcaattaattgcctcatcttccatgagctcctttaatgcaccagttcaggctggttttcctcgaagggtagcaccccactcacataataagcaatgccaataggcatcaaagcaatgacgaagatcggcagcaatactctccagaagcccagatcctccacaaactcctgcttatctgttgccatctcatcatccttgggtgcagggtctgggatgcgtatgtccagtggggcccgaaggtaagtcaagtcagccacattgagggagtcctct

SEQ ID NO: 499761 - DNA, 904 bp, Homo sapiens
cgtctctgccttggggagtcgcgaggcggtgtctcggctggagggccggtggcaaggatgctcatgattatggctggggcagtgctatgacgacgatatatctcgtgggtggctgtggcttgactaggtgtagaacacgggaacgtattgtacaaaaggagggaggaacgaaccattgatctcgaggtcagtgtccaggaaaggctcgaatcgtattacaacagaacgatactgatgcattggaagacgatcataggactgtgcgggacagaagagtgtagagcacgagtagatagactgaacatcactgtgcaaagtatagatggagagtgaaatagacaggtcattgagagtgagtcacacttgcatggagagtatagatggcacaaaggtcactgtagtgaaaagaggaccagtgacttcggtgtgtagcagagtgctaaggatggtggagtggaggacaaagaggcaaaagaggttaatctcttggatgacgagggagggactgttctctcatgtacttctttgcagtcgagtcttagtggaagatatatgaccaagtaggagaattatagggcatactggagataattttgatccaggaggaagtgtgttgaagtggatgggcatagaggagtatgtccaagaaaacggtgattctgatacgatgaagtgcagtcaggataggctaaagtggggagggcatctcggtaggcctgatgttaatggtagatttgagcgtatgaatttttaatgctggatattttgaattttgcgcataataggccttgacttgtaggaggagttgcctgatagtgcctggtggtccaatatttggtactttgttaccctgtggcttgtaaggggtgtcagatggttctacttgtaaatcggataatcattg

SEQ ID NO: 499762 - DNA, 118 bp, Homo sapiens
cagtgtcatttggagagatactggcttggctgagggtgctgcttcttcctttgccaggtcatgcgaggggctgctgccaccccatgcacatccccttcgccctccatgtcagatgcgt

SEQ ID NO: 499763 - DNA, 309 bp, Homo sapiens
ggaaggtaaccactacttgatgccgaactgagtgcggacacccgatcggcatagcgcactacagcccagaactcctggactcaagcgatcctccagcctcagcctcccgagtagctgggactacaggcactcgccaccatagcctggctaaattttttatatttatacgaagagatgggctgtgttagccagatggtctcgatcttctgacctcatgatccgcctgcctcggcttcctaaagtgctgggattacaggcgtgagccgccgcacccagcttcctctctctaataattctatgagtagatct

SEQ ID NO: 499764 - DNA, 227 bp, Homo sapiens
ggtgtttacaactaattgatcacaacctcaaggacccaggaaccccggcctgcgcggaacgtgctcagtggggccatctccgagacttatagcaagatgacggcagaggaaatggccagtgatgaactgaggaagttgaggaatgccatgacccaggaggccatccgtgagcaccatatggccaagatggcgacaccaccactgactttccaagtgcagcaattaca

SEQ ID NO: 499765 - DNA, 453 bp, Homo sapiens
ggctgagtcgtgccgtctgtctcaacccacaggatgtctgtagtcggtcggtgtgacatgtgggaccaagtccccaggcatcttctccgtgtgtgtgtgtgtgtgtgtgtgtgtgtgtgtgtgtgtgtgtgtgtgtccgcgagtgaggctctctcaagcctcatggtctcagagctctctaacttgactctatctctctgtgtgtctacataccaactccttccaagagtgagagtgtgttggaccaccatgattcctctctctatttactctccctccccttctatgtggtgtgcacttaacgatgaacacctcctctccccgacttggctcagctcccatgaatctgcgacacagatgaagcgagtgtctacagcacaggacccctggaggacaagattggcatagcatacgctgtaccacgtcccacaacactgatcactagttctcaaa

SEQ ID NO: 499766 - DNA, 106 bp, Homo sapiens
gcccatgtcaactagatatctatccgtcactctgcacgtaggacgcctagcgcttcatgcgttgacccagtccttgaaacttttggataagcagtgcacggctccc

SEQ ID NO: 499767 - DNA, 200 bp, Homo sapiens
caaagaataaataatttttctattcctgaaagttaactaattatttattagaaagtcagaaatatgtggaaagcaaaggaatatttgagaaagtgatatgaaattaataagtggtaaaaaattaataaaattaatattagagtttcctttgagctaatcctttatttatttatttttttccttgagacaatgtcttgcca

SEQ ID NO: 499768 - DNA, 1174 bp, Homo sapiens
gccgaggaactgacgactattctcagacaatcagactgtcgacattccacgaacacatgtcgacattactctgaagggagccgcacagtcctcgtgaagggcgccaggaggaaccctgcgcgcagggacttccattcatcgaatcaactgtagaactcagccttctgtgtgatatgacaactaaaggcaggctccgggttgacaaatggtggggtcaacagaaaggcaactggctaccgttcggactatttgtcagtcatgtacgagaacatgatcaagggtgttacattgggcctacccgtcttacaagatgagggtctggatgtatgctcatttcccccatctacatcgttgttatccaggcagaatgggtctctctgttgacaatcgcgacaatcctctatgggtgagaacaaatatcatccagcacgggttcggatgagacctaaggtcgttgcattgcttcagctactcgtctacagacccaagagacagtactgaaattcaatcctatggaacggtaaatcgaccagttgaggctttggtttatcaaaattcagacggactcttgatatcagacgatagaccacctaaaacagttaataacatcacaggtatcatcatgtgacacatcctcaggatcaggcatctaatgtcttctgaacacatatggacactgtctcagcaaggctcgcatcgagataaagatctagagaagttaccatggctagcagcaaagaaagatagccaagatgacactttaaggacctaattgtgagatctccccttgactgccatttacagagaagcgtattggactttggaaccataataaggactttcgaaccatccgaaatatctccgggaagtccccttgtcgggccctagtgcacaacgaggggcgaagaacacggggccccttggttactaagcgaaggtccccttgaacccagtatttattctgttgaccaaaggagggggacaaatatctggaggggggtccccccccattgaagactcacgaacaaaaatttcgatgtaagccagggacacccacttctaaactgaacccggggaacacaagggaacttcagaagagagtaaacccccgaatgccggtagaaccaaatactacacgtccctgtgagcaaacaattctcgacaaagaacaccg

SEQ ID NO: 499769 - DNA, 246 bp, Homo sapiens
aacttgctacagcagctatggtttattctttttttttttcttttacacatgttcctggggctcatggaatttactagtttattataaaggatattacaaaggatacaggggaagagatgtgtagggcaaggtatgggggagggacgcagagcttccatgtgctccccaggcgctccaccctccaggagcctccacatgctcatccatccagaagctcccggaaccccacccttctgtcgtcttctc

SEQ ID NO: 499770 - DNA, 117 bp, Homo sapiens
ctgcgcgtggatgcattcggcgcggaatgattccgcgcgcatgcattctgcgagtgaacaggaagagccagcgccggaatgcctctcagtatgccaccctggatgccgccccgaatg

SEQ ID NO: 499771 - DNA, 176 bp, Homo sapiens
taaaagatataacaggcctagctctttgtacagcggatgctcgtaaagagggggcgagcggtagaaccttgggtccttttcgccgtagtcccaggacggaaagatcggccgcgccagccagggtcacgatgtgcatcttctctcgcaaaggtgggctgatccgctatgcgtcgggt

SEQ ID NO: 499772 - DNA, 105 bp, Homo sapiens
tgagatcacgccattgtactccagcctgggagacagagcgaggtcccgtctctaaataaataaataaagcttacgcagatagttggggcctcctgagtagctggg

SEQ ID NO: 499773 - DNA, 909 bp, Homo sapiens
  misc_feature (888)..(888): n is a, c, g, or t
gtcattcatatttgtctttgaatcaaaaaaaaaaaaaaaggtctattgccagaattaggaatgcatgtatatgttaaccatttagaaagctggggattggctttaaaaggagttttgtcttattttaacaagtgggcatgcttatttggattaatcatagtctttctactccagcatcactggggtatcaaagaatcaatagaggacaccagaaatcttggtcaaaataagacaactgtgggtaatcataaactggtataggagtactatataaaataatttctcccataacctggccgaccaggtggacaaacaactttggcctataattatattatattttatatatttattaagagaaacaaagaaatattttatacagacacaattctaaatttgtgggctatttatattgtgcaaacacaagaggagctatttgaggggactctataaagtgtgtgttggccccacaatatgagagggtgttgtacaacaattctctatcaatatatatctgtgacacaagtgtgttatatataatactcacaaatatatatgtggggtgtcatcacacctaatgtctatattcactatactaaacataaaatattatataacatgtagtgtgaggagggcgaggtatgtagtatactaataatcacaaactaatattaacaaatccacagcgctgatggaatattaaataaaataataatccagtgagggatatattatatcaaaccgaccggaggggaccaaaaatgttgtggggagagaatataataagaacacaaccatatattaaataacccgacccgaatgtggaggggatgatattaatacataaggatggcagtagtgagccgcatgaggttttgggcgtataanaaaaaaataatctaaaaacaa

SEQ ID NO: 499774 - DNA, 1032 bp, Homo sapiens
cgctgcagaatctaatcgtacgagacattggcaagcaggagaaagggatgtttctgatcaagcgcagcccctacctgagaatgtacgaggtgcacacagctatcccgggaatgaccggagcacctggatccgggtcattcagctcagagcgtgcgcacagtgcccatccagggaggacttccccctgattgatgacagaggatgaggcttacctgcggtcgaattaagatggagttgcagtccgttaggaccgggctactggctggagctgctgctgagtagaaggtccgggctgtttgctgagatgaccctatttccatggctcgatcgcatgcgcatggtttgcgcagtgggcatggccctgcccaccctgcccagggccttttccggtctgcacgtcccttgagtcccctcgtggcgagcggctggctggaggatgccatctcgtgaggtggagggtctgaaagacactgcgtggtgggggccagtgagtggtagacgtgcttctttgacacccctgagtagtccagccctgtcgccttggaaccctggaccgtcggtgttactcgacgagtcctggcggtcacctgtcgacctgggtgacggccagaaccgttcagtggctccattgaacttctgcatagctgactcagactctagccaagagggatggaatgtggacatcaggcgtgcgatcaccgccagaggagtgtgttcacgcgatgggtccactctctatgggacgttctacagtgggctactggcggctgtgggccagtggacactctgttggtaagccgttgcctgagggcctgacggcggagaagttgtgccgggttcatctcgggtgggaccttggagggtgtggttgcctgttggcctggttaaccgggggcggcctggctctctgggcgatgcgtcggtgcgaggttggccccgttgttgtggacggccatggctgtcgcgcgtattagctgttttggagcgtcgtgtgtaccccgccgcttttgccgggtgtccggggtcgctcgg

SEQ ID NO: 499775 - DNA, 147 bp, Homo sapiens
tgctagaggatcccacccattcccccacagtgacgataaagcagacacaagacgggctcggagagactctatattccctcttatccgaaacataactggttttgtatagtagctctgagtccttagtttttcatgtcattgtcctag

SEQ ID NO: 499776 - DNA, 1476 bp, Homo sapiens
  misc_feature (977)..(977): n is a, c, g, or t
  misc_feature (1476)..(1476): n is a, c, g, or t
ggctcgtcaagtcctcgggcggtcagatggggggtgcgcggtcaccacgtcgggcttcgccttgcagtatccagaaagagtggttatttatctgtatcgaggatcgcgaatctactcgcgtgggaccgccgcccatgcattgcttcgatacctgcatacgaactttgcacaggctgttccaagactatcgtcaagactctatgatgtcaattaacaagaggctatatactccacggcaagtcgacagagtcgcatcgtgcagaagcgtatagagctgggaacgcagacggccgagtttcccgagcagaaagtcgagtgcatggccatacacagtcaggcctgtacacgtcgtgcagtcacctctccactgcgtgtgacactcgtgaatggacacccgtgtggcgagacttgcagacaccgtactcacacatgtagccctggtcgagacaagcctacctggcaactgtgcccaccccgagtctgcagtcggcgactgacatacatgcagatttgaataacacaactcgaatagccccgtagacgtcgtaccaccaagccctacggagctctgtcatcacaactggaaaccttcgcactttgggcactcaactccactgctacctggacgccttaccacgcacaatcgccttcaagggtcagtacgtcacacaacgaaatgcatcacgagccacaatacgcactccaattcatttaggtcccggacgtctcgcggcttctttcggccccgtgctcccacacgcgggaccaaaccaagctctgtgtcacacggcaatcgaacacggacttggaggtggaccaaagcccgacccttcaagccacacgcaatggggaacttgattgcctgaaccccattgggcggcaaggcaaaatggctcttcccgtgtctataaccaacataccttcactgcactgtcgtagcaccccaacttactcacgctaattaccataagtgtatnttaccgaattttctaccgacgcttcacactcggctcccgccttctgggcacgaactttaccctgtaagggcatggaacctatggcctattacacaccgctcttactgtggcgcgccaacatcactacactccaggccggcgtggaacaggtagggctccactagccttggcaccatcctgtgtatcaacacggggcggcgatcgtttcagcaccccaccgaaagccacctctcgtgtctcctctccaagggcccccatatttctggccccccacgttgcggtaaggctacgttaaacacaccttatacttccagccgcatcttgacttttacggcggtgtcgatctcgcgttacaccgtagcgtttgcgtagcagactcttcgtccacacgctctggccttatacaaccatccccctttgatcgccagagcttaacgaccagtgcgtcacccccactcccagctcgtccgcagcactctccacacggctcgcacagccn

SEQ ID NO: 499777 - DNA, 250 bp, Homo sapiens
taccaatgatttaatagatactgtatgtaaagataatttccaaagataatttttttaaatagaagagctttaaataatattatactatcagaaagcatgctttcaaaaactatttccattgcatatgtaagagtttgattatgtctattaatgatgactcttaattcataaacctgtcacacacatctattaccttttaactggtgagaaatatacatatatattaaatatataaacatttatataacat

SEQ ID NO: 499778 - DNA, 368 bp, Homo sapiens
  misc_feature (36)..(36): n is a, c, g, or t
  misc_feature (38)..(38): n is a, c, g, or t
tcggtctctatgaacctgacggtgcaactgcacagnanctagtggcgaaaggggggcccaaaagggggatggttcccaggctcagaatctggagtcccggacaataattcggggcaagaggacccgcaagtggatacaggcagaaccagtggtggacgaggagagaggagaagcctcaggccccatgggtggggttttcttggcctgggtaggagatcaaactcctgcctggaagacagtgaaagacaaacccaggactcagggtgaccaatggctagtgggtcaggctgtcactacagattaataacttgaatgttgaagagaacagcagtgggggatcagaggcgggccccactgggctggcaggg

SEQ ID NO: 499779 - DNA, 233 bp, Homo sapiens
  misc_feature (83)..(83): n is a, c, g, or t
  misc_feature (147)..(147): n is a, c, g, or t
  misc_feature (191)..(191): n is a, c, g, or t
  misc_feature (194)..(194): n is a, c, g, or t
  misc_feature (198)..(198): n is a, c, g, or t
  misc_feature (200)..(201): n is a, c, g, or t
ttgccttgggcttttctaacctatttaccttcaggcttaaccactctcttccctttccccaacatcactccccaagggaaaangccaattttttccacccataatcctttctggcccacccctaattccctctggctgcaggccaangcttgttatcaggctttgcaggggccatggttcacattagggtnaangatngnnattgggggggggggggggggggaaaggggcgg

SEQ ID NO: 499780 - DNA, 115 bp, Homo sapiens
aacgggtgatgcggttgctgagtgagaaggacgtggaccccgtacgcaccacgtccaatgacattgtggagatcttcacggtgctgggcattgaagccgtgcggaaggccctgga

SEQ ID NO: 499781 - DNA, 429 bp, Homo sapiens
cttttttggaaactccagaggaaatgaatctcaatctctctctctctttctttctctctctctctctttctccctttccccgcttttgctgatgactcgtctcagtaatgctgagcataatttgtgtactggcctgtggcagaaaaagcccaggactggcaggaggagaccagactgggggctgaccaaactggatgtgtgtgacagcgggcaagccacgtgtcttccctgaggctcaatttccccactaagatgagaagattggagacaatgatgtctaagtaatcgcacatggtgtccagtattatgtgtgttttgctaactttgtctctttaaagttctcattttctactactgtgaaattttcttattttaattatccttcttgttagtattgagctattacccatcttttaaattgtcttttta

SEQ ID NO: 499782 - DNA, 233 bp, Homo sapiens
ctagaggatcctccggaagccttaaccctccttccccaaacagggctctaaatcatggtcctcaagcacactgagccattcacgtaccccaagtaggctggggctgctcatgggctggtctgggcttatgcacacactgtggctttctaaccataaacgcttctctgtcagtgtagtatggaaattaaaacacgttctctttctctggctctggcctggacagctcctggtta

SEQ ID NO: 499783 - DNA, 541 bp, Homo sapiens
  misc_feature (128)..(128): n is a, c, g, or t
cccaagaataaaggtggtgaatgttgagctgcctattgaagcccaacttggtctggcagttcagggcacaagaccttcgttaaccatgtcatcattgcagcacagcagggtcaagcatgcataatgcnaagcatcaacattggcacaacaagcaacaggcaatgcatgactaaaacatgccagttgcaggaatcatgtgtatgacgttcagacgacaacgctgtgtggaccatatgaaaacatttatactgtgagcaggatcatcaacaattttttgacgactccttcacagaaaactgaacgactgagctgtatgaagcaacggagaggaccaagcataaacaagcactcatgttgacacagttggacagaattaatgcaaaattggcactccagttcaaagttcggtttcaggaagctgaagaacggccaaaaatgtttgaagaactaggacagaggctgcagcattatgccaagatagcagctgacttcagaaatcaaggatgagaaatacaaccatattgatgagtctgaaatgaaa

SEQ ID NO: 499784 - DNA, 257 bp, Homo sapiens
atttgtctccatgctgttgcacatgctgcttcctttacttgttctccaccagggatgattttgcttcccccacccttgcagggtatgtggcatgtctagggactggttgtccacaactggaagggtgctactggcatcaaattggtaaaagacagggttataccaaacctttccatgaatacccggaaaggcctcaccccaaagaattttttagtcccaacattccctgttccaaggttaaaaaacctgaaccggaa

SEQ ID NO: 499785 - DNA, 455 bp, Homo sapiens
  misc_feature (11)..(11): n is a, c, g, or t
  misc_feature (62)..(62): n is a, c, g, or t
  misc_feature (231)..(231): n is a, c, g, or t
  misc_feature (249)..(249): n is a, c, g, or t
ccaccccaacnaaggtaccgttggaaaacggcaggtgccatccaggcctgtaagatgtgaanggaaattaaaaaaatattttaaccccccaaaatacatttcctttgaacataattttgaagaatgtcctgttccagaaaagcccagcctgccagaaagtagcccctgccaaagttgtcctttccgttggggaagatttgccatctgtagggaatctgcattgatgccagnccaagtcctttcccttgncccagatcctaggaaagattaactgagagtctgacagctgtaaaggtctgaaagaaactttcagagcttattctttctgagagctgctgcctgtaaggtttcatttacatattaagatcacctttgctagccaggcctcctcttctctccctcccataacctgtcttgcccacaataaatggatatacctctgactctaaaaaaaa

SEQ ID NO: 499786 - DNA, 119 bp, Homo sapiens
gaatacagcttcttccgcttctatgtgagggcgtaccaggccacggagagcaggaggaaccaggtagtcaggaacatggcccaggtggggctacaccactgcggggtgcaaaggtaaga

SEQ ID NO: 499787 - DNA, 1539 bp, Homo sapiens
gaaactaaatagctggcgtcctaccacttgcacaagtgcatggtgagccaaggccactgatttcagtgaacccggtatgacgtaattaaatcactcttaccctttctctaattacctcaacttttacccattatccaactcgtactcttgatatgatacaacactgacaacatgggcatctaggataactcaactcaatcatgttttagtcactacttactctacgaagataggctaatatcattgatggccacaaaccttctgggacgttagtgcactgctatcgcgcagtattagcacgcgcgcactttctagtctctgacaatcggtctcttggaagctgactagtgccctcgatacactattcgctagtctccataacatactctcttagattacagacgtacacacttgtctcgacattagctccattcagactgtctggaatttatacattctacggactacaaaggcactcaacttgtacttcattctacaacagcagtaatctattctacgctcatctctttcatggtggatgataagcaaacttatgttagtaattgcctgtggtagccgtagaagagtgggttgatataattggaccattagggcatttgggcaaacaaaattaaggctgtgtgactaaaggtaaacagtgtaatcaacgcaatctaaggaacgagaaattcccaatttcttagtgagcgttcacttctactatgctcgctagtgataacgtaacggcgcgctttcaatttcaaacttgtgtgtgtggcaaaccaagtatttccttcatgtctcgtccaagttaaccatactgaggacaataatcttaaagtccgggggaaatatgagattagttataattattcgttccctacttagggacatcgaatatttcattctataccaacgccacacatgggagccaataattggcacatgaggcacgcctaattcccccttctttctcttggtgtttggcttaacttccccctatccaattgtattgcgccacgcccattatatttataaccaattcggttatactcgaattaggtagaccaataagcggtataaatagaggtaggtaattatttctggagttgggcggacaactccttggagcttggtttctctatccataggttcagaagagtccaagaacacctaaggcacctccgtgcggtctaaataatttaaccgaagtgcgcgaataatgcaatgccttttcccgagcatgaccggcctctgaaagagttaattcatcccggggtcgcggagaaccaaggtctctgctatttaaacgtctggcgcccccacggtggacgttcttatcatctacctcttgcgaggtttaccttattttcctggcgctcagtgggacaaattctaccagattggtacactcgaagaagggtcctatctctttcacccggaacggtcaatttagcctatattccacaagcaacggggagagacgacctgttcaaaatgtccttggatttgcgagcttacaaataagttcttgggaac

SEQ ID NO: 499788 - DNA, 795 bp, Homo sapiens
  misc_feature (596)..(596): n is a, c, g, or t
  misc_feature (656)..(656): n is a, c, g, or t
  misc_feature (682)..(682): n is a, c, g, or t
  misc_feature (700)..(700): n is a, c, g, or t
  misc_feature (785)..(785): n is a, c, g, or t
tttaaaaaaagggaaaagggcaaaaaaaaatataaaaaaaaaaaaaaaaaaaaaaaatttataaaaataaaaaaatatacataaaaaaaaaaatttcaaactaaattataaccacattaaaccttatataaataaatatccaattacctttttttccatataaaaattttttaaaaaaaggggtttttgtccccccccttccccccatattttttttttttccccttttttttttttgcccccaattttaaatttctttttcccatttccttttttagggggggcttttcaaaattccgccgccctttttttaaccctgtttttgggaaaaaccccggggtccccccttttttatctttttaaaaaatacccctttttccgagaggggttttttacaaaaaggccccccccctttccctttttcaaaatttttcccccctataagggaaaataaatttattaccctttttttttttgttcaacacccccaaaaattttttttaaaaaaattttttttttttccccaaagccccatttctgaaaatttttttatttttaaaaaataccccccccctataggttttttttttttcccnttttgaaacacagcccttttttcttaaacgggcttcccacccagaaaggggaaaatcccnttttttggagggagccccacctttcnggacccctcttctttatnatttttttctttggacgggcgccccccaacccatttttgctccctcctccgcgcccccccttttattttttccttgaaacccccncccttcttca

SEQ ID NO: 499789 - DNA, 94 bp, Homo sapiens
tctacatctttttattgatttcttttcttttctttttttaagtatggaggctcaagtataagaaatcaataaaaagaaactggggcgcaaaaaa

SEQ ID NO: 499790 - DNA, 265 bp, Homo sapiens
tcagatggatcccggtcgctcggacatgacatctagggcctctgaactttctccggggcgcagcgtgacggctggcatcggccccactcatgatgatgtgacctttgaggcagtggcacaggcctttggagatgagctgaagccacaccccaagttggaagcagccaccaaagccctaggaggggaaggctgggagaagctatcattggtgccctcctctgcccgcctgcattatggcacagatccttgcactggtccgagcgga

SEQ ID NO: 499791 - DNA, 197 bp, Homo sapiens
aatcgagctcggtaccactctgaagcctgggagatgctatagcttcattaccataactgtgacctgtgtgctgaaataacgactcactgcatctgcacaactgcaacccctttccatgcaacgacataccctcttccctctctatcaccccataaaaccctcctgtcactttcctgctttggagactatgcccagtg

SEQ ID NO: 499792 - DNA, 1251 bp, Homo sapiens
accgtccgcgacgttccgaagacatatactcggacccgcgaaggcacgcactgaactaggtccaaaggttcaagtatccaacacagtcaaccctacctctgtgtgcagcctccttgggaatccagatatacccgtctagaccttgcatcttcctcaggctccaacgctataccgatgctgccaccttgcctactacagaagctctatcgtaccagagctttgttgcacccaagggtgctaggcacgagtcacccaacacatgtcgagcacgcgatttccgtggagcctcgtctgtaatcgttacccataggcgccagtctagtaggctagtatcgggcagcatatatagagttcgcacaaatcccaaagaggacttcatctgatcacagatacgagtaccgcatcttatcgaaccttaggactcgcacaggagcttggatggaccaggagggctatgaactgcaggttgccacgactttggaagactaggcggctaagtgcatggacatacatgtcctccatccacctccctggatgaccctcccaatgcaggcatcagattgcaggtcattgccagcggcgagaccaagcctgtccctccatacacctccatcgcgacaaagcggcgaaacttacttccaatgcggtggaacacagcactggttggccatatgacccaactctgactgaggacacccaacaggcagcctcacgttgcccggaaaacacacattcacactacccggttccagcccccctttcgtcgcaccaacggctaacctggatctaagacacccactctcacaccttgacacgtatagcacgatctattaccgagcatgatgagcacgagatgtggaacacgcagcgcagcaccaaaccgctccgggcacaacatactaaaactatatcatgacccatgatcacggcgcaacgcaccctccctcaaaccaacaacgacaataacaaaaggcctccaatacacaacatccaacctatagtaaccgacacacacgcataccaaaacacacactatcactcactcgtgaccaccccgtcctctgaccactcagaaccaccagaacatacctcaaacacctatacaaaccaaatcaaaccctaatactactcatcctccacctcccatcacattctcccaccctagtcaccacctatcacaaccaacatcaacctcagacctcccaccctgaccaacgccaccccatacctcacatacccttgcgtctacct

SEQ ID NO: 499793 - DNA, 334 bp, Homo sapiens
gctcatctctgtgggggtgtagggcgcagcggcttatgacgtgcaggcggggcactgggcactgtgcactctgtaccatctgggacaggcccctcccttgccccaggtgaggtttcctgaactggagcctccagcctccctggctccacgctcagccccttcatcctgacctctcgcctgtaaggtcctcgatagacggactccagcagcaaaagggtaaggcatctcctggggactcagaggcaagggacaagactgtgggacacccacttcctgcaccccaatacagactgacgctaaggtcggaactgactctaggcacccgggcaccccg

SEQ ID NO: 499794 - DNA, 147 bp, Homo sapiens
ctggggactctcttcctgctccgaccgccctcgatttcctctccgcttgcacctccgggacatcttctcggcatctcctgcttctgggacctgcagcaccgtattgtggttagctccttcttgccaccaaccatgagctcccggagt

SEQ ID NO: 499795 - DNA, 865 bp, Homo sapiens
cagaggttgcagtgagccaagatcgcgccattgcactccagcctgggcgacaagagtggaaactctgtctcaaaaaaaaaaaaaaaaaaattcagtgaaatacacctttatttttgaaatccaagttccacttttggggatataatgagccagttttctcagtaatggtctactaaaaaaaaagccattaacctttctctaatattggcatgattctaataaaacgtttgtcaacttcttaaaatggttttattggaaatggtgggcattccttggaattttatgactttaaaataatccacgacatggtacagctcttcacttttcagcttttaaatgtccattaatacggttcgaattacgttacaactttttttgtttaccctcaacaaaattaatgggcaattattgttcactttggtgaccaacaaaaaaaacaaaaaaaaaaaaaaaagaagaggagaaaagcagcacacagacagaaacacaacaaaaagagaacacaaaagataaaaaagaaaaccaagcaggagcaatagtagaaaagaatgaggcacacacatgaggggaagcagacgataaataatgaggacgacaaaacttggagagacaaaagatagttagaaaaaaaagataggagaaaggatggaaaaaaaataaacaaaacaatgggaaagataatggagaggaaagagacaaccataactaatagagaaggaagaacacaaaaggaaagaaaaagaaagatggaaagaatttaaaagagaaagagaagaaaaaaaataaaagagaaagcagtgaaagagggaataaaaagaggacgaaaaaaaataaaaaagaacaacaaaagagacacaacatgata

SEQ ID NO: 499796 - DNA, 632 bp, Homo sapiens
  misc_feature (609)..(609): n is a, c, g, or t
  misc_feature (620)..(620): n is a, c, g, or t
ttggctcaagggaatgttgtagctggattgatcttctctttcaaccaaacattctccacatcagcaatatgccttttaattcatgtgataactaaagtagcaattttaatttccaagagcttttcttttgccttcataactcaactgtttgggggaagaagcctagcttttggcctgtcttggtttttgacatgttttctttactaagcttggtcatttctagcttctgatttaaagtgagagattgactcttcctttcacttgaacacttagaggccattgtagtgttattagttagcctagtttcagtattgttgtaacatctcaggaaatagggaggcccaaggagagggagagagatgagggagcagctggttggtggaaaaatcagaacacaaacatttataggttaggtttgctgtcttacatgagcgcagtttctggcgcaccaaaatgattacagtagtaacatcaaaaaatatcacagatgaccctaatggctataataataataaagcagtctgaaatattgtgaaaattatcaaaatatgacagacgtgaagcgagcacaagccgttggatgatgccagcgcttgcctcatacagggntgccacgcttncattcgtttgct

SEQ ID NO: 499797 - DNA, 897 bp, Homo sapiens
  misc_feature (32)..(32): n is a, c, g, or t
  misc_feature (100)..(100): n is a, c, g, or t
  misc_feature (109)..(109): n is a, c, g, or t
  misc_feature (209)..(209): n is a, c, g, or t
  misc_feature (311)..(311): n is a, c, g, or t
  misc_feature (323)..(323): n is a, c, g, or t
  misc_feature (351)..(351): n is a, c, g, or t
  misc_feature (473)..(473): n is a, c, g, or t
  misc_feature (483)..(483): n is a, c, g, or t
  misc_feature (513)..(513): n is a, c, g, or t
  misc_feature (549)..(549): n is a, c, g, or t
  misc_feature (553)..(553): n is a, c, g, or t
  misc_feature (569)..(569): n is a, c, g, or t
  misc_feature (573)..(573): n is a, c, g, or t
  misc_feature (595)..(595): n is a, c, g, or t
  misc_feature (597)..(597): n is a, c, g, or t
  misc_feature (605)..(605): n is a, c, g, or t
  misc_feature (611)..(611): n is a, c, g, or t
  misc_feature (619)..(619): n is a, c, g, or t
  misc_feature (659)..(659): n is a, c, g, or t
  misc_feature (781)..(781): n is a, c, g, or t
  misc_feature (792)..(792): n is a, c, g, or t
  misc_feature (838)..(838): n is a, c, g, or t
ggcttcatgtggatgcataaaattttccagtnggtaagttgcaggtgccgaggtgtgtggatcagaaaaaaaggcaggaagctgggttcccactcgcctnccatgagcnctccgcagctcaccggccatcacttgaagcaaacactcctgagggagcaggttgaggaagggcagatatccggcttcttgccctggtacaactggcaganaagggtaaggagctgggtctgatcttccaagggtttcccattgacggtgacccagggcacatactcgtgtggtggctggagagcatcttttcgctgggcgtnggcgtgcatgancagcatgccgcggtcccccattgcacantccatgaaagtttttggcgacacctggggcgtagagctgcaggcatagtggcagagttctctacatgtgctcaaactcttccatgcagaaaatggtcaggaaggctagctccatgttaagtncatccaacangcaggcctccaccttgttgaatttgcactnctcttctccatgctggcacttgaactcccacctgcnactnacattttgttcctgtncgtntccgtaggcaccagcgtgaaantnaggatctncatgancaacagcnatgttgggaagagctcccggatcaggaaggctcggcagcnaccgcacagtgcttcatagtagagggtcacattgacaagcggtacattggactgcttcaggggccccgcagttatagattgcctgtcttgtagttaactggtggcccattcccaaagaagtntaacgcttgcngaggggacgcctgcccgccgccgtggggacgtcagcagcagcagcngccgtggcaggaacagcagaagtagcgacagggtcatcgcagccggggcaaaggtgtgg

SEQ ID NO: 499798 - DNA, 873 bp, Homo sapiens
  misc_feature (621)..(621): n is a, c, g, or t
gggtccctccatcgtgcaccgcaatggtttctaagtggactcaggagatgcgtagatttgctggaagaaagtttgcccgctgggcaagatgcggaactacctgccatgctagccctcacgaaacctgaaagtatcgcgttcgataggacgaacatcgggtcctgtgaagttttgtcattcttgagtactccggcagcgtggactgtgtatgaacctggttgtgtgatcttgaccctttgtctttgaatctataccctgtaccccttggaataagcgggtcacgggcatgagtgtgtaccggggagatttgcttctagaggctggtcaacgtagctcacgttgtgtgttggtcctagggcggggatctggcagggtgtggtgtgtcctagtcggtaggagcccagtttcctatttttaaggcttgagtgtactatggtgctcgagaacgatcagtgtgaatgtgttacttggactagatgtgaaaatgggggttagtgatataccgccctgtaaaatgtattcattcttaatttatgtacggttttttggtacgcaattctcgattcttgtgaagagatgacaacaaatttgtggtttctacttgttatgtgagacacattnaggccccagcaaacacggtcattgttgtaggcacccctacacagtgctggcggtaggcaaagagagagaaacccacacacaaaaaaaccttggggggcagccgcggccaggaaaagattcttaacccatcgtggggggccggcgcccatatttagaggacaggggcggagctgtccagacaccgggggaactgggggggttccccaaaacccgggcgggtgacccccgggcgggaggccacgggcggctcgc

SEQ ID NO: 499799 - DNA, 681 bp, Homo sapiens
aacagtacctgcacccctcccccctattgcacacgccccgtcctcgtgcgactggaggacacgccccctcctttgctaccggaatctaatcctccctcgcaccggaccaccttctctgggtataggggaggcgacttgcggtcgtggttggcactgcactgactgcctcactgacgcccgctcccttaccctgtggggtgaggggagcacccgcttttattccacggagtagcttaataggacccgcccgctcctggctgggtgccccaactccccttcgtgcggcatgcttaatgcttctggggagtgagggcggctggtcccagccggagccggactcttcgcccgactccggggagaaacgcgaggggctgagtgtagagcgatcctgggaaatcctttgatccgggagccctagtgtttcctctccagccaacggtggcgtcagttgccttaaattgggaggagcactcggaagggtatggaaaagggcctgaaactctcccaagtggacatagccccttttccggtatggggtctcactacaccccacgacgcaagcactctccggtcagcgttgactgcctctacagactacctatacgttcctttttacgccccaagtgggaattgagaggtaaggtctctctctggtaaatccagcagcaagaggaagggacc

SEQ ID NO: 499800 - DNA, 181 bp, Homo sapiens
caatctgggctctcacacacactcacacattcagtcttacacacattctcacacacacattctcacgcgcacacacactcactctcgaggagcgtcacacacccctcattcttttccacctgttctccacagcaggagggacagagtgcctggtgcctggcatgcgtgtgatctgtggggt

SEQ ID NO: 499801 - DNA, 1101 bp, Homo sapiens
  misc_feature (22)..(22): n is a, c, g, or t
  misc_feature (864)..(864): n is a, c, g, or t
ggctcgttctcttcgcgaccgnctgctgcgctgatgccacctgtgtccccacggcgggcagcagcggcggcggggcggctgaacgcggagggggcggagggagcccgcggcggcggcagcagctacagcgaaatggcggagaccgtggctgacacccggcggttgatcaccaagccgcagaacctgaatgacgcctacggaccccccagcaacttcctcgagatcgatgtgagcaacccgcaaacggtgggggtcggccggggccgttcaccacttacgaaatcagggtcaagacaaatcttcctattttcaagctgaaagaatctactgttagaagaagatacagtgactttgaatggctgcgaagtgaattagaaagagagagcaaggtcgtagttcccccgctccctgggaaagcgttttgcgtcagcttccttttagaggagatgatggaatattggatgacaattttatgtgaggaaagaaaaccaagggctggagcagtttataaacaaggtcgctggtcatcctctggcacagaacgaacgtgtcttcacatgtttttacaagatgaaataatagataaaagctatactccatctaaaataagaaatgcctgaaattgtggcaagaaggggcaaaaacgtgactattaagtgatgtggataagcaccagtgaagaagttctaacttttagcatgctgacagaaatggtataacatgccttcagtatactaacactcatatgctcagttggtgtggtggggcagtggacaagaagttaatggcgttagtaaaaatcctcattccaggctttttatataaatagctctttcgtgtgttgtagtgtggtgacaatatagnctcaacaactgtattcagtgtaatctggagtgtcgaactaagtagtggttggtctatgtgacaagtttgcgttggggtttgatttgtaatagaaatttttcttcccttaattggtgttggcctttgtgggggctacctggtcaattgcactagtaattggggaagatttcgggaaccaggaaagggattttgtaaagattaatttggatgtgaaagttggaaaaaagggtgaggggg

SEQ ID NO: 499802 - DNA, 941 bp, Homo sapiens
  misc_feature (103)..(103): n is a, c, g, or t
  misc_feature (138)..(138): n is a, c, g, or t
  misc_feature (732)..(732): n is a, c, g, or t
  misc_feature (810)..(810): n is a, c, g, or t
  misc_feature (921)..(921): n is a, c, g, or t
catagagctagatacaaggagggtttttagaagactgactgaacaaatgagaagtcaaggcaaaggactctggaatctgactgcttgggttcaaatgccaganctgtggttcctgagtggtgggaccttgagcaagtnacttaatgcttctacaaagagttgtcatggggattacgcatcatcatgtgtgaactatagggcgcactccagcctgaagacatagactcagtggagccagcactgtactgtgagccagcgtggttaactgcactgtgacagcttgacagaacactgatgctgtgtgcaggtgggtgtgtcaccagagctctggtgtaggaggctggtgatctggggcaaatcatttcccttttgtggaacaaagacaaaggcctggacacatgccctctgtgagcccttcctgctctggcctccatacgtgccgtggggttgagagtttgtgagccgttccctgctctgggggtctggagagcacattttcagcagaggctctgccccagtttctgacctgactttccagctggagacctcctttccctgccctcccctcctcctccagccgtccctgccacaaccctgcatccccaggagggtaccagcgctccactgctgagtaggatcatgaagatgatgaatgtctcgaaccagctgtgctccacgatgtggtagcaggtcttgcgcaaccgccaccagaccttccctggggcctgtgtngtgtcaccgcacagcagggacagcgccggacacagcctatgggagagagttagggtcaggcccacctcagggcctgtnaatgcccacatctaatggcagaaggttggatggttgaagagatgactgagagaaagagctacgatgatgggggtggcgaacagggcaatatggtgagcagggccgtgtgancaaggccgtggcacacccgt

SEQ ID NO: 499803 - DNA, 290 bp, Homo sapiens
cccctccccctcccccagcccctagaaaaccactcatgactttgcatctccatgaatttgcctattctgaacatgtgaaatgaatgagatcatataatagatgagattttgtgtctggcttctgtcactcagcatcatgttgctgagggtcgcctgcattgtagcctgcgcctgtgcttcactccttttcatggctgggtaatattctgttgcacagatatggaactcatctacgtttgatgcagttgtccagagaaccatttagggtgaaaataaaatcctttaagcta

SEQ ID NO: 499804 - DNA, 857 bp, Homo sapiens
ttcccaggcagtgcagtgagccaagatcataccactgcattccagcctgggcaacagagtgagactctgtctaaaaaaaaaaaaaatcagggactaggggagatgatcgcatgacctcgtgaatatatttaaaacgacggggctgtatgtacactttacaagaatgaacatttatgtgtatggggagttatatctcaacaatgattttaagggtttggttggttggttggttggttggttggtgtttcaatcagggccaaggccacacacagtgggctcatgtctgtaatcacggcaccttggggcaggtggcggcaggaagatcacttgaggccaggaattcgagaccaacctgggcaacacagtgagaccagcatctccaaaaaaattcgaaaaaccagctgcagtatggggaccaagtgaccgttctcccagcaccccggaggctgaggcgggaggaaacctaaggccaggaatgtgacggctacagtgagccggatgcaccagttcagttcacgcctgggggaaccaggaggaggacccaacccgtgtatcccgaggttttccggtggcaaaaaaaacagggtcatgcataggcatctgctagtgtggtccagtaataccgcgtggggcagttattccaaacgactggcgcgggcgtcaatagaactgtttgccccctgtgttcagggagcttattccaatggcaagggggtacccccccatggtccctagagagaggaggtaacagcagggatctatgccaggaattatgcgtaaaaaagactgcgggcgagccagcggtaaacatggcgaggggggcccactcgtgagcactgacagggccttcgataaag

SEQ ID NO: 499805 - DNA, 128 bp, Homo sapiens
ccaaaaggccttcaaatcatcgtttgttttccaaaaacccaagtccttgtttttgggtttgaaaaaccttttccccgaataaatgggaaagggttttttttaaatatatatatttttttaaaaagcca

SEQ ID NO: 499806 - DNA, 960 bp, Homo sapiens
tttcacttatagtgttctcaaggttcatccaacctgaatttcattcacttttaaggctgaataatattccatgctatgtgcaccatgggtcgtttatctaatcatcctccgatggacactcggttgcttccaccttttggccattgggaatagtgctgctacgagcatgagtgtacaattatctgtgtgagttcctgctttaccaattcttttgggtatatgcccaaaagtggaattgttggctcctatggaaattgtgtttttactttcttgaggaagcatcatactgtttttcatggtcgctataccactgtacactctcaccagcagtgtacaagtgttgtgacttctccacatcttcgccaacacttggactagtgaagtccagcatattttcatgtgcctattgcccatttgtatatcttctttggaggaattgtctattcatgttgttcactcatttttgcaatgagcattgtagttaactgttgttaacgtcatagtactttatgtattctggatattaattctttatcaggtatataactggcaaatatttcctcccattctgtgcatatttcttttaactctgtaataggtgtcccttgatatatcaaaaaggctttaaatttagatagcctaataatagttacttaatggttgtgctttgatcaccagacaagcagccattgcacatccacatgtctaaattacttcacagtctccaaacaattatcggtgaccaactaagtgagtcctgaacaatctgattacatggtaatagaataggagacgggaacataattgacaaaccatattcgatcgggaatagagtcaggaccaaaaaaggagaacctcaaacagacatagcgcgcgcaaagaaacaaagggcaatccggcacaagaacgtaagcaaaaaagggaaaacagaagtaatagacactattctgttatacgaat

SEQ ID NO: 499807 - DNA, 168 bp, Homo sapiens
ttacagaagtatttggcggaactgtgccatgaggcagattgacatcgatgcgtgatgccatgtggtgctgctcggctgtgacaccactctcatccgacataccccccagccctcacccagcagcagcttcaatgagggtctgctcactgtgtgtggccacatgtgcat

SEQ ID NO: 499808 - DNA, 851 bp, Homo sapiens
gcaatggaggtcactccactgtcactacaaattcctgggaaggaaacttccccagattcctccacttggaggtgtgtgctcgggctcagtgctaggagggaacaggtgagaaagcagccagtgtggtgtgggtttgcatgctgatggagacaccccaggggcaaacatgcttgaccccagacaggatgtccaaagaaatggcctgctgacgtcctgataatcccttatgcccctggacgctgcctctgccttgcatgagtgcaagctgtcccctgcagccatgcccctgggctctgcctggcggtgatgtgaccctggctgggtcagggggttgtacttggacacttggtcccagcccaattcaaaattggttgaattttatggacgcctgttgacagtccgaaattgccaatcactcccacttggctgatgacacactacatgatgcatgccacggcctctatgactgaattgccccgacacccggagtgcctggggtgtcgctgctggaatcaaccaaaatgaccttgggtgtttcaagtgccgctccaactgagacgaccgttgtatggtatatgtcgaggccagctaaaggttgcccagtccagaggtttccctggcttcttgggctgtcctgttgtgggctggtacctcagagaaagctagacagggacgtcactgtcctccggttcaccttccccgggctctgttgccggcctccacattggcttgttgggtcttcccccagccctcccccgcggccccctagcttcattgtgtcttggggggctgtccccttggcgtggttcttgtttggatttttgggcacagtgcggagccggctggtgact

SEQ ID NO: 499809 - DNA, 479 bp, Homo sapiens
  misc_feature (82)..(82): n is a, c, g, or t
  misc_feature (149)..(149): n is a, c, g, or t
  misc_feature (235)..(235): n is a, c, g, or t
aagacctttgttcccatggtaacaaagagaaaaacgtgaaaaaataataatcatattttcctatgggcctagcaaagagctnttgagacaagaaagccttgacgaattgaattccaaagagaagctgacattcaaagaaagtcagagancctggtggctttcatacttggtctggacaaatagaagagcagttctatcacaaagggagacgcttggcagagcaagaaaaagtcantcaaaccttagattgcagagtaggctggtgggacagattggaatatggaggagactaaaaatacaaaacagaaacgctgggcgtggcagcactcacctgtggtcctggctactgaggcaagaggatctcttgagcccaggttttcaacgttacactgagctatttctgtgccactgcattctagcctgggcaacagagtgctgcctcacctctaaaaataaaataataattcttaaagaaaaaa

SEQ ID NO: 499810 - DNA, 94 bp, Homo sapiens
ttggctgtgtatctctgtgccagcagcgccgggacagggcaggcggggggcactgaagctttctttggacaaggcaccagactcacagttgtag

SEQ ID NO: 499811 - DNA, 615 bp, Homo sapiens
aagggcactagtaactttaaaacggtccaatgcccaactttttgtaaatgtgagccttaggacaagacgcgcaaccgctttgtatacctttactgtaccgtagggatcaacgtctctccctgagaagtgagctggtaacatcacagcatcaaagcattagaaagatttagtattttgtcatgtaagtacccctgtagtgatggcggttgcggttgtcaataacgttggtgttcagaagttcaggttgtgcatgcgcattcccgcgttcatgtttgtctagttttagacgagcgttcagtgcttgaaaagtggtgtcatccggccattgttaagtgtgtcagtatgagaggatcctgttgttcaccagggtcatcaaaataagcgtaaccggtcgcattcaataaaggtcattagacgccattctcgattccctcattgttcgagtcatctgtatatagcttctaatacctccgcccatgaaatgcatcgttcaacagttaggtacgggtctcacacagtgagttcacactttcagcaacaactcatgtagagtctggtccagacagagtgtacaggtcacagcaatgtagtcctataaggcatggtaggagcaag

SEQ ID NO: 499812 - DNA, 237 bp, Homo sapiens
gccacccaaatgtgtggatgaacttggccaaagaaacaaaaaccgccacttccgcttcctgtgggctccatttccgacccctcctccaatagagcgtttaacactccgggggtcccgcagcctcctgtcagcatttccccggggaagctgagcacgtgaatctcgctgttttttttcgaagggttgtcttggtgctgaataaagggggttaatatctaggcatataaatagaaatga

SEQ ID NO: 499813 - DNA, 130 bp, Homo sapiens
agtcctgcaatgagtttgagtacacaatttgattacacgttcagctagcgcactgtggtgagttttgatgtaatattggtttctcgccaggcgcggtggcttacgcctgtaatctgagcactttgggagg

SEQ ID NO: 499814 - DNA, 687 bp, Homo sapiens
  misc_feature (464)..(464): n is a, c, g, or t
  misc_feature (471)..(471): n is a, c, g, or t
  misc_feature (573)..(573): n is a, c, g, or t
  misc_feature (579)..(579): n is a, c, g, or t
  misc_feature (602)..(602): n is a, c, g, or t
gatccagtttcattctcctacatgtggctagccaattatcccagcaccatttgttgaaaagggtgtcctttccccactttatgtttttgtttgctttgttgcagatcaattggctgtaagtatttgggtttatttctgtgttctctattctgttccattggtctatgtgcctatttttataccagtgccatgctgttttggtgactatggatttatatcataggttgaaatcaggtagtgtgatgcctctagatttgttctttttgcttagtcttgccttggctatgcagctcttttatggttccatatgaattttaatatttttttccaactctgtgaagaataatgttggtatttttatggggattgcattgaatttgtagattgcttttgacagtatgggcattttcacaatattgattttacccatccttgagcatgggatgtgtttccacttgtgttgnctatganttctttcagcagtattttgagttttccttgtagagtctttcaccttcttggttaggtatattcctaaagtatttaattaaattttttgcagctatttgtggngttgangttcttgattagattctctgttnggtcactggtggtatatagaagaacttgtgatttgtggacattaatcttggattccgctttgcttgattattttaatagtcctgc

SEQ ID NO: 499815 - DNA, 174 bp, Homo sapiens
acttttgcatgcggccggaggcctaccttgcaggccctctccctaactgctgtccccactcgaccccagtcaccctagcttggtctgatagtctgtcgtgtgagcagttgcatccttcatggcatctccaatgatgaacgccccatgtggcactcatgatacatgcacaccgag

SEQ ID NO: 499816 - DNA, 139 bp, Homo sapiens
cgggaatcttccagctgtatgcctattcagtatgatcttggccgtggataaaaactagtagctcttattatgttgagatacattcaatcaatagctagttcatagagtgtttttagcatgaaggggacgcgggtgaact

SEQ ID NO: 499817 - DNA, 471 bp, Homo sapiens
tggggaaaaggggggggatatttgggcccggggtttgaaacctgccggggaattatgggaaaccccgttttccaaaaaagggaaacacaacaaacaaaaaaacaccaagaggccgcaccaaaaaacaaaccaacacacatcgaaaaaaaaaatttgtgggcgcgcgccgcgcgcgggcccagaaaaaagagtttctaaacaccactgggtgcgtgggcgcggcgcgggcgaccaaggtagtgttgatggaaaccaaggggggccacacgggctgttcccaagaaggagaaccctggtggacaacagaaatcggggtggtgtctcttccccaaaaaaaaagcggcgggcggggaacacagcggcggtgcttttcgaccaccaccaaggagggtctgggagcgacacaaggggggcttacaacaagggggggaccaacagagagcggaaaataaacttcgcgccccgcgggca

SEQ ID NO: 499818 - DNA, 148 bp, Homo sapiens
tggttgggacccggggcccttatattgagaggcatatcattagaaaaagggggcggggctccccataggtgtcccccgattctccgctctctttatacaaggtggtgtcttcatatacatagtggcacacacactgtgtgtgtatgga

SEQ ID NO: 499819 - DNA, 1283 bp, Homo sapiens
  misc_feature (75)..(75): n is a, c, g, or t
  misc_feature (171)..(171): n is a, c, g, or t
cttctgggcagtgacagtcatggtcataatcctgaccctgagccagtgccaggtctccaagtgccttctgaatgnccacaggcgattggttttagtggtaggtgtgtggggatctgttctggtcatctggatgctggtcatcggtgtgcagtattgatcaggacctgcaancccaaaagcttatgggagctggcacgtcacacaaaagacacacacaaacccaagcccacagcctggacagctctgcatccaggcaacaggtgcaggcaacagccacacccatcgcggcacaccatcgccacagccagatcagccaggcagcatacaccatggcagcatcctggtgccagcactagcagctcacacagcaaggcccctataaagcaacacggagcgtcggaacaccaaaaccacaccagggcaccctcgacaagcaccaccacgggggaaacacacactgggacgtaccctggccggaagacactggataggcacactccaatgggcctaacacggaatggggatccatgtgacaaggccaccaaacgccaatgagcaggcgaaggcctaccacacccgacgccatccctgggcaaaccgacagagacattcaaccggggcctcgtggccgcgcagaacaaccgcgacagcaccaccataccttgaccgacgcacgaacccaacgactccggggcgaccccaacccaagcacgagcgacccagccggacgtggcgcacagatagagcaggaccaaaacaggaccccggacaaggacaccagcaccatagccaagaaaacacagccccgagacgcagcccacatcaccccatcgccgggacacgccaccaaccagacaccaaaatcacacccgacaagacccccgggcccccgaccacccaacaagggggcgacagccggacaaagccccggcagggcgcaggcacacaccacagcgtgcccaacgccacaagaacaacgggaaaggagacacggaaccgcgccaggcgacacgatgcagaggaacgtgcgacgcagcacgccagaggcgaacccggaagcaccgacagggacgcacaagaggaggacagcagaggggacccacagagcgaaccaggccacagcaccaagtaacaaaagccgacgacacacgcgcacgcgacagcaacccacgcaagacgcacagcggctgccaacgagccgaagccaacacgaaacgcacacaccaggcgcgacgaccggacgaacagacaagaagacaaaaacgaaacccagacggcaggcc

SEQ ID NO: 499820 - DNA, 534 bp, Homo sapiens
  misc_feature (75)..(75): n is a, c, g, or t
  misc_feature (171)..(171): n is a, c, g, or t
cttctgggcagtgacagtcatggtcataatcctgaccctgagccagtgccaggtctccaagtgccttctgaatgnccacaggcgattggttttagtggtaggtgtgtggggatctgttctggtcatctggatgctggtcatcggtgtgcagtattgatcaggacctgcaancccaaaagcttatgggagctggcacgtcacccacagcctggcagctctgatcaggaaagtgaggaacagcaacaattccggaacattttcaagcagatagcaggagatgacatggtgatctgtgcagattttttttttttggtccttaacacaaccgtttttctacacaaggacctgaagacacacgccttcacactggagtcctgccgtagcatgattgcgctcatggatacagatggctctggaaagctcaacctgcaggagttccaccacctctggaacaagattaaggcctggcagaaaattttcaaacactatgacacagaccagtccggcaccatcaacagctacgagatgcgaaat

SEQ ID NO: 499821 - DNA, 177 bp, Homo sapiens
atctgacgacgtgacgagcagattacaactgccagaggcttactcttacagatcgcgtatctggagattacatcgtttgacagacgtttgtgcaggaataaatttaagattcttaggctaggacttctctgatcttctgaggtcttaccattaattaggaagcagttcctttcgaag

SEQ ID NO: 499822 - DNA, 167 bp, Homo sapiens
ccaggatctacagaggcacaaggaggtgtagtaaggccattctctcatcaaacattttattggatctctggttagatgaacctcttgatttcatcataattcaccatgtctcccatggagccaggacgaccaggcaagccagtgctccccggaaggccccgtgagct

SEQ ID NO: 499823 - DNA, 552 bp, Homo sapiens
ggcctggctcacgtaaggtcaaaccatttgtttatgaacattactgtgagctccagagctggatctgcatggtccagctccagcaactgcatcccacctggaaactcctatgcatgcctcaagacccaactcaggccaagtaaggtggctcatgactgcaatcccagcactttgggaggccaaggtgggaggatggattgagctcaagagttcaagtccagcaatatagtgagagcccttctttacaaaaacattttttaaaaagagccaggcatggtggcatgcctctgtgtcccagctattcaggaagctgaggtgggagcattgcttgagcccaggagttcaaggttgcagtgaggtatgatcgtgccactgcactccagcctgggtgagagcccatctctaaaaagaaaaaagacccaactcaaatgttccgtcctcccgtgaagtagctccgtctgcttccccgtgggctccttcatctattctcccacagcctttccccctgactccaagtgggacctcgatcaaggtcctgtgattccctgtgga

SEQ ID NO: 499824 - DNA, 268 bp, Homo sapiens
gatgttatggggtgacagtggcattcagccctagatgcttcctttcatgtaacctgcagtccagtctaaccaggagataatagacacattttaattgagggacattcgtgcaaaatatctgcccagtactcttcgaaactgtcaaggtcatcaaaaacgaggaaagtctgagaaggagcctagagacacataactcaattgtaactggggtgttctgttggataccacactcagggacgtgatttttaaaggctaaggaaagtgtcat

SEQ ID NO: 499825 - DNA, 876 bp, Homo sapiens
  misc_feature (117)..(118): n is a, c, g, or t
  misc_feature (153)..(153): n is a, c, g, or t
  misc_feature (165)..(165): n is a, c, g, or t
  misc_feature (167)..(167): n is a, c, g, or t
tctttctgtttccaaaacttgaaaatatgtagatggactcatgcataagactgttttcaaagcttcctcacattttaaagtgtgattttcctttaatatacattatttcttaagcanntatatccaaccatgacttggagatatacctataancaatatacacgngntatgaagcagctttctcaaatgtggcttcagatgtgcaagtggccaaatttcatgtatggtagaatacaatttgggttttaaactgtattcaatctatttctccaagatgctttcatatagagtgaaatatcccaggataactgcttctgtgtcagtcgcattgtgacgcataagtgcacaaatgacaccagtgtctactctgggtggtgcataaccttacatgtataatttcggcatctgtgttcacaaatgcattgtgttagcaaaatcacctttatttataagtgacactaatgacgttacggcatataaagaaacctgcaatttgtaagtccagcgtcgctccatttgtccataacaccactgtcatggactgtgcacagccattccgtactccgtcgtaaccaactccagatcataacatctggcaaacagttttcaacctaacaacaacagcactaccactcaaaacacagtgcgccccactgaccaggaacgtctcaagcacacgtgtggcgcggccccactggaagtaaagggcaaagggacacagaaacccggagaaagggtgccccaaacaaccgggcccggggtcagaaccagggtcggccagtggtacaagccagcaaataccgcggggaaaccaccacgacagcagcagacaaccaacgacaacaaagagccagacaccaaacactaccagacagg

SEQ ID NO: 499826 - DNA, 983 bp, Homo sapiens
gtgggtatatgatatatatatgttaatttaaaagggtaataatgagggctggtaagtaaacaggatatgttccttgaaatgtaaatttcgtccggtcacttgattttcaggatttgtcagactgctgatgctgtgtacaggagggggttgaaggaaaggttcgagacctcttgaaggacatcgtgtagcgctgtaacctgaggggccgcattggtatctgtgggtgctcctacgtcactaggctgtgattttggggaaatggggccctccaccttatgtagatccagagtccgtggctctgagcatcctccctttgcccactggacctgcctgcagtgtctgccttgggaatggtcaagacagagatggtatcgtgcagcctctggtctccacacagtgagagtccagggctcagggctgctcaagaccaaggcttcccttgatgcgtcacttcgggtgatcagacatgggggacctgtttatctcttagtagccggcaaaggcaatcgtaaaacatcgtgattgtgaaccttgcaggacttgtcactgctaagaacaccttaatccacaatttgctcatgctgctcctctttgcagaggggacagggagctccaggcccgagagcctattattaagcagtgaggagcagaagcagcggatagctgtactatgccacagaagaacaagaggagctcaaggtagcaggggacagatgggctttcaagcagagctcggcgccaacacatagcctagtgtgcctgtacctggggctgactaggggagcagtagagctgcgtgcagaacgcacggggaggggtctttactagagtttactgtctgcaggtctgtggtggatcctgacaaggtgtccctggtgttagacatggcagtatcatgatccaagagggccagggagagggggaggtacagtcataggactctttcttcagtctctttaaggtgcaagaggacttttcatgag

SEQ ID NO: 499827 - DNA, 204 bp, Homo sapiens
cgcaatcacagcgcagggcaagctggcttggcagttcattatgcctgtatcaactggtgacgccatatgaatataagcaagcagcagagagagaagctcttataatagcaatgccgatattcctgcctcgtcatcagcaacacatggttcagctccttcctgattcctcctattattctgtattactgcagaaacaaattctga

SEQ ID NO: 499828 - DNA, 855 bp, Homo sapiens
cttaagcgggtggccgaagtgtggatggatgagtacgcagagtacatataccagcgccggcctgaaataccgtcacctctccgctggggatgtcgcagtccagaaaaagctccgcgagctcccttaactgcatagagtttcaagtggtttatgacgacagcatagtcctggggacctgcccatgattctacccaaccgtggaatggcccccggttgcaggcatgtggggggagatccgaaagtgtgggcacagggctgtgttgctgagctactgaagtcagccggggcctatgggctctccactaagggctagagggctgcgtccgaggccggtggggaggctgtctggagcaaaatgcaggtatgcacctttcggccttgaatgcagaggacatctccggcctggtagaaccctgagtcaacttactcaagaagtttctagcttatgattgctcgatttccgcaaggacctagccacgcgtgatctacggctggtacgaactgcacagcagcagtggaatgggcaaccagtcgttgtgagaaagagtaccgtcgaaggacactgaaccttgtatcacactctgtcagtggctagctgcattggacatgacgagctgaaaacgtggaacaatagggatctttctatggaagcaccgtggcatagccagcatccctcgtcttcagcccatggaggttgggcattgttttgaagcacatccaactcaaacaagtctttgggaaaggatgcaagttacggagactggagccactcatgtgccccttggtagggcccccccaggggtcatggcactccattgcagaacttgctcatacacagggaggcagggccctgtg

SEQ ID NO: 499829 - DNA, 284 bp, Homo sapiens
acacggggaacggaagccacacaaccccagtggcttcctaaggcagaagggaagctgcgtcaatcctaagaacacttacaatagtgtttgtggggaggggctgggggaaccagactcaaacaagccaagtctaaaaattatatacaaaaaaggccgggcatggtgactcacgcctgcagtctcagcactttgggaggctgaagcgggaggatcgcctgagcccaggaatttgagatcagcccgggcaacatagggagacaccatctccactaaatttttttttt

SEQ ID NO: 499830 - DNA, 512 bp, Homo sapiens
  misc_feature (77)..(77): n is a, c, g, or t
ttggactgagccctgtcacctctgtgatagtcttcactctgacaggcaatggtgactgtgtgtgtttcctggggagnaggttagcagggacggttgcctttcctgggaagggcggtttgcagaaccaggggtttatattgcagggagtgtattttctgaattctaagtcagaacaagcagtctgatacaggatccatggctgggtcacttctgggtgcaagaggctttctagaccttagacactcaagattacggtcccgggccagtaacagcacctgggagcttggtagaaatgcagaatcttagcctaggcaacatagggagacctcatctctgcaaaaaataacaaaattagccgggcatggtggtgcacacctgtagtcccagctattctccaggctgaggtgggaggatcgcttgagcccaagaggttgaggctgcagtgagccatgatcgcaccactgcactccagcttaggcaatacagcgagaccttgtctcaaaaaaagacaa

SEQ ID NO: 499831 - DNA, 482 bp, Homo sapiens
cctggaccttctggagtcacatgctggtgcttgacgttctggagatttcagggtttccaggtcctcttgatcccgcaaaacttctagtgacttcgtagagactctctgtatgctaaaagattttactgcctctaatgctctgcgtctttgagtgactttaagaactcttgactcctcattatcaagcaggtctagctatctcctggtcaagagacttctgctggttctagatccactttttctgggtgtcttaatgtcttctgatcctgttcgcctagatacctccgtcgctgttgagtctctttttcaaggagttctccttgtctcttggtcctgttcttctaaagacctctgtgatttgtgattctctgtttctagaggtctcacaatactctggtcctcttcttctagagtcttcagtggctcctggttctctttttctagagatctaaaggcctctttgttctcatcttcaagagacc

SEQ ID NO: 499832 - DNA, 535 bp, Homo sapiens
  misc_feature (408)..(408): n is a, c, g, or t
gtctcagccggcaggaattcctcaggtatctggggactcctgggtggtcccattggaagaggggaagactaagagcggacggggacctgaagccggtgcacggtgaccatctacaagggccctctcactaggcggtcggcgggggaatctgactaaataacctcacgcatctcttctggggcagagaagtttcccactctgtctgcaagctacagaccgggctacctgtggttctgagagctgagtgaggagaagcggggggtgggagaagtcctcagcattcgagagggctgcatttaccccacactccggtcgggggaaaaggcccccaccttcaacggggcctagagtccctcatccagaaaggctgggtcagtctctccggtgagcgagcactcagacttcggncggggggggggggacaggccctcaggggcatgaggtgagggcaacagctggtcggtttcctaaacagttctcagccaattctgcttctggtctttaccctccccattctcacttctagggtttaatt

SEQ ID NO: 499833 - DNA, 2493 bp, Homo sapiens
acagcggggcggggcgcggggctgaacaagcgcgagggctggctgctgggccgacgaggggcggtgccaggccgtgggtccttagtcaagtgacgcgaagcggccggcctgggcgccgactgcagagccgggaggctggtggtcatgccggggttcctggttcgcatcctccttctgctgctggttctgctgcttctgggccctacgcgcggcttgcgcaatgccacccagaggatgtttgaaattgactatagccgggactccttcctcaaggatggccagccatttcgctacatctcaggaagcattcactactcccgtgtgccccgcttctactggaaggaccggctgctgaagatgaagatggctgggctgaacgccatccagacgtatgtgccctggaactttcatgagccctggccaggacagtaccagttttctgaggaccatgatgtggaatattttcttcggctggctcatgagctgggactgctggttatcctgaggcccgggccctacatctgtgcagagtgggaaatgggaggattacctgcttggctgctagagaaagagtctattcttctccgctcctccgacccagattacctggcagctgtggacaagtggttgggagtccttctgcccaagatgaagcctctcctctatcagaatggagggccagttataacagtgcaggttgaaaatgaatatggcagctactttgcctgtgattttgactacctgcgcttcctgcagaagcgctttcgccaccatctgggggatgatgtggttctgtttaccactgatggagcacataaaacattcctgaaatgtggggccctgcagggcctctacaccacggtggactttggaacaggcagcaacatcacagatgctttcctaagccagaggaagtgtgagcccaaaggacccttgatcaattctgaattctatactggctggctagatcactggggccaacctcactccacaatcaagaccgaagcagtggcttcctccctctatgatatacttgcccgtggggcgagtgtgaacttgtacatgtttataggtgggaccaattttgcctattggaatggggccaactcaccctatgcagcacagcccaccagctacgactatgatgccccactgagtgaggctggggacctcactgagaagtattttgctctgcgaaacatcatccagaagtttgaaaaagtaccagaaggtcctatccctccatctacaccaaagtttgcatatggaaaggtcactttggaaaagttaaagacagtgggagcagctctggacattctgtgtccctctgggcccatcaaaagcctttatcccttgacatttatccaggtgaaacagcattatgggtttgtgctgtaccggacaacacttcctcaagattgcagcaacccagcacctctctcttcacccctcaatggagtccacgatcgagcatatgttgctgtggatgggatcccccagggagtccttgagcgaaacaatgtgatcactctgaacataacagggaaagctggagccactctggaccttctggtagagaacatgggacgtgtgaactatggtgcatatatcaacgattttaagggtttggtttctaacctgactctcagttccaatatcctcacggactggacgatctttccactggacactgaggatgcagtgcgcagccacctggggggctggggacaccgtgacagtggccaccatgatgaagcctgggcccacaactcatccaactacacgctcccggccttttatatggggaacttctccattcccagtgggatcccagacttgccccaggacacctttatccagtttcctggatggaccaagggccaggtctggattaatggctttaaccttggccgctattggccagcccggggccctcagttgaccttgtttgtgccccagcacatcctgatgacctcggccccaaacaccatcaccgtgctggaactggagtgggcaccctgcagcagtgatgatccagaactatgtgctgtgacgttcgtggacaggccagttattggctcatctgtgacctacgatcatccctccaaacctgttgaaaaaagactcatgcccccacccccgcaaaaaaacaaagattcatggctggaccatgtatgatgatgaaagcctgtgtctttgagggattctaccctgaacatacctcacagatcctccctgtcatgccacatttcactgattggaatgtggaaatggaaaaggaatttaggatgtgcattttcacctgaggtttccctgcatccctgcagtgccaaagccccaccttcagggaccacctggaatgtgtgaggggctgacagcacagtaacgtgcatacatatctgcagggctggaatggaagctttaaaggtggtagtgatttttattttggaagaatcatgttacctttttgttaaataaaatttgtactcaaaa

SEQ ID NO: 499834 - DNA, 727 bp, Homo sapiens
gttcgtgggggcattctttcctccactgctgctggcctgcctacatcacggcccaccttcctcacggcttcggtgcatctggggttgctggttctctgtctctctctctccaggccaggtctggattaatggctttaaccttggccgctattggccagcccggggccctcagttgaccttgtttgtgccccagcacatcctgatgacctcggccccaaacaccatcaccgtgctggaactggagtgggcaccctgcagcagtgatgatccagaactatgtgctgtgacgttcgtggacaggccagttattggctcatctgtgacctacgatcatccctccaaacctgttgaaaaaagactcatgcccccacccccgcaaaaaaacaaagattcatggctggaccatgtatgatgatgaaagcctgtgtctttgagggattctaccctgaacatacctcacagatcctccctgtcatgccacatttcactgattggaatgtggaaatggaaaaggaatttaggatgtgcattttcacctgaggtttccctgcatccctgcagtgccaaagccccaccttcagggaccacctggaatgtgtgaggggctgacagcacagtaacgtgcatacatatctgcagggctggaatggaagctttaaaggtggtagtgatttttattttggaagaatcatgttacctttttgttaaataaaatttgtactcaaaa

SEQ ID NO: 499835 - DNA, 888 bp, Homo sapiens
  misc_feature (619)..(619): n is a, c, g, or t
  misc_feature (623)..(623): n is a, c, g, or t
  misc_feature (625)..(625): n is a, c, g, or t
  misc_feature (634)..(634): n is a, c, g, or t
  misc_feature (644)..(644): n is a, c, g, or t
  misc_feature (659)..(659): n is a, c, g, or t
  misc_feature (667)..(667): n is a, c, g, or t
  misc_feature (672)..(672): n is a, c, g, or t
  misc_feature (677)..(677): n is a, c, g, or t
  misc_feature (681)..(681): n is a, c, g, or t
  misc_feature (685)..(685): n is a, c, g, or t
  misc_feature (696)..(696): n is a, c, g, or t
  misc_feature (698)..(698): n is a, c, g, or t
  misc_feature (721)..(721): n is a, c, g, or t
  misc_feature (724)..(724): n is a, c, g, or t
  misc_feature (727)..(727): n is a, c, g, or t
  misc_feature (754)..(754): n is a, c, g, or t
  misc_feature (769)..(769): n is a, c, g, or t
  misc_feature (773)..(773): n is a, c, g, or t
  misc_feature (788)..(788): n is a, c, g, or t
  misc_feature (795)..(796): n is a, c, g, or t
  misc_feature (826)..(826): n is a, c, g, or t
  misc_feature (830)..(830): n is a, c, g, or t
  misc_feature (832)..(832): n is a, c, g, or t
  misc_feature (834)..(834): n is a, c, g, or t
  misc_feature (836)..(837): n is a, c, g, or t
gcctgcgctctccttgcctcggtcacgctgttccccaaccccctgacggacccgctgtgcattccctcacgttggcttattcgtctgattgcccccctaccacggtggcacacagcctcatggcgctatagccgcaagggaacgatcaatggaggcaagcttcaggacgtgtggcccacgtgctgcttgtcctttccctcgatctagatccgttgttctattgttccgaggttcacctgtatgcaacatgccaagccagcgtagctccaagtgccctgcgtcactatcgatgtggaagaagtgttcagcctgcttcagtagggcctggagcgcttcctaggtgtcaccaggacccgcacgagttctcaacatcactcatctacacgcataccactggcgaagctccgggctgcggggcacgcacacgtaatcccaagggacacagcatcccttcaagtgatgacagggtaagaccagacgcctgaaatgtcgaccagccggcacacgtgcctggccatgtcccatgtccacctttctccccgggaataactggccctgagacccctagacccaaggaggcctgtccatgccaagcatccgggaagcatggctggccttntccncnccatggtcncgtcggttcncaggggcagcatggnagttcttnggggncaacngganagtntgggtgggganangggacttgtccaagcagaaggcnggnccntgggaaatgcataatgtaaggacatcnataatagtattattntttntgtaagggaaaatcnatatgtnnattctgaaatcattttctctgtaaatggtngatntntncnnccctaaagggagcttaaaggagaagataatattaataataaaaccagctcc

SEQ ID NO: 499836 - DNA, 2319 bp, Homo sapiens
acagcggggcggggcgcggggctgaacaagcgcgagggctggctgctgggccgacgaggggcggtgccaggccgtgggtccttagtcaagtgacgcgaagcggccggcctgggcgccgactgcagagccgggaggctggtggtcatgccggggttcctggttcgcatcctccttctgctgctggttctgctgcttctgggccctacgcgcggcttgcgcaatgccacccagaggatgtttgaaattgactatagccgggactccttcctcaaggatggccagccatttcgctacatctcaggaagcattcactactcccgtgtgccccgcttctactggaaggaccggctgctgaagatgaagatggctgggctgaacgccatccagacattacctggcagctgtggacaagtggttgggagtccttctgcccaagatgaagcctctcctctatcagaatggagggccagttataacagtgcaggcagcaacatcacagatgctttcctaagccagaggaagtgtgagcccaaaggacccttgatcaattctgaattctatactggctggctagatcactggggccaacctcactccacaatcaagaccgaagcagtggcttcctccctctatgatatacttgcccgtggggcgagtgtgaacttgtacatgtttataggtgggaccaattttgcctattggaatggggccaactcaccctatgcagcacagcccaccagctacgactatgatgccccactgagtgaggctggggacctcactgagaagtattttgctctgcgaaacatcatccagaagtttgaaaaagtaccagaaggtcctatccctccatctacaccaaagtttgcatatggaaaggtcactttggaaaagttaaagacagtgggagcagctctggacattctgtgtccctctgggcccatcaaaagcctttatcccttgacatttatccaggtgaaacagcattatgggtttgtgctgtaccggacaacacttcctcaagattgcagcaacccagcacctctctcttcacccctcaatggagtccacgatcgagcatatgttgctgtggatgggatcccccagggagtccttgagcgaaacaatgtgatcactctgaacataacagggaaagctggagccactctggaccttctggtagagaacatgggacgtgtgaactatggtgcatatatcaacgattttaagggtttggtttctaacctgactctcagttccaatatcctcacggactggacgatctttccactggacactgaggatgcagtgcgcagccacctggggggctggggacaccgtgacagtggccaccatgatgaagcctgggcccacaactcatccaactacacgctcccggccttttatatggggaacttctccattcccagtgggatcccagacttgccccaggacacctttatccagtttcctggatggaccaagggccaggtctggattaatggctttaaccttggccgctattggccagcccggggccctcagttgaccttgtttgtgccccagcacatcctgatgacctcggccccaaacaccatcaccgtgctggaactggagtgggcaccctgcagcagtgatgatccagaactatgtgctgtgacgttcgtggacaggccagttattggctcatctgtgacctacgatcatccctccaaacctgttgaaaaaagactcatgcccccacccccgcaaaaaaacaaagattcatggctggaccatgtatgatgatgaaagcctgtgtctttgagggattctaccctgaacatacctcacagatcctccctgtcatgccacatttcactgattggaatgtggaaatggaaaaggaatttaggatgtgcattttcacctgaggtttccctgcatccctgcagtgccaaagccccaccttcagggaccacctggaatgtgtgaggggctgacagcacagtaacgtgcatacatatctgcagggctggaatggaagctttaaaggtggtagtgatttttattttggaagaatcatgttacctttttgttaaataaaatttgtactcaaaatgatgatgtcactgtttttaatgtgcaggtattgaattatatggtctgacttaaatcataactagacttgagtgggctgaataaaccacttcactaacttgaagttcaaaggatgaaataaagaataaaaattgggccttgttggctctcacggtggaactttgcggccgttcctttagtgagggtaattatgatcctcgtacggctcgtgggctgggg

SEQ ID NO: 499837 - DNA, 2357 bp, Homo sapiens
agctcggtcgcttgtgcgttccgctccggccgccctttgcgcttggatccacttccccatctgtaacgaggtgttgagacgagaatgccacccagaggatgtttgaaattgactatagccgggactccttcctcaaggatggccagccatttcgctacatctcaggaagcattcactactcccgtgtgccccgcttctactggaaggaccggctgctgaagatgaagatggctgggctgaacgccatccagacgtatgtgccctggaactttcatgagccctggccaggacagtaccagttttctgaggaccatgatgtggaatattttcttcggctggctcatgagctgggactgctggttatcctgaggcccgggccctacatctgtgcagagtgggaaatgggaggattacctgcttggctgctagagaaagagtctattcttctccgctcctccgacccagattacctggcagctgtggacaagtggttgggagtccttctgcccaagatgaagcctctcctctatcagaatggagggccagttataacagtgcaggttgaaaatgaatatggcagctactttgcctgtgattttgactacctgcgcttcctgcagaagcgctttcgccaccatctgggggatgatgtggttctgtttaccactgatggagcacataaaacattcctgaaatgtggggccctgcagggcctctacaccacggtggactttggaacaggcagcaacatcacagatgctttcctaagccagaggaagtgtgagcccaaaggacccttgatcaattctgaattctatactggctggctagatcactggggccaacctcactccacaatcaagaccgaagcagtggcttcctccctctatgatatacttgcccgtggggcgagtgtgaacttgtacatgtttataggtgggaccaattttgcctattggaatggggccaactcaccctatgcagcacagcccaccagctacgactatgatgccccactgagtgaggctggggacctcactgagaagtattttgctctgcgaaacatcatccagaagtttgaaaaagtaccagaaggtcctatccctccatctacaccaaagtttgcatatggaaaggtcactttggaaaagttaaagacagtgggagcagctctggacattctgtgtccctctgggcccatcaaaagcctttatcccttgacatttatccaggtgaaacagcattatgggtttgtgctgtaccggacaacacttcctcaagattgcagcaacccagcacctctctcttcacccctcaatggagtccacgatcgagcatatgttgctgtggatgggatcccccagggagtccttgagcgaaacaatgtgatcactctgaacataacagggaaagctggagccactctggaccttctggtagagaacatgggacgtgtgaactatggtgcatatatcaacgattttaagggtttggtttctaacctgactctcagttccaatatcctcacggactggacgatctttccactggacactgaggatgcagtgcgcagccacctggggggctggggacaccgtgacagtggccaccatgatgaagcctgggcccacaactcatccaactacacgctcccggccttttatatggggaacttctccattcccagtgggatcccagacttgccccaggacacctttatccagtttcctggatggaccaagggccaggtctggattaatggctttaaccttggccgctattggccagcccggggccctcagttgaccttgtttgtgccccagcacatcctgatgacctcggccccaaacaccatcaccgtgctggaactggagtgggcaccctgcagcagtgatgatccagaactatgtgctgtgacgttcgtggacaggccagttattggctcatctgtgacctacgatcatccctccaaacctgttgaaaaaagactcatgcccccacccccgcaaaaaaacaaagattcatggctggaccatgtatgatgatgaaagcctgtgtctttgagggattctaccctgaacatacctcacagatcctccctgtcatgccacatttcactgattggaatgtggaaatggaaaaggaatttaggatgtgcattttcacctgaggtttccctgcatccctgcagtgccaaagccccaccttcagggaccacctggaatgtgtgaggggctgacagcacagtaacgtgcatacatatctgcagggctggaatggaagctttaaaggtggtagtgatttttattttggaagaatcatgttacctttttgttaaataaaatttgtactcaaaa

SEQ ID NO: 499838 - DNA, 336 bp, Homo sapiens
cgtcatacttcttgtgtcttaccttcttcaacgtccctgagaccctgtggcaggacttttgagtgatatcacactgggcctttgaatgtggcagcgcacactggtgcatcatagatctggaaagtgacggcgtcataggagatgaacatgcatctgagcctgctaatcgagaccaccaccgaatgtctaatgtctgtgcctcctatccacctaccctcccggacatgggcaaagccacctcctccctcaacaacgggagagacctcatacaggatgaacccatggatgcttcttgaatgctcgctactataattcctttactcatccccacgcact

SEQ ID NO: 499839 - DNA, 2637 bp, Homo sapiens
acagcggggcggggcgcggggctgaacaagcgcgagggctggctgctgggccgacgaggggcggtgccaggccgtgggtccttagtcaagtgacgcgaagcggccggcctgggcgccgactgcagagccgggaggctggtggtcatgccggggttcctggttcgcatcctccttctgctgctggttctgctgcttctgggccctacgcgcggcttgcgctctcgattccttccttgggcttttcatctgccacggcaagcgcctaagtctcagctgccgcttcacaaaagaggtaccaagactgcaccgaatgagcacgcaagcagcaacaggagtgggagaagaaggaggcggcagcagtggaatgccacccagaggatgtttgaaattgactatagccgggactccttcctcaaggatggccagccatttcgctacatctcaggaagcattcactactcccgtgtgccccgcttctactggaaggaccggctgctgaagatgaagatggctgggctgaacgccatccagacgtatgtgccctggaactttcatgagccctggccaggacagtaccagttttctgaggaccatgatgtggaatattttcttcggctggctcatgagctgggactgctggttatcctgaggcccgggccctacatctgtgcagagtgggaaatgggaggattacctgcttggctgctagagaaagagtctattcttctccgctcctccgacccagattacctggcagctgtggacaagtggttgggagtccttctgcccaagatgaagcctctcctctatcagaatggagggccagttataacagtgcaggttgaaaatgaatatggcagctactttgcctgtgattttgactacctgcgcttcctgcagaagcgctttcgccaccatctgggggatgatgtggttctgtttaccactgatggagcacataaaacattcctgaaatgtggggccctgcagggcctctacaccacggtggactttggaacaggcagcaacatcacagatgctttcctaagccagaggaagtgtgagcccaaaggacccttgatcaattctgaattctatactggctggctagatcactggggccaacctcactccacaatcaagaccgaagcagtggcttcctccctctatgatatacttgcccgtggggcgagtgtgaacttgtacatgtttataggtgggaccaattttgcctattggaatggggccaactcaccctatgcagcacagcccaccagctacgactatgatgccccactgagtgaggctggggacctcactgagaagtattttgctctgcgaaacatcatccagaagtttgaaaaagtaccagaaggtcctatccctccatctacaccaaagtttgcatatggaaaggtcactttggaaaagttaaagacagtgggagcagctctggacattctgtgtccctctgggcccatcaaaagcctttatcccttgacatttatccaggtgaaacagcattatgggtttgtgctgtaccggacaacacttcctcaagattgcagcaacccagcacctctctcttcacccctcaatggagtccacgatcgagcatatgttgctgtggatgggatcccccagggagtccttgagcgaaacaatgtgatcactctgaacataacagggaaagctggagccactctggaccttctggtagagaacatgggacgtgtgaactatggtgcatatatcaacgattttaagggtttggtttctaacctgactctcagttccaatatcctcacggactggacgatctttccactggacactgaggatgcagtgcgcagccacctggggggctggggacaccgtgacagtggccaccatgatgaagcctgggcccacaactcatccaactacacgctcccggccttttatatggggaacttctccattcccagtgggatcccagacttgccccaggacacctttatccagtttcctggatggaccaagggccaggtctggattaatggctttaaccttggccgctattggccagcccggggccctcagttgaccttgtttgtgccccagcacatcctgatgacctcggccccaaacaccatcaccgtgctggaactggagtgggcaccctgcagcagtgatgatccagaactatgtgctgtgacgttcgtggacaggccagttattggctcatctgtgacctacgatcatccctccaaacctgttgaaaaaagactcatgcccccacccccgcaaaaaaacaaagattcatggctggaccatgtatgatgatgaaagcctgtgtctttgagggattctaccctgaacatacctcacagatcctccctgtcatgccacatttcactgattggaatgtggaaatggaaaaggaatttaggatgtgcattttcacctgaggtttccctgcatccctgcagtgccaaagccccaccttcagggaccacctggaatgtgtgaggggctgacagcacagtaacgtgcatacatatctgcagggctggaatggaagctttaaaggtggtagtgatttttattttggaagaatcatgttacctttttgttaaataaaatttgtactcaaaa

SEQ ID NO: 499840 - DNA, 2368 bp, Homo sapiens
gggaactcctgacctcaggcgatccgcccgcctcggcctcccaaagtgctgggattacaggcgtgagcaggattttcattctaacaagttccagaatgccacccagaggatgtttgaaattgactatagccgggactccttcctcaaggatggccagccatttcgctacatctcaggaagcattcactactcccgtgtgccccgcttctactggaaggaccggctgctgaagatgaagatggctgggctgaacgccatccagacgtatgtgccctggaactttcatgagccctggccaggacagtaccagttttctgaggaccatgatgtggaatattttcttcggctggctcatgagctgggactgctggttatcctgaggcccgggccctacatctgtgcagagtgggaaatgggaggattacctgcttggctgctagagaaagagtctattcttctccgctcctccgacccagattacctggcagctgtggacaagtggttgggagtccttctgcccaagatgaagcctctcctctatcagaatggagggccagttataacagtgcaggttgaaaatgaatatggcagctactttgcctgtgattttgactacctgcgcttcctgcagaagcgctttcgccaccatctgggggatgatgtggttctgtttaccactgatggagcacataaaacattcctgaaatgtggggccctgcagggcctctacaccacggtggactttggaacaggcagcaacatcacagatgctttcctaagccagaggaagtgtgagcccaaaggacccttgatcaattctgaattctatactggctggctagatcactggggccaacctcactccacaatcaagaccgaagcagtggcttcctccctctatgatatacttgcccgtggggcgagtgtgaacttgtacatgtttataggtgggaccaattttgcctattggaatggggccaactcaccctatgcagcacagcccaccagctacgactatgatgccccactgagtgaggctggggacctcactgagaagtattttgctctgcgaaacatcatccagaagtttgaaaaagtaccagaaggtcctatccctccatctacaccaaagtttgcatatggaaaggtcactttggaaaagttaaagacagtgggagcagctctggacattctgtgtccctctgggcccatcaaaagcctttatcccttgacatttatccaggtgaaacagcattatgggtttgtgctgtaccggacaacacttcctcaagattgcagcaacccagcacctctctcttcacccctcaatggagtccacgatcgagcatatgttgctgtggatgggatcccccagggagtccttgagcgaaacaatgtgatcactctgaacataacagggaaagctggagccactctggaccttctggtagagaacatgggacgtgtgaactatggtgcatatatcaacgattttaagggtttggtttctaacctgactctcagttccaatatcctcacggactggacgatctttccactggacactgaggatgcagtgcgcagccacctggggggctggggacaccgtgacagtggccaccatgatgaagcctgggcccacaactcatccaactacacgctcccggccttttatatggggaacttctccattcccagtgggatcccagacttgccccaggacacctttatccagtttcctggatggaccaagggccaggtctggattaatggctttaaccttggccgctattggccagcccggggccctcagttgaccttgtttgtgccccagcacatcctgatgacctcggccccaaacaccatcaccgtgctggaactggagtgggcaccctgcagcagtgatgatccagaactatgtgctgtgacgttcgtggacaggccagttattggctcatctgtgacctacgatcatccctccaaacctgttgaaaaaagactcatgcccccacccccgcaaaaaaacaaagattcatggctggaccatgtatgatgatgaaagcctgtgtctttgagggattctaccctgaacatacctcacagatcctccctgtcatgccacatttcactgattggaatgtggaaatggaaaaggaatttaggatgtgcattttcacctgaggtttccctgcatccctgcagtgccaaagccccaccttcagggaccacctggaatgtgtgaggggctgacagcacagtaacgtgcatacatatctgcagggctggaatggaagctttaaaggtggtagtgatttttattttggaagaatcatgttacctttttgttaaataaaatttgtactcaaaa

SEQ ID NO: 499841 - DNA, 2312 bp, Homo sapiens
acagcggggcggggcgcggggctgaacaagcgcgagggctggctgctgggccgacgaggggcggtgccaggccgtgggtccttagtcaagtgacgcgaagcggccggcctgggcgccgactgcagagccgggaggctggtggtcatgccggggttcctggttcgcatcctccttctgctgctggttctgctgcttctgggccctacgcgcggcttgcgcaatgccacccagaggatgtttgaaattgactatagccgggactccttcctcaaggatggccagccatttcgctacatctcaggaagcattcactactcccgtgtgccccgcttctactggaaggaccggctgctgaagatgaagatggctgggctgaacgccatccagacgtatgtgccctggaactttcatgagccctggccaggacagtaccagttttctgaggaccatgatgtggaatattttcttcggctggctcatgagctgggactgctggttatcctgaggcccgggccctacatctgtgcagagtgggaaatgggaggattacctgcttggctgctagagaaagagtctattcttctccgctcctccgacccagattacctggcagctgtggacaagtggttgggagtccttctgcccaagatgaagcctctcctctatcagaatggagggccagttataacagtgcaggcagcaacatcacagatgctttcctaagccagaggaagtgtgagcccaaaggacccttgatcaattctgaattctatactggctggctagatcactggggccaacctcactccacaatcaagaccgaagcagtggcttcctccctctatgatatacttgcccgtggggcgagtgtgaacttgtacatgtttataggtgggaccaattttgcctattggaatggggccaactcaccctatgcagcacagcccaccagctacgactatgatgccccactgagtgaggctggggacctcactgagaagtattttgctctgcgaaacatcatccagaagtttgaaaaagtaccagaaggtcctatccctccatctacaccaaagtttgcatatggaaaggtcactttggaaaagttaaagacagtgggagcagctctggacattctgtgtccctctgggcccatcaaaagcctttatcccttgacatttatccaggtgaaacagcattatgggtttgtgctgtaccggacaacacttcctcaagattgcagcaacccagcacctctctcttcacccctcaatggagtccacgatcgagcatatgttgctgtggatgggatcccccagggagtccttgagcgaaacaatgtgatcactctgaacataacagggaaagctggagccactctggaccttctggtagagaacatgggacgtgtgaactatggtgcatatatcaacgattttaagggtttggtttctaacctgactctcagttccaatatcctcacggactggacgatctttccactggacactgaggatgcagtgcgcagccacctggggggctggggacaccgtgacagtggccaccatgatgaagcctgggcccacaactcatccaactacacgctcccggccttttatatggggaacttctccattcccagtgggatcccagacttgccccaggacacctttatccagtttcctggatggaccaagggccaggtctggattaatggctttaaccttggccgctattggccagcccggggccctcagttgaccttgtttgtgccccagcacatcctgatgacctcggccccaaacaccatcaccgtgctggaactggagtgggcaccctgcagcagtgatgatccagaactatgtgctgtgacgttcgtggacaggccagttattggctcatctgtgacctacgatcatccctccaaacctgttgaaaaaagactcatgcccccacccccgcaaaaaaacaaagattcatggctggaccatgtatgatgatgaaagcctgtgtctttgagggattctaccctgaacatacctcacagatcctccctgtcatgccacatttcactgattggaatgtggaaatggaaaaggaatttaggatgtgcattttcacctgaggtttccctgcatccctgcagtgccaaagccccaccttcagggaccacctggaatgtgtgaggggctgacagcacagtaacgtgcatacatatctgcagggctggaatggaagctttaaaggtggtagtgatttttattttggaagaatcatgttacctttttgttaaataaaatttgtactcaaaa

SEQ ID NO: 499842 - DNA, 864 bp, Homo sapiens
  misc_feature (395)..(396): n is a, c, g, or t
gcctcgcgccgtagccgggctgtgccaaacagcccaattatggacgacttcgatgatcgtgtgtcgcatgcggagaaggtacgcatacgctgctaaaattcatcactcatgcacccccaggggaattttactgactgtattccacattgaccgtccggctactacttacactcaatgaccaatctcctcaagggaacagggcggcagacacattgccttttgccccagttataaccatggatcagttccacgcccttgtgaaagtattacgcaaggatcatgaaggatccagcgtcttaattcacaggagcactgggaccccgcgcgctaatcacgcaggatttttcagatccaatgaaaacaaacaattttccttttcaaatttttgacccacnntcttcacgtgacaaagaaagggccaaaacgggggttttgggaacaaaacccaccacacgagcacacactcaaccatcaaaaaataagtgggtgcgttacactccctcacagtcctacaataaaacagatgatggtgtgaaaaatcacaaaatatgaagcacggatgggggtccgctaccgaaaaaaacaaagacctagactgagcgtgggggcggcaaacaccacacacaacagcacgaaagcacttgcaggcgagagacaccaaacacaacaaagagagacgctgcattgaagaagagcgagggaggcaagacccgtaaaacaaccacaacacgataggggacggtgcgtggctgcttcttctgaagagaggacctcttaaaaatgttacgtgacgcccacaaacaggagagaggtgagattgagtgggagaggggagggaaacagcaaaacaaaaccacgagaggg

SEQ ID NO: 499843 - DNA, 2145 bp, Homo sapiens
agctcggtcgcttgtgcgttccgctccggccgccctttgcgcttggatccacttccccatctgtaacgaggtgttgagacgagaatgccacccagaggatgtttgaaattgactatagccgggactccttcctcaaggatggccagccatttcgctacatctcaggaagcattcactactcccgtgtgccccgcttctactggaaggaccggctgctgaagatgaagatggctgggctgaacgccatccagacattacctggcagctgtggacaagtggttgggagtccttctgcccaagatgaagcctctcctctatcagaatggagggccagttataacagtgcaggttgaaaatgaatatggcagctactttgcctgtgattttgactacctgcgcttcctgcagaagcgctttcgccaccatctgggggatgatgtggttctgtttaccactgatggagcacataaaacattcctgaaatgtggggccctgcagggcctctacaccacggtggactttggaacaggcagcaacatcacagatgctttcctaagccagaggaagtgtgagcccaaaggacccttgatcaattctgaattctatactggctggctagatcactggggccaacctcactccacaatcaagaccgaagcagtggcttcctccctctatgatatacttgcccgtggggcgagtgtgaacttgtacatgtttataggtgggaccaattttgcctattggaatggggccaactcaccctatgcagcacagcccaccagctacgactatgatgccccactgagtgaggctggggacctcactgagaagtattttgctctgcgaaacatcatccagaagtttgaaaaagtaccagaaggtcctatccctccatctacaccaaagtttgcatatggaaaggtcactttggaaaagttaaagacagtgggagcagctctggacattctgtgtccctctgggcccatcaaaagcctttatcccttgacatttatccaggtgaaacagcattatgggtttgtgctgtaccggacaacacttcctcaagattgcagcaacccagcacctctctcttcacccctcaatggagtccacgatcgagcatatgttgctgtggatgggatcccccagggagtccttgagcgaaacaatgtgatcactctgaacataacagggaaagctggagccactctggaccttctggtagagaacatgggacgtgtgaactatggtgcatatatcaacgattttaagggtttggtttctaacctgactctcagttccaatatcctcacggactggacgatctttccactggacactgaggatgcagtgcgcagccacctggggggctggggacaccgtgacagtggccaccatgatgaagcctgggcccacaactcatccaactacacgctcccggccttttatatggggaacttctccattcccagtgggatcccagacttgccccaggacacctttatccagtttcctggatggaccaagggccaggtctggattaatggctttaaccttggccgctattggccagcccggggccctcagttgaccttgtttgtgccccagcacatcctgatgacctcggccccaaacaccatcaccgtgctggaactggagtgggcaccctgcagcagtgatgatccagaactatgtgctgtgacgttcgtggacaggccagttattggctcatctgtgacctacgatcatccctccaaacctgttgaaaaaagactcatgcccccacccccgcaaaaaaacaaagattcatggctggaccatgtatgatgatgaaagcctgtgtctttgagggattctaccctgaacatacctcacagatcctccctgtcatgccacatttcactgattggaatgtggaaatggaaaaggaatttaggatgtgcattttcacctgaggtttccctgcatccctgcagtgccaaagccccaccttcagggaccacctggaatgtgtgaggggctgacagcacagtaacgtgcatacatatctgcagggctggaatggaagctttaaaggtggtagtgatttttattttggaagaatcatgttacctttttgttaaataaaatttgtactcaaaa

SEQ ID NO: 499844 - DNA, 338 bp, Homo sapiens
  misc_feature (65)..(65): n is a, c, g, or t
  misc_feature (337)..(338): n is a, c, g, or t
atagaatgaaaagcaatttgaggctgggtaattgagaaagtcctcaagcttccgtatttcccagnctttgttcaccttatcccctccccttctgcccaaagttttcagggaataatagagttaggagaaggtctgggaagtccaaagtccctctgagtaatttcataattaaacccttctggtatgtttctttaataaaagtaggtaagaacagcagatacccaatgccctcatgttgtcaagtgtgcatcattttaatgagacaaaatgagatgagctgatgtaataggttacagaaaatattaccatcaacattcatcactgatataaattcaann

SEQ ID NO: 499845 - DNA, 2016 bp, Homo sapiens
acagcggggcggggcgcggggctgaacaagcgcgagggctggctgctgggccgacgaggggcggtgccaggccgtgggtccttagtcaagtgacgcgaagcggccggcctgggcgccgactgcagagccgggaggctggtggtcatgccggggttcctggttcgcatcctccttctgctgctggttctgctgcttctgggccctacgcgcggcttgcgcgttgaaaatgaatatggcagctactttgcctgtgattttgactacctgcgcttcctgcagaagcgctttcgccaccatctgggggatgatgtggttctgtttaccactgatggagcacataaaacattcctgaaatgtggggccctgcagggcctctacaccacggtggactttggaacaggcagcaacatcacagatgctttcctaagccagaggaagtgtgagcccaaaggacccttgatcaattctgaattctatactggctggctagatcactggggccaacctcactccacaatcaagaccgaagcagtggcttcctccctctatgatatacttgcccgtggggcgagtgtgaacttgtacatgtttataggtgggaccaattttgcctattggaatggggccaactcaccctatgcagcacagcccaccagctacgactatgatgccccactgagtgaggctggggacctcactgagaagtattttgctctgcgaaacatcatccagaagtttgaaaaagtaccagaaggtcctatccctccatctacaccaaagtttgcatatggaaaggtcactttggaaaagttaaagacagtgggagcagctctggacattctgtgtccctctgggcccatcaaaagcctttatcccttgacatttatccaggtgaaacagcattatgggtttgtgctgtaccggacaacacttcctcaagattgcagcaacccagcacctctctcttcacccctcaatggagtccacgatcgagcatatgttgctgtggatgggatcccccagggagtccttgagcgaaacaatgtgatcactctgaacataacagggaaagctggagccactctggaccttctggtagagaacatgggacgtgtgaactatggtgcatatatcaacgattttaagggtttggtttctaacctgactctcagttccaatatcctcacggactggacgatctttccactggacactgaggatgcagtgcgcagccacctggggggctggggacaccgtgacagtggccaccatgatgaagcctgggcccacaactcatccaactacacgctcccggccttttatatggggaacttctccattcccagtgggatcccagacttgccccaggacacctttatccagtttcctggatggaccaagggccaggtctggattaatggctttaaccttggccgctattggccagcccggggccctcagttgaccttgtttgtgccccagcacatcctgatgacctcggccccaaacaccatcaccgtgctggaactggagtgggcaccctgcagcagtgatgatccagaactatgtgctgtgacgttcgtggacaggccagttattggctcatctgtgacctacgatcatccctccaaacctgttgaaaaaagactcatgcccccacccccgcaaaaaaacaaagattcatggctggaccatgtatgatgatgaaagcctgtgtctttgagggattctaccctgaacatacctcacagatcctccctgtcatgccacatttcactgattggaatgtggaaatggaaaaggaatttaggatgtgcattttcacctgaggtttccctgcatccctgcagtgccaaagccccaccttcagggaccacctggaatgtgtgaggggctgacagcacagtaacgtgcatacatatctgcagggctggaatggaagctttaaaggtggtagtgatttttattttggaagaatcatgttacctttttgttaaataaaatttgtactcaaaa

SEQ ID NO: 499846 - DNA, 246 bp, Homo sapiens
ggagttcaggtgggggacgttgcgccaatgcaacctacatcaagagcaccatgacttaccatgctacattcgtggctaaaccatttggctccgcgaggcttgaggtggcaggactgctcgctggagagctgctgcaggaaagaacattcagaggtgtccagcactacaaagctgactgcatactgtctaacacagatcacctacctctgatgcgacccgctcccacactcgatggaacactgactc

SEQ ID NO: 499847 - DNA, 2176 bp, Homo sapiens
agctcggtcgcttgtgcgttccgctccggccgccctttgcgcttggatccacttccccatctgtaacgaggtgttgagacgagaatgccacccagaggatgtttgaaattgactatagccgggactccttcctcaaggatggccagccatttcgctacatctcaggaagcattcactactcccgtgtgccccgcttctactggaaggaccggctgctgaagatgaagatggctgggctgaacgccatccagacgtatgtgccctggaactttcatgagccctggccaggacagtaccagttttctgaggaccatgatgtggaatattttcttcggctggctcatgagctgggactgctggttatcctgaggcccgggccctacatctgtgcagagtgggaaatgggaggattacctgcttggctgctagagaaagagtctattcttctccgctcctccgacccagattacctggcagctgtggacaagtggttgggagtccttctgcccaagatgaagcctctcctctatcagaatggagggccagttataacagtgcaggcagcaacatcacagatgctttcctaagccagaggaagtgtgagcccaaaggacccttgatcaattctgaattctatactggctggctagatcactggggccaacctcactccacaatcaagaccgaagcagtggcttcctccctctatgatatacttgcccgtggggcgagtgtgaacttgtacatgtttataggtgggaccaattttgcctattggaatggggccaactcaccctatgcagcacagcccaccagctacgactatgatgccccactgagtgaggctggggacctcactgagaagtattttgctctgcgaaacatcatccagaagtttgaaaaagtaccagaaggtcctatccctccatctacaccaaagtttgcatatggaaaggtcactttggaaaagttaaagacagtgggagcagctctggacattctgtgtccctctgggcccatcaaaagcctttatcccttgacatttatccaggtgaaacagcattatgggtttgtgctgtaccggacaacacttcctcaagattgcagcaacccagcacctctctcttcacccctcaatggagtccacgatcgagcatatgttgctgtggatgggatcccccagggagtccttgagcgaaacaatgtgatcactctgaacataacagggaaagctggagccactctggaccttctggtagagaacatgggacgtgtgaactatggtgcatatatcaacgattttaagggtttggtttctaacctgactctcagttccaatatcctcacggactggacgatctttccactggacactgaggatgcagtgcgcagccacctggggggctggggacaccgtgacagtggccaccatgatgaagcctgggcccacaactcatccaactacacgctcccggccttttatatggggaacttctccattcccagtgggatcccagacttgccccaggacacctttatccagtttcctggatggaccaagggccaggtctggattaatggctttaaccttggccgctattggccagcccggggccctcagttgaccttgtttgtgccccagcacatcctgatgacctcggccccaaacaccatcaccgtgctggaactggagtgggcaccctgcagcagtgatgatccagaactatgtgctgtgacgttcgtggacaggccagttattggctcatctgtgacctacgatcatccctccaaacctgttgaaaaaagactcatgcccccacccccgcaaaaaaacaaagattcatggctggaccatgtatgatgatgaaagcctgtgtctttgagggattctaccctgaacatacctcacagatcctccctgtcatgccacatttcactgattggaatgtggaaatggaaaaggaatttaggatgtgcattttcacctgaggtttccctgcatccctgcagtgccaaagccccaccttcagggaccacctggaatgtgtgaggggctgacagcacagtaacgtgcatacatatctgcagggctggaatggaagctttaaaggtggtagtgatttttattttggaagaatcatgttacctttttgttaaataaaatttgtactcaaaa

SEQ ID NO: 499848 - DNA, 492 bp, Homo sapiens
  misc_feature (51)..(51): n is a, c, g, or t
  misc_feature (64)..(64): n is a, c, g, or t
  misc_feature (107)..(107): n is a, c, g, or t
  misc_feature (164)..(164): n is a, c, g, or t
  misc_feature (201)..(201): n is a, c, g, or t
  misc_feature (204)..(204): n is a, c, g, or t
  misc_feature (208)..(209): n is a, c, g, or t
  misc_feature (232)..(232): n is a, c, g, or t
  misc_feature (236)..(236): n is a, c, g, or t
  misc_feature (254)..(254): n is a, c, g, or t
  misc_feature (271)..(271): n is a, c, g, or t
  misc_feature (280)..(280): n is a, c, g, or t
  misc_feature (283)..(283): n is a, c, g, or t
  misc_feature (460)..(460): n is a, c, g, or t
tggccgaactggagggcgccggggaacggggctcgggcggtccccgaagcncggcggacgggcntctggggtgtctgcggcggcgccgggggaaagggctggggatngggcgcctaaccgggcggtggccggggcctcggccaagttcgcggggctgcaagacntgggcgtgacaaaagcaaagacctaaaagaaaacctnaanaaanncaaggaaccgctcaaagccaaanaaanaaattccaaaaaaaaaanagtgtgctgctgccaantcttcaatnaancctccccttcttggaactgcaagggaagccgcggctggaattccaacaatcggtaatcaaaaaactgcgggaaaaactgctggaacaaatttcaaccaacgcttcggaagggaaagctaaagaaaagtaaaaaaaactggaaaaacttctagaaaaaaacttttctctggtgaaaangccgtccctacaacccgtggtgatgtgcgtca

SEQ ID NO: 499849 - DNA, 467 bp, Homo sapiens
  misc_feature (454)..(454): n is a, c, g, or t
cttccccgcccctcccctcccccgccgccgcccccagccagctctgcctcgcagcctggggagggcggcgtggggcccgcgcggctgcggcgcgctcccggggaacttttgcctggccggggcccaggtgcggctgagaggcgcgggggccggcggggtccagccaaaagcggacacacctcgaagctggcctcatcaatcctcctctcaccgggcgcccctgctagggggatccgacctccagctgccaagatgtgtgggcaggaggggcgcgagcggagcgatggacgcccgcagggccgcgcgaacccggggccttagacgcgggtgccgccagtcccagggatcctccgggtcgcgcctccctgcaggcgctcctcgcggcgcggggctctagcgtgctgcagcctgcccggagaccgcaaactcccgcagccagagtttcccgcagctntgggaggcggccg

SEQ ID NO: 499850 - DNA, 394 bp, Homo sapiens
ccggttggtttggttgggggagctggttggggtccttggggttgaacgtggttggggatgggcaggatcctggaatccgttaccaggccaaaaggcagatcttggggaaaacctttacgggcaggaccataaccctggagggggagcccagggacaccatcgaaaaggggaaggccaggatccaggatagggaaggcattccccccgaccagcaaaggttaatttttgcaggcaggcagttgatggccctgcgtctgaaagggggaatgcaaatcttggggaagaccttgaccggcaggaccataaccctgaaagtggagccaagggacaccatcgaaattgtgaaggccaagatccaggttaaagaagcgatccttccggaccagaagaggct

SEQ ID NO: 499851 - DNA, 1038 bp, Homo sapiens
gcctcgcgcaggacgtgtgcgatggactagagtccaatgagatagcaaatcgagtcttaaataagtccggggagaaagacgcccggggtagatttagagtgagcagccttgcgacgggagtggattcagaagccgcatagagtttttttcctccccatctcagtagcacggagtccgaattaattggatttcattcactggcggcaggaacaaaaactatctgggcagcttcatcgagagagattcacttgacactaatgagccagcggctgcgaagctgggtgcagagagaacctccggcttatacttctgtctcagtctgccccaaccgatagcctcggactatgggtaaggcagaggcggaattaaagccccgctccgagcagcggcagcttcgccgcgcggtgcgctcggcctatgcctagacccgaggggcgtctggtaggcaccccgccctactcccgtcagcttcggaccccgcatggatcgatacgctcagtacccgtgcccttcgccgtcggaacatggctgacccagcaaagacggagagagaagatgactcaacggaacccaagctgcgagcctgcgccacacgagccgggctgcctgctgccaggacttgccgggccgacaggaagcctatacggacgtcgatcgcaccatcgagcaccggacaattcacacgttgcgccttcccccggggtatcactggctggcggcgtccttgacgcacggtggtaacccttcccggtatggcgcctctcgtccttcagggccgcgggtcgacgtagacctggggcccggtatgctgcccgggcgcctgttgacatcccggctcgacaagaagaggagcctcccaaccggaacaaacacggccaggcagtcgcacatgggaacccggaagagacatcacccgccaaggtagcaagtcacacgcaaccatcggcggcgctgccaggtaacgcaaacaaagccacgacaggaccgaaggagcacagcacggaggagtacaagaagcgttgcacaagacagcaacag

SEQ ID NO: 499852 - DNA, 91 bp, Homo sapiens
  misc_feature (44)..(44): n is a, c, g, or t
gtattatatgtttaatttggtttcctgttttatatttagaaaanaaaaatttattagtcactctgttatggcattaatctgtttcaagcgg

SEQ ID NO: 499853 - DNA, 955 bp, Homo sapiens
ccttgtggaccggccctgtcccgtgcgcgtggtgattccgggcccaaggaaaggcccccgttcttgtttcccccgcgcacgtgtgaccccccgtaaggccctgctgcccctgtcgccccctgggtgtttctcttgttccggcacggtaacatccaaggggcatctttcaaggacatcaatccccgggcccggctcctgggcgcccctcgcccaggtggtcttcccgggatccctatcctgttttagaaccggtctggactggttcattggcccccggagggcattcacccgggccccatttggggtattgcggccagaaaggccccaactccaaccattggccaaagtgctcccccgtgggccacccaagcccgagaggtcaccaatcgtgtgctgccccggagagagaaagacctggaggaccctgggccaaacattggccccgggccataccagggaacattatggccccccgtgttatcttgccccaccaaccctctggggaccccagaaagaccccgtggttgaaacattgccctcccggctgccccaagaaaggtgtatactcctccagccccaccagagacttgtggtttggttgtggttggcttggaggttggcccgaattgcacccaaccccttcttgaaggctggcccgggcgcgttacccaccaaatatattaaggcccaagaggaactgcctggcccacgagtaccggggtgtggcccatgaatccctgtggagccatcccttttgggaggtggccaacccacccagccacaatctggccaaacccctcccacccatcccgccagagatgccccctgctggcccgccgaaatgggtcttccttgctgcccccccgactggacgtctccggggaacccagactgtgcccggagaaagagaactagtgctgagggccctcccattaagatttgtgtttatgcccca

SEQ ID NO: 499854 - DNA, 196 bp, Homo sapiens
tagctgtcagcaggaccttacaccgtgtgagaatcggttcctggaaagtaactgttacagttttgagcctggatgatgcttcttcctctcagcacaccactgcatccaacattttaacaaaaggtcagaagaattctctgatcctgagtagctgggactataggcgcacgcaaccatacccaactacttttttttt

SEQ ID NO: 499855 - DNA, 151 bp, Homo sapiens
tgcttatagcaggtggcagattattttaattaggaaacaaatgcttagcaggagaggagagccaaagaagtgacagggaagctacatggttacaacatgatttgtgacctccgccaagcacagtggtggcaggtcctagctgctactgttg

SEQ ID NO: 499856 - DNA, 445 bp, Homo sapiens
ctcataggagaagcgcgattaagacgcgtactccttagctaatgtcctcccgtcatcttactcggctgacttcttagtcctcatctagtggtggtatgccttatacaagacatcttgaggccagcgcggtttgtataccctatacttcactacctctgagtcgaaatcagaagaagtggaacctgtgtcccagactacatcatcttcggaatctactgagtccacatcaacatacatgcatctaatagaggaacttgcgactctccccagaaggagctatcctgatctcttcttcaagaaagttgccgccactgactaccgtcctcatcctcctcctacatctagaagagcctatactagaatcctcctcattaatctacagcatcttcatccgcagcactgctcggggttctagcttgtaagcttgagatatgggacacgaaat

SEQ ID NO: 499857 - DNA, 844 bp, Homo sapiens
tcctgtcaccgctggtttcctgggccgggcgggcagtgcagtggtgactgtgatgtggctgcaatgggcctgggacatggtgttgccctgccagccccgcttgctcgctggtctaatgtctgccgccctgggccagccgccgctgccgctgctgctgccactattgctgctgcttctgcgcgctgcagccctgccatctgtggagcctggcctggtgtgtgatgcccctgtgctgctgttgcctgatgtgcccctgtgtggtctggcccaagtgtgtgcttggacttatgctgtgtgctgccttaaccacttcacctggtgaccatgcgcacctgtgcctgctggtgaaccagacccacatgcgctctcgactgcttgtctcctgtgggacccgcatgcgctgtagcttgagaagtacttgcagacaagatagatagccctgtgatgctagcaggactttgcacagttgtgagaaggcatgtgctacagcaagggccaatccccattgggatgcgctaggtagcagggaggtgttccctagtgatgctgtgcaagctgatgcacacaacccaccaaccaacaagggtttgtagcccttcctgcttgcctgcctgtgtgaattttgtgagtgagggccctgcatggtgcctgaaggctgccggtttctttgcaccaagtgagctgcatttgaccactagtgatgagttcaaccccttgagggcgttcagggcggcccaggaggcctgcagctcccagggcctcatcctgcatgtgctcggtgcatctcttacctgtggctcggacgggcccgggtgtggacgatttgcagccctcaaggacccga

SEQ ID NO: 499858 - DNA, 267 bp, Homo sapiens
  misc_feature (13)..(13): n is a, c, g, or t
  misc_feature (47)..(47): n is a, c, g, or t
  misc_feature (117)..(117): n is a, c, g, or t
  misc_feature (246)..(246): n is a, c, g, or t
gcggaagagatgntgagagagtggagacactatccgcttccatccgncgcgcagaccctgccggagccgctgccgctatggatgatcgagaggatctggtgtaccaggcgaagtggnccgagcaggctgagcgatacgacgaaatggtggagtcaatgaagaaagtagcagggatggatgtggagctgacagttgaagaaagaaacctcctatctgttgcatataagaatgtgattggagcttagnagagcctcctggcagaatgta

SEQ ID NO: 499859 - DNA, 194 bp, Homo sapiens
actcctaccccatacatacacctacccacctgtaaggcaggcttcctctctcaccttcattcttgcaaaagcctcaagtctctctgaacagagctggcccaaggcctgggcccatccttctgcttcctgtgttactgggcagcccaggggcccatcacccacctcagacaccgtcgacgcggccgcgaatttag

SEQ ID NO: 499860 - DNA, 907 bp, Homo sapiens
cagcttctggggctggggcccctggcagctgggcaggccgtgctgacctcgacctccgccgtgcgggcccgaccggtgagtcatgcccggcagtcgcagtgaccctggcctgcagcctctccctccacctctccctgcccccagcgccaggctgcggtgctgccgctctggtggctgtgcggctggggccctcagtgctggccatgtgctggcatggcctgcctgtgggcctgggtcctgctgcctgcgctggcttgagtggctgctgagcgagcctgtgagcgctggctgcaagctgctggcgaactggaggagcacccgtacagcgcggcggggcgtctcgcgtgctcgagcccgccgctgcagctctactggacctggctgctccagtggatccctgctctggattggcccccaagctccatcacccttgctggggctcgccgtcaacgtggtcaccacgctcgtgctcatctcctactgtcccacgtgcaccgaagaggcaccatactggacataccttttatgtgcactggggactttttatttaccagtcactggatgctattgatgggaaacaagccagaagacaaactcttgttccccctttagggggagctcttttgaccattggctgttgactctctttccacagtattatggcagtggggaccctcaatttgccgctcgcttagggaaacttaattccttgactgggtataaaatatcatggctacattataatatggggaatgataagcgagtagaaagtgggcggctcaatgggccgagaatttaattgttaacacagagccaattgtttgaaggaattatgggaaaccccgaaagttatacgaataagaataaggaattaaaaacgaaaattaacgcggaccctgaataaatt

SEQ ID NO: 499861 - DNA, 191 bp, Homo sapiens
ttcgattgtgcgtgcaacttagtgagacctcatctctgcaaaaaaattagccaggcaaggcgaggtaggagggtcacttaagcctgggaggcagaagttgcagtgagctcagatcaagtcactgcactccagcctaggcaacaaagcaagagcctgtctcagaaaaaacaaaaaaggggctgcatgtggag

SEQ ID NO: 499862 - DNA, 1205 bp, Homo sapiens
actattctctacaaaccacaaagatattggaacactatacctattattcggcgcatgagctggagtcctaggcacagctctaagccatccttattcagagtccgagactgggtccagaccaggcgaaccgttctagtgtaacgaccacatctacaacgtttatcggtcacagcccatgacatttgtagataatcgttcgttcataggtaatacccatcatagatcggatggcttctggctaactgatctagttcccacgtaataattctggtgtcccccgagtatggtcgtttccgccgcgattcaacaacgagtaagcttctgacgtcttactctcgcctctctccttacttccatgctcgtcatctgcttatagtgcgaggcctggagcaggaacgaggttgaacagtcataccctccctttagcagtggaacttactcctcacctctggagcctccgatagaccctaatccatcttctccttacacctagcaggtgtctcctctatcttaggggccatcaagtttcatcacaatcaattatcaatataaaaccccctgccataacccaataccaaacgcccctcttcgtctgatccgtcctaatcactagcacgtcctacttctccttatttctcccagtcctaggctgctggcatcaccgagtatacttaacagaccgcagtctcaaagcaccttcttcgagccgaccggaggaggagaacccaattctataccaaacacctattctgatctctcgggtcaccctgaagtttatacattccttattctaaccaggcttcgaataatctccatattgtaacttaataatcggaaaacagaccttggcttcataggtatggctcgagagcttgatatcaatggactcccaagggcattacgcgtgtttacacccaacatttatttacgctacgaattaaacattcaacaacacacatattttaactccgaacaaatatatacccactccacacgaggataaaaactacgtaattaccacacacagaggacatacaccaactgcacaccttacataacagatatacttcactatgaccacatccactcatacacaacaaactactacacacaaacaatgacactccatcaccagtagactctaactatcagctctgcacaacaacattctactcccccctccataacttatcctgatcctatcc

SEQ ID NO: 499863 - DNA, 86 bp, Homo sapiens
actgaagacagtgccacttacttttgtgctcttggggaactaaccgaccgggggcccacttacaccctttgacagcacaactcttc

SEQ ID NO: 499864 - DNA, 103 bp, Homo sapiens
  misc_feature (7)..(7): n is a, c, g, or t
tcatgtngtttaaccaggatttttttaatctcaaaaaacctagtaataacaaggcaatcagtggttaaactgaactttacatataggggaattccattggggg

SEQ ID NO: 499865 - DNA, 188 bp, Homo sapiens
ccggggggggggggggttttttgggcccacgggccctttcccccccaaaatttttcccctggggggggggggccccaatttggggggtttttttggccccaaggggggggggaaacgccccttttttttttttttttggcccggggggttttttttttttttttttttttaaacccccccccccctta

SEQ ID NO: 499866 - DNA, 403 bp, Homo sapiens
aggatctttggagcaggacactggggtgggacattcattgctgcacgtggacgctgcggaattgggtgttgccaggctcagcactcagcacctttctgcacgtggatggtgtggaactgggcattgccggctcagcactcagacctttctgcacgtggacgctgcggaactgggtattgccgtgccgaaagtggacgccgcggaattgggtggtggtgtgccgggctcagcactcagtaccttatccgcacgtggacgctgtggaactgggtatagccggactcagcactcagcacctatctggggttacacgcatgctgagaactaccttgaggcctcatgggctcaggctggtaactctagaaaccaaaactcaggagccacaggccttccttgtctggac

SEQ ID NO: 499867 - DNA, 395 bp, Homo sapiens
  misc_feature (6)..(6): n is a, c, g, or t
  misc_feature (23)..(23): n is a, c, g, or t
gggggngtttttttttttaaacntccccaaattgggtggggcccccccttttttcgaggttgggggccctttttaaaaggtttttttttgacccctttatttcctggcccccccccccccaaaagggtgggggttttttcccgggaaaatttttccccccggggggtttttttttgggggggggggggggccttccccccccttttgagggtggggggccattttccccccattggggggggcccccggggggtttttttttcccttttttcccccaccccccaaaaaggggggccccccccccccccccttttttccccccccccctttggggcccgggtttttttttttttttttacccccccccccaaaaaaaaaaaaaggggggcccgtga

SEQ ID NO: 499868 - DNA, 569 bp, Homo sapiens
cagcgtgccagcacccccccgtggtgaccatcgctccagaccaaaaccgtgaatggtgtctggaggagtgagagccggcaggatgccggctccaggagcagcagtggaggtcgggaaccgcctcaattgtgtgagcccccagattccgctcaggagacaggcgaggtggaccagccaatccccatcgcacgcctggctcagcaccaccacgtagcccgttcgagccctcataccccccagacatcacgattgatgcaagaggattttccacaggcatttaccccgggcccagacttacaaaaacccttcccaatgaacggaaaaccctggtttggtaactcaaacggtttgggagttgacgccacaacacatgtataaaaaccgatgcaaacacgaaggagaagcataatcacctgacagcaatgacttaccagagaccctaacaccagaggccagcacagacagacacctaccctgaactagatacctacaccattggcactacgcaacgattcgtggacccatagaggaaaacaaccgagacacagcagggacctggcagcacccta

SEQ ID NO: 499869 - DNA, 352 bp, Homo sapiens
cctagaggaccggcgtgtgttacttgtgtgtacgtaatatatgtcagagttagatctgctggtgtgaaagaagctagtgatgcagtatggcagatgcatgatatggaaatagaagcgatactcagttagccaagaaatatcgtggattatactgataaactgatttgttaacaggaaattttagcattcagtcatataacatctggttatcaatgcacgtatacacaatacatacttgagtggaggcaagttcaccacgatgagcaatagagtagaaactatatcttaaactagttgacctagatcgtattaatagctacttaagatgtctcaaccgataggacgctattgc

SEQ ID NO: 499870 - DNA, 225 bp, Homo sapiens
atggctgcacgccgctggtcgctcaagatcccgcccacgtgacccccgcatcacgacaccaagccgagtgcatcccgttcttccgctccatgcccggcttgcactgggagccacatcagcatccgcaaccagatcaacgcgctcacttccttcgttgacgccagcatggtgtacggcagcgagaagcccctggacaggaacctgcgcaaacatgtccaagcagct

SEQ ID NO: 499871 - DNA, 613 bp, Homo sapiens
cacggtgaagagacatgagaggtgtgcatttgccagggaaaatgctatctcaatgatccatgagaaaatgaatagcctcgaaaagaatgtcctgagtgtttgatatcagcactggatggtagaaccttgtggctcgattgtgacctctgtatttgaacgttaactgttccccgtttggtattaaaacgtgtcagggctgagtgtacgtgggaattcctcatagagggctgaaaagaaacccaaggttgtttgggtctgggcgggtctgacaagggtggcgaaacagtccaagccgtaggaccacagtttccttatcattagctagatgtcttggggccaaaaccaccgtggggctgttactgtgctttgtgaggtgcgaaggcggttgtgcatttttacgccttgtaaatgtatttcaattcttaatttatgtaagggttttttggtaccgcaattctcgatttcttgggaagagatgaacaaccaaattgggtttctaactggttatgtgagaacattagcgcccccagcaaacacggtcatttgtggttaggaacaactacaagtgcctgccgataaccaaaaaaaaaaacacaaacaacaaaaacaacag

SEQ ID NO: 499872 - DNA, 200 bp, Homo sapiens
gatcgctcgacatcgagaagacttgttttttctctttgcaagcttaagatctttctctcgttcctgctctctttctatctctcactctatcattctcgatctcgctctctccctccctcgcacgttttctctctgtgtctatcgctcacgccctctatctatctttctatatgtatctatcactctctctatctctctat

SEQ ID NO: 499873 - DNA, 434 bp, Homo sapiens
ctgaaggacgagggatgggttttcatgtaaccaagagtattccatttttactaaggcagtgttttcacctaatatgctatgttagaagtccaggcagagccattaaaacattcctgtgaaaggcaaaaaaaaaaaaaaaaaaaaaaaaaaaaaaaaaaaaaaataaaaaaaaaaaaaaaaaaaaaaaaaaaaacaaaaaaaacaaaaaaaaaaaaaaaaaatttaataaaaaaaaaaaaaaaaaaaaaaaaaaacttgtgggcccttttggcccatccctttttaaacttggcaaagtttttacatgcggcccaaattggggccaatttggccaatatccctttatggggggctatttaaaaatcctgggcccctgttttaaaaacgtagacggggaaaaacctggggggtccccaattaaaaccctttggaaa

SEQ ID NO: 499874 - DNA, 182 bp, Homo sapiens
  misc_feature (151)..(151): n is a, c, g, or t
  misc_feature (167)..(167): n is a, c, g, or t
aggatcatcccgtctgggtagctgggattgtatggtgctgcaactatgcccggctaatttttgtatttttagtggagatgagttttgccatgttggccaggctggtcttgaactcctgactccaggtgatccaccctcctcagcctcccanaagtgctgggattacnaggcgtgacgcaccc

SEQ ID NO: 499875 - DNA, 132 bp, Homo sapiens
atctatacggaccgatctatacactttatactggacctatcttactacctatctatactacctatctatactacctatctatactcctatctatactacatatctatactgacctatctatacctccgcgcc

SEQ ID NO: 499876 - DNA, 772 bp, Homo sapiens
  misc_feature (53)..(53): n is a, c, g, or t
  misc_feature (57)..(57): n is a, c, g, or t
  misc_feature (77)..(77): n is a, c, g, or t
  misc_feature (80)..(80): n is a, c, g, or t
  misc_feature (98)..(98): n is a, c, g, or t
  misc_feature (102)..(102): n is a, c, g, or t
  misc_feature (109)..(110): n is a, c, g, or t
  misc_feature (162)..(162): n is a, c, g, or t
  misc_feature (182)..(182): n is a, c, g, or t
atgagcagctcagaggaggtgtcctggatttcctggttctgtgggctccgtgncaantgaattcttctgtgaagtgnatnaagactacatccaggacnaatnaatcttnnctggactcaatgagcaggtccctcactatcgacaagctctagacatgatctnggacctggagcctgatgaanaactggaagacaaccccaaccagagtgacctgattgagcaggcagctcgtagatgctttatggattgatccacgcccgctacatccgttaccaaccgtggcatcgtccacagatcgattggaaaagtaccagcaaggagactatcggttactagtctctcagctgtgctactagtcgagaagccgacgctcaatagccttcccaatctggcactatctcagaacatgcaccgaggtcgaagcacagtggatagaagactgctacgtgccaccaagtgcataggatgtgtacacaccacaagtcatcaagacaccatcacacggatggcgcctacattcggcagctagtattccctcacatgctcattcatggtgcatcccgagtaccggcccaagagacctgccaaccagtgtatgtgccacaggctctacaggtgttcaagatccatgcacgatggcgatacacatgctgcagatccaagcgcagccagcaacttcaagagcccacgtcaagacgatgtcggtgattccctcccccaccgtgtcctgcagtctatgacatgtcctttcttttagccaccctttcaggca

SEQ ID NO: 499877 - DNA, 311 bp, Homo sapiens
gagcagtataatggtcagtagaacaacagccagctactgggattaatcccaggactgcagtgatctcagagggtagattcccaggtccacctctacctttcccaactccagagtctctagtaactatgagtaaccatcaagagaagaaataactcaaggcatccacaccactctatgtcaacatacctgagagaaaacatttgctaaaaaggcagtggccttggagagccagctgaatctacaactctggcacgaaatacacaaagtaagcctggggccgggagtggtggctcatgcctataaccctagca

SEQ ID NO: 499878 - DNA, 954 bp, Homo sapiens
gctgattaagtggctagaaacttgacagctagagctgtgggacaactgcattttcttaagttctggtgtaatgtggccgggcgcagtggctcatgcctgtaatcccggcactttgggaggccgaggcgggcagatcacgaggtcaggagatcgggaccatcctggctaacacggtgaaaccccgtctctgctaaaagtacaaaaaattagccgggtgtggtggtgggtgtctgtggtcccggctactcgggaggctgaggcaggagagtggcatgaacccgggaggtggaggttgcagtgggccgagatcgcgccactgcactccaggcctgggcgacagcgagactccgtctcaaaataaaaaaaaaaagttctggtataatgtaacttgacatttgagatataaaaccaatgggataaaagttctgataaaagttggtcttgatagatcaactagctttattatatgaatatgcagtgtatatcctgtagtatttaataatgagcaacttacagaaattaaaagagatcagtagactagatagcaattctaatctgcaaaatgatgttcaaaacgtactcttatgatgctgtgtaccttagagcacaaaagatattcttcgccggacaatgcaaactttagcactggtaggccttaatcctaaaagactgccagatagtggacagtggccttaaaataaaggaaatagagggtcgaatatacacaaacaacggcgaagaaaggcaaatacgaaaggaaacccaacgaagaaagaacagaaagagacaggcaaaggacgaagaaaaggaagcagagacaaaaaacaaaacaaaaaaaaagagaaacaccaaagagaacagaacgaccaaaccagcagaaagcggaagaacgaaagagaacaacaacaaacaaaaagaaaaagcaacacacaagcagaacaacacagacggaag

SEQ ID NO: 499879 - DNA, 414 bp, Homo sapiens
agcccggatactcatctatggaggacaaaaggctttccatatgtgagaaaaacttggaagtctcatagtactcagcgagacaactgagcagcatgtcagtgtgatgcattcagttggatggaacattctcaatcagtccttccactctaagtaaatatttgtttctcacagaacacaaggcagttcaaagggcctctggttagagatttataggtgtatgaatgggaaacatcatacaagcagtgaaaacaaaaatctttccaggttgtcggattttctccttctaggtcttataaaaagcaactagacatctttaatttaaaaaatacatgcacatatatacaatagtgataggaatgttatttttatccaaaacattatagagtttatctcagatgggcacacattatggag

SEQ ID NO: 499880 - DNA, 425 bp, Homo sapiens
tacagactccccataagcgtaaggatagccttccactaggtccttaaggaggtgatagtcatacgctgtccgaggtgtcatacaccaagttgttaggcgaacatactcctagaggaaccgcacgggctccagccacgactcgatagagcagcaaggagatgcggagcagactctagattggattactgttgcgttacctaccatgttggagggtgtcggaatagagtctgagaagcacaaggaggtctgggagtcatgcaggaatgactaacttctggtccttagggatataggtaacatacaaactacctggtaggtatcaataggccagctggtgcgcgcgatgggcttggagcatagcgtggtcaaaaagcctggatcacggaacggttaggacggcaccagcctcttgaagccagggcagg

SEQ ID NO: 499881 - DNA, 206 bp, Homo sapiens
gcgttgtctagaggatcccgaaacctaatacgaatagagcagagaaatgagggggtctgaggccaaccgctaaaaatgtagctcccagactcaagactaaaatccgttctgctctacacacacaggagaatgtattatttctacaggatgggtccttaatttatcacctcaagcatcactgggaagcagatatcatcttggatttg

SEQ ID NO: 499882 - DNA, 830 bp, Homo sapiens
agcggggggaccgcggcggcctcagcgaggaccctccgccccggagccgcggccggagccgcagcctctgccgcagcgcccccgccactgtcccctccccctccgcctccgccggagccgcctcgtgcactctggggtatggccgtcaatgtgtactccagcatctgtgacccagtgaaaatctgagtcgccatgatcatgcttgcatgggtcaacagactccactggacctcaactataccaagatagaacagctttgttcaggggcacgctactgccagcttcatggacatgctcttcccacggtctgtgtgcaacttgaggaaagtgaagttccaggccaaagctagagcatgaatacatccacaacttcaaggtgcatgcaacgccacgctcttccaacaccgactggcgtgtccgaccacactccattccctcgctcgcaacgacacctcttccgctgacacaggcacacgtcccacagatcccaccctgagctccatctcacgccggctcccaccacaacatcctctgacccgcacaagccactcgatggcaaaagcgattacacaccaccctctgcctgcgcgccgcgccggtgcgccccacgggaccgctacgccgcaccacactccctacacccccagcggtcaactcacgaactctcctcacaccaacaaccttcccaaaagaaccacaccaattcgggaccaccacgccacggttacccagaagcaaagcgaaccacggtccccacccaccacgagacaccaaccaaacacaacactggcacgaaaccaacaagcgcccgcgattgaagccaacctgcg

SEQ ID NO: 499883 - DNA, 501 bp, Homo sapiens
gcagcaccgcctcgatgccaacctgtcgtgtcgtgagtgtcaagtgtgctgttctcccaagacaaaccaggtggtcgagccaactgtcctgctggcaccagtggtaagagatgtgagctctgtgatgaggctggcgtttggagacccctgggtggaagcggccggtgtgagagtgtgccgcctgtgccagtgcagtgacagcatcgatcccaatgcagttggaaattgcaagtcgcgtgacgggagaatgcctgaagtgcatctataacactgctggcttctattgtgaccggtgcaaagacggattttttgggaaggcgctggctcccaatccagcggacagatgcaaggcgctgcaattgcgatctgtatgggaccatgaagcaggagagcagctgtaaaccgtgacggggcagtgtgaatgtttggcgctcacgtggctggccaggactgtggtgcttgtgaccctggattctacaatctgaagtggggggcgggcgc

SEQ ID NO: 499884 - DNA, 868 bp, Homo sapiens
ggcagtcgccacacctttgcccctgctgcgatgaccctgtcgccacttctgctgttcctgccacctgctgctgctgctgctggactgtccccacggctggctggtgcatggctgtcccctactgcaaggcgttagacttctcttgggaattgggccaccatgttaactagcaagacaggcaatctatacctgctgggggcccctgaacgaagtccaagtgcacctgcttgtcacatgtgaccctctacctatgaagcacttgtgcggttggctgccaagccttcctgatcctgggagctcttcccaaacgatggctgttgggtcatggcagattcctcagatgtcacgctggtgccctacggaaacgcacatggaaccaaagatgtcagtcgtgcaggtgggagttcaacgtgccagcatgggccgaaccaggagttgcaacattcacccaaggtggacggcctgcgtgctgcactgaacttgaccatgcagctagcctttcctgaccatagtctggcatgccacgagtggagcgacctgcacgagaagtctgccacttattgcctgcagcgtctacgccccagggctgtcgcaaggaacttatcatgggagtggtgcactgggcggaccgcggtatgctgctcactccacgccaagggccacagcgcacacgatggtctccagccacggaccgacgtatgtgccttggggtcaccgccaaacggggaccacccctgggcacgatacgacccacgctccttaccgtgggacgacaatcggaacaagggcaagcagccggatgatggccgtcaccagcaggtcaccacgaggcacgggtccagggacgccgcgaacagcggaacccacg

SEQ ID NO: 499885 - DNA, 316 bp, Homo sapiens
gttagattagcggctgagcatcccatctaggtgccatgctgcattgcctccataggctgctgataagaagttgttctgcagtgtcgagactcccagctctgtgaggatggacgtctgccggcatactggacaggatagcgtcaggctctgggcaggcatatagttttggagacatctttcacagaaggtgtgcaggcaaggaagaaccttggggcactggtaccgatccaggcagatgctgcataccaggaactgcttgtccattggctggacctctgggccagggctgtcctccctctttgccatggcgcccaca

SEQ ID NO: 499886 - DNA, 222 bp, Homo sapiens
tagtccaataatctgaaatccaaaatgctccaaaatccggaagtttttgagtatcaacatgatgctcaaaggtaatgctctttggagcatttcagatttcagattttcagactacagatgctaaccagtaaaaataatgcaaggaatccaaaatccgaaaaaaatcaaaatctgaaacatttctgatgccgagcatctttagcagcatccttggtctctaaa

SEQ ID NO: 499887 - DNA, 935 bp, Homo sapiens
cggtgacggcttgctgattgcgtgttgctctgcgcccgacgacttcgccttggtttcctccgcggctttcgggctcctttctgcacatatcagtccttgcgggcacatccgttttcgcttcccgggtaacagcggggtttcccccgcgcgacagttgtgggtgtcccggcggcgcaaggtttagtggtcgccctcctcgcggggccctatggtaggggtctccgcacctgtctctggcgccttggggttctgctttgttgtccaccgcaaggggcccggccggcctcgtggttgccccacgtcctcttagagcgttggtgcttcccgcgacgtggtgcctgggtggccccctcgctagtgtgccttccacatgggacgtatttcgtccctcctaatgaggcgttcacctcccgggcttcccccatatttcccggaacccccgtgggcccgacgctttgccccccgatcccgtttcactatgcataattcactcgggcgttaaagggtcgaaagttgttgtgggccgcacgcagcacctttgtcttcgggccaatacccgcggagatgccccgcaaccgtatccggcgtatgccccgccaggcccaccaccccacctctggagcactcccttcatacactccgggaggtcacatcaaactttgtccgaacgcgcccggtaaaatcgaatagctgttgcaggattgaggaaaacccccagcgttcggaccggcaaaccgtcgccgatagagtaagaaaagaacccttccctcaacctcggggggcaaaaaatgcggaggccccccccccccgcccccctctttcgcgaggacgccgggaagacgatgagaactctagacccccaaaagggaggaggacaaccgaacccccccacacggtgggtttaacccacccccggccccccaatctttcctaca

SEQ ID NO: 499888 - DNA, 394 bp, Homo sapiens
ggattatctgcagtgagcctgatacctgcattaatgaatcggcagaggaaggcgccgggtctgtgtcctggcgaccgtagcaccgaaaggcgaagacgctgacggataaccgcctgacgagcaagagataagataaagggacatcaggaccaaaggagaatacacataacagggaaccacgaaagacagaaggagatgaacacacaacgaacgcaaggatgacacaaccggagcatacacataatacgggtcaagaaaaggcacggacgagacgaagaaaaaaaaagaccaggaccaaaaggagaatcaaacacaaagaaggaccaacaaacgaagaaaaacaacgagccaaaagaacacgaccaagacaacaagaaatagacaaagagaaaaa

SEQ ID NO: 499889 - DNA, 110 bp, Homo sapiens
cctcacagaccctgaactctacacaacatatttcctcaccaagatcctgtttctaacctccctgttcttatgaattcgaagcagcatacccccgattccgctgcaaacca

SEQ ID NO: 499890 - DNA, 683 bp, Homo sapiens
  misc_feature (667)..(667): n is a, c, g, or t
  misc_feature (676)..(676): n is a, c, g, or t
  misc_feature (683)..(683): n is a, c, g, or t
actaatcaaggtttttgtggacatcgaatttacaggagacccccatcaatttgaacagaagtttaattaccgccgtcccatgtatcctatcctaagatacatgtgggggacagatacctatcgggagagcattaaggatttggctgactatgcctctaagaatttagaagccatgaatcccccacttttcctccgctttcttaacctgctaatgaatgatgccatcttccttttggatgaagccatacagtatttgagcaagataaagattcagcaaattgagaaggatcgaggtgaatgggatagtctgactccagaagcccgccgagaaaaggaggctggcctacagatgtttggacagctggcacgtttccataacatcatgtccaatgaaacaatcggtacccttgcctttctcacatcagagatcaagtcactctttgtgcatcccttcctggctgagcgcatcatctccatgttgaactacttcctgcaacacctggttggccccaagatgggtgccttaaaagtcaaggacttcagcgaatttgacttcaaaccccagcagcttgtatcagatatctgcactatctacttaaatcttggggatgaagagaatttctgtgccactgtgcccaaggatggacgttcctatttcccaactctntttgcacanacaggtn

SEQ ID NO: 499891 - DNA, 478 bp, Homo sapiens
cgagatttggctgcatgctcgattctagaggtataaccatgatgcgtcacattgtacgattcagaattccacaggtccaaggctctgatatcagtgatagatagacttgtggtttgcactcatcctcatcctcagtagatcttgcggcaagttttcctttctctctaagactcagtcttcgtactaaaatggagatcacagagcaaatagccaccccaaaattgtagttcatttaaatgacacgtttaacacagagcctgcactaagactttatgatttcctccttatctaaatagaattgatcatcaagatggctgaggcggtgttagctgtaatatttaggttatgattcccccaaaaccctgtggtcacattggactttgggctccattttcccaatctccatcgcccctagctgataaagagaagggcctaatgtggagcggcaaacctgaaccacctccaggatgcacacttc

SEQ ID NO: 499892 - DNA, 283 bp, Homo sapiens
  misc_feature (1)..(1): n is a, c, g, or t
  misc_feature (5)..(5): n is a, c, g, or t
  misc_feature (40)..(40): n is a, c, g, or t
  misc_feature (164)..(164): n is a, c, g, or t
  misc_feature (188)..(188): n is a, c, g, or t
  misc_feature (209)..(209): n is a, c, g, or t
  misc_feature (245)..(245): n is a, c, g, or t
ngagnagaggggtagcacagcggtaggcacgttgggtgtntattttgggattaatttacatgtagctcatgtaactcagcatccatagtgatctgctggcagcaccaagggctggatgagtctgaggatctcctttacccaaagtatgaatgctaaagagtctnagggaatgggtcccggaaagagcnacacccacagacatatcatanggtaactatgactctaatgctccacaaaagtaaaangaattccaaattaatgtcactctgccaccctagatcca

SEQ ID NO: 499893 - DNA, 849 bp, Homo sapiens
tctgatgtcagtgccgcatgtcctcgtgtgacggtgatctgccgtacccctggaatgtcaatttcttcccattcagggcccttcactatgtggcccccttcacctgggtcatgtgcaagaacactttgatgaatatgaaacatgtgtccacgtgctccagttgacccccgtccagttactttaggggtattaagactcacattggagtagagcaatgtccaggtcatggaagcatggttaatcaaatcagtgttaagagtagatcctgtcaaaatagtccgatgccatgaacatatagaaatccttacagtagatggggaatactctgttgtagacaaagagaagggccttgtatccaacccctaagatcacttcatgaaaatatccttttatcctgcaaaaccgagcaggtgtgataagcggagcatcaaattggtactcagtggggcaagatatcatgtgtccaggctaaagcttctcctgagctaagctaaaccctgctgctgtagataccatgtgtgcgtatcatgccagaggaaaacagatgctctatgtgtgggcgtcatgaacgatgtcgtgtagaagacattgagaacgtcataacaggacttgccttgacaatctccattattgaactgatggggtgggggatatgaggacttataaatgaggactcagagggattggacctggttaaattgcaattgggcggagccgaggcgggatgggttggaacatgagaaaaggcgggggagcgtgaaatccacaaggggaataacaagaataaaaaattttcggggcgggagaaattaaaaaaaggggtgggcccagaaaaagtgagggtaaaac

SEQ ID NO: 499894 - DNA, 620 bp, Homo sapiens
acagagcctcgcctttgcctgatccgccgcccgtccacaccctgccgccagctcaccatggatgatgatatctgccgcgctcgtctgtcgacaacggctccgtgcatgtgcaatggcctggcttcgctggtgcgactgatgccccccgtggcctgtcttcccctccatctgtggtggctgccccatggcaccatgtggactgtgatgtgtgtggctatggtgtcaagaatgtgattccgtactgtgtgtgctgacagatggcccatgagcaagagaggcatcctcaccctgaagtaccccatctgagcacggcatcgtcaccaactgggacgacatggagaaaatctggcaccacaccttctacaatgatgcagcgtagtggctcccgaggatgcacccctgtgctgctgacctgaggcccccctgaaccccaatggccaaccgcagagaagatgacccagatcatgttttgagaccttcaacaccccagccatgtacagttgctatccagtgcttgtgctatccctagtacagcctctggccgtaccactggcatcgtgatggactccggtgacaggggtcacccacaactgtgcccatctacgaaggggtatgcctcc

SEQ ID NO: 499895 - DNA, 155 bp, Homo sapiens
gtcagagctcggtacccccaccatgctatggtatagcataaaggccctcaccagatgctggagccatgctcttggacttcccatcctccagaattgtgagaaataattgattttctttacagatacgcagtctgtgatactctgttattgcaaca

SEQ ID NO: 499896 - DNA, 404 bp, Homo sapiens
catattgtggtgttatgagcaagctctgtacttgctttggtcagtgtcatatctggccatctgattggagagtacaaagtaggtactggcgatctccaaatgtaagcactgctcaaccaggtaattggttagtaggtcacaaaaaggaagttaatttggaggtaggggaccaagctggccttaaactctgagaggtctgctttcagggtaccatcaaagttcagggaggtagtgatggaggaagtctggtccaagcagtggttaaagtatgtggggccctgggggtataggttgcaatgacatgtgttggtccattgtctcccaagaagacacagtccaagggttccagggtggcacggtggtcaggatagagttgtagggttccaccataacaccacacaatt

SEQ ID NO: 499897 - DNA, 110 bp, Homo sapiens
aaggccttgttttttccctttttattttttggattaaaaatttttcttaaaaatgttttattgtcttctctaagccaaaagtttttaataaacatagtatttctctctga

SEQ ID NO: 499898 - DNA, 124 bp, Homo sapiens
atatacatcaaatgcatcatgttaaataatgtttatatattaatatgttatacactaatactaaatataaaatatactgcatattatatttttaatataaaatgaataccactccattcatttc

SEQ ID NO: 499899 - DNA, 172 bp, Homo sapiens
  misc_feature (56)..(56): n is a, c, g, or t
ggaggagaatctgaactgaggaggaagccctgcccagcagcctgggggtcccaggnatgtctgctgcatggagactgcagaaacctgtggtggggcagagagttccagtttggccgtgtgttgactgccctcatgcagactctaccagcggccaaagcggtgtctggagacg

SEQ ID NO: 499900 - DNA, 133 bp, Homo sapiens
gtatgtggctgactattctcacgcgcgagtctcagcgccgcagacgcaccctggaaagcactaaaccctcagaagactctctttcacggacagaacgggtgcactctgtacagcaacgcttcctaccgggccc

SEQ ID NO: 499901 - DNA, 470 bp, Homo sapiens
acttgaatctgagttttagctactgtagaggtctcagacctttcctttttagtactattagccaggtaaaactttggttcttgtgagtggtagggatgagtttttaggacagtattcaaagcctttttaaaggaaccaactactcaaatgctctacaatgccaaaaaaaaaaaaaaaaaaaaaaaaaagaaaagaaaagaaaaactagttgggtatggtgttgtgtacctgtggtcccagctactcaggaggctgaagtgggaggagcacctgagcccaggaggtagaccaggctggagtgcaatgctgtgatcttggctcactgcaacctccggctcccaagttaaagcaattctcctgtctcagcctcccaagtagctgggattacaggtgcatgctatcacactgggctaatttgtatttttagtagagcctgggcaacatagtgagaccttgtctctatttaaaaa

SEQ ID NO: 499902 - DNA, 243 bp, Homo sapiens
tagctcagggaacttttcagggtggacaatcttcatggcctccatcttgaggatgacatggggacccttcaggcaggacatgaggaggcccggccagccactgcccgcctcgggcccggggtcagagggcatccggctgtctccagtcagactggatgttcgggtgggtgggggcgttgtgtggggctggggggcaggtgacagggcagcatcctggtcccgccaggcctggggggggccccg

SEQ ID NO: 499903 - DNA, 1592 bp, Homo sapiens
  misc_feature (358)..(358): n is a, c, g, or t
  misc_feature (382)..(382): n is a, c, g, or t
  misc_feature (1010)..(1010): n is a, c, g, or t
tataaaacccccttccataaatggaaaaatacaaaaaatattcaaaccccttttatacaaaagtggcagatatttagggggggggttttaaagccaaaggtgatgtgtttgtggagtgtgttaaaggtgaaaatatttaggtgtgggggatgtagaagcaaatatatgtgtgaggagaacatgtgttgagcgcccatatatatgtgtacgggtagtaagagcgcccgggtgagaacactctgtgtgtgtgcgctctcacaaaatatgtgttgtgtagcgcgcgcgagtaaatatgcgccgcgtcgagaaaatgtgtggtgaaggcgagagacactctctaaaggatactctctgtggnagcgcctgtgtgtagagaaggggngggtatcacatatatgaaagaacacccgacgtgatataaacatgtgtgtggtatatatataggccgacggtggtgcgtgtgagacatatatatatgtgagggggtcatcatgcgagagtgtgtgtgattctctataatatatagacacctctatgtgggggtgagaaagaactctctgcaggggtgagaaatgtgaaaatatctctctctgtgtgagatggcgagagatatatatatcagcggagagtgtgtgtgttttacgagagagtgtgggggacacactctctatgagagggggggatatttttagcgcgagcggggagtagaaaacgcccccctgtgtgtgaggggggggggccccacaatgtggcgccactctcctctactataatatggggagaggggggagcactaaacggggggggaccactaaagccgacgtgttggagacagtcgtgtgggttacaacaacagaggggggcctctacaagaaacaaacacacaccctgttgtggagaaaagacaaagcacaaaaaccaacactcctccttctgctgcagacggcgggggtaactcatattaaacgatactgacgggggggagagaatatatatattatccccggcangcgaataataatctagacaaaaaagggggggggcccccttatcttttggtggggacacccccaccgttgtgtgtgcatgtctcttcaatcagagagggagtgggccccccaattctggagggacacaaaattcgataggggcagctaatctccaccccccgcgggggtgcggtacaaaccacaacttcgcgagcgcggccgcccaacactcaccacagactggggggggacatacaataatactgggcggcgcacacccacagaccagcgtgtacgacagacgaggcaataactacaaacgagccaaggagaggcgcccacctcaaacatacacatagagtgtaagcagggagagaagccccgcgcaacatacaatgcgacagacgacgggcggcacacgccgctcgagaaaaaaacaacccacccacaccaacggtcggcccatgccgggcgccccgccagaagaaggtgccaacaaaatacatagcaagacagaggggcgcggcactaaccaaaaggagggcgcccccccccttgatgacaataaggggaggggcatccatcagctagggagaagaggga

SEQ ID NO: 499904 - DNA, 407 bp, Homo sapiens
ttgctgaggtgactctacaggatcttactcctacccacgcgcccgctaaagtgtttacactgaacagggatcttttctttatcaaagacccacagatacgtggacaaaaaaagaaagctagaagtctccactgcctaatgtgtgcacataaaacaggcacgaagaaacaaacgtgtgtatactcttaattcctatatcacaaatatagcagaagcagcaatctgtacagtaaaatgcagtcatgggcaaaacaaatctcttctaaaagcatctgaaatacttaaaaatgtttaactttgaaaatgcataagtgatcaggaaaggaatacttaggcaagagaagcagctgaactcccacgttcacatgaagcatcccccatcgatccttaaagcatatgtaaagtagg

SEQ ID NO: 499905 - DNA, 292 bp, Homo sapiens
  misc_feature (28)..(28): n is a, c, g, or t
  misc_feature (68)..(68): n is a, c, g, or t
  misc_feature (86)..(86): n is a, c, g, or t
tagtgagctgtttgcaggaaccaccccncgacgctgattaattttgagacatggagctttggacccangacctgagctggactctntgttcacttcaccttcaccgagctgcgtgggcttggagggatggtatgttctgtaacctcatctgcaaaacggggatgtaaaagcaactgtctcagagtgaccgaaagaccaagtgagctatacatgcaaaatgttgtcactgtgtctgctccatattcagaaatatttaataaatgaggattattcttattaataatattaaaaa

SEQ ID NO: 499906 - DNA, 664 bp, Homo sapiens
gttcaacgccacgtccgagttctgccgcaccttgggggagatccccacctacgggctggctggcaatctgcgaggagcagtgagtgagctcatggactttgaacgggatgagtgagcgctcagccaacggtggctccgaatctgacgtgtggagtgagaacatctggctgtgagcacgtgtgaacctggacgaggagaagcagcagcaggatttctctgcttcctccaccaccatcctggacgaggaacctgatctgtgaatatgtggtggctgtgcagctgccctgctcctgtgtcagaacaaatgggctgctggatgaccacatgtgcagaatgtgtggccctggtgtgaatgtgcccccaacaatgtctgctgccctcagcctgtgtactgcatcgatggataagatgtgccatctgatgacaatgtacatgcctgtgagtggagtgaatacctgatgtgcttcacacatggacttcaatgtgacgaatgtgactgtgctacaaaacccgacgttaagatcgaatacgtggattgagactgggccgtgaaactcacacccaaggaggctttcctggcagctgtcgcaccgcttccatggcaagggctcaggcaagatgaagacagagcggcggatgaagaatgctggacgagggaggcgct

SEQ ID NO: 499907 - DNA, 164 bp, Homo sapiens
gccaggaaaagctcatcattatgcgtggtgaagtcagcaacgtaaaaaagggtagatagaagtattcgaagtatagatgggaggatagcttgagcctgggaggcgaaggttgaggttgcagtgagctgagattgtaccactgcactccagcctgtgtgacaaag

SEQ ID NO: 499908 - DNA, 204 bp, Homo sapiens
tggggtaccaaaaagccttaatttattccttggttttttcccgggaaagggcaaggggaggggaaaagtctcagcttgggtgttcaaaaaagtgttttaaaaaagtgggaacaggaagttccccgagttacagccaaaactcaaccatcagaataaacaccccccgaggtgaagtgggtgtctcaccaaagccccaagaggggc

SEQ ID NO: 499909 - DNA, 156 bp, Homo sapiens
acatgtacttatctacatagtctctatagggtgatagatggccatgggtgtgaggagtcagtatatgtttgggatttaggtagtggtgttgagcttgacgcttcttaattggtgctgctttaggcctactatgggtgtcaatttcttactctctct

SEQ ID NO: 499910 - DNA, 357 bp, Homo sapiens
tgagttacggctctgacccctccatcatctccttacaaggcttcacagcagcacagatgggcaatgaagcagtgcagcagattctgagtggtcattcgtagatagtgatcattctacttcagccttaatggtgatcttgagacgggaagatttagaaggaaatctatccagcatgtcttcactgtcaacatgaagagtacacctatacgtacttctgatgttgattatcgactcttagaggcatctaaagctggagacttggaaactgtgaagcaactttgcagctctcaaaatgtgaattgtagagacttagagggccggcattccacgcccttacacttcgcagcaggctacaac

SEQ ID NO: 499911 - DNA, 2028 bp, Homo sapiens
ctctctctctctctctctctcgctcgctcgctcgctcgctcgctcgcttgcttgcttacatgctttcttgcttcccgttttcttgctttctttctttggttctattacatagcttgctttctatgctatgcttgcttgctttcagtagcttaactatgcaatcctagtataactttctattctttcagtattcttatactatgctattgctattcatgctatgcttgcttacagtgctaaactatgatatatctctgctatactatatactatactatataagtaaactaaatactagctatagctatatctatagctatgctatagctataacaatagactttactattgctattactaagtatatacatttactatatactatataagtattctattacttatgctgatgctatatctatagctatcctatagtatataactaagctatatctatagctatagcaatgctattcagatgctattctaagctatatctattctaaaagataaactttctatagctattgctttctttgctatcctatgataaactttgcttttctttgctttgctttgcattttctgtgcttttctttctttgctaatctttaacttatctatacatatactataatacttatctttctttgctttcaaatatctttcattcattcattcttatctattccattaccttttacataatacaataccataaattatacaaatcctttacatttcttatcatttcttttactctccttttctatttcatatcttaactggattacgtcccattttgagaaaagaagctttcacacacttgattcccacggctaagaagtgccactgggcgaaacttgatcatacaccgaaaccatacgcctcccgggttaaaacgatcacgtacaaaaccccaaaaggtgaaacatggagaccccaccttctagtaagtcatcattgaacacaccaacactaacatagagccttcgccaacattacctaccgccataatacagacacaaaatatcttcttctttactataatatttatattataatataaaataaattggcacataccaaacacacacccacacccaaactataacaaatacaacacatctacaaaccacatcactacactataacacacaaacaatcaacatacacaacatcaccacacgaccaaactacataatatacaaacacatcggaccacgccgtaccgatcaaccgaaccaacgagtcgcggaggatagagaacagacaaacagccaacacacagcagcgaacgagagaaagcatcggacacgacagagacagacgaagcgagaaaagccgcaccgacggagcacagaacaacaaagacagaactgaaaggcagaggacgacaggaactgcgaacgacgatcaagaagaacatgagagacaagcgaagacacgacgctagacaaacacacgacgcctgacagaagagaagacacaaaaaacatataacacatatacaacacataaactatatatgacacaataacaccaatacacatacaaagaacacatcacacaaccatacaataacaacatcaaaaaataaaacaaacaaacaaataaagcaataatatacaaaacacccaacactacacaacaaaaactctactcacacaatatctaaaacacacaaacaataacaaaaaacaaaatacaaaatagaacgaaccacgccaccggcataagagcaaaacaagccgacgaacgctaagcacgacacgacgcacaccacaccgaggacgcacgaaagaaccaccaagagcccgcacacaacaacagaagcacccgaccacagaccccacagaacgacagaagcgccgaacaccgacacgacacgaacaacgcacccgaccaacaacaacaccaccaccaccgacacaccacaaatcacgccacaacaacgcgcagacaaaccacgcaaccatcacagcaaccacataacaccaactaccacacacacacacacacacaaat

SEQ ID NO: 499912 - DNA, 343 bp, Homo sapiens
  misc_feature (7)..(7): n is a, c, g, or t
  misc_feature (9)..(9): n is a, c, g, or t
ccggccncncgacacggctgcgagagacgacagaggggtagaggaagatctcagatagagacactggggcgggcgtggtggctctgcctctatcccgcatttcagaagctaaggcgggtggatctcaaggtcaagagattgagaccagcctggccaacatggggaaacttgtctctaccaaaaatataaaaaattagccagatgtggtggcgggcacctgtatcccagctacttgggaggctgaggcaggagaatcgtttgaacccgggaggcgggggttgcagtgagctgagatcgcaccactgcactccagcctgggtgacagagtgagattccatctcac

SEQ ID NO: 499913 - DNA, 362 bp, Homo sapiens
catggggtctgtaccgtggagcaaaaggctcccttcctccgcagtgctcggaccaacaccagccagcctcagccccgcggatgatgcaggccgccgcgtctgctgccccgcctctggtggctgccacgccctattcttcctacatcccctacaaccctcagcagttcccaggccagccagccatgatgcagcccatggcccactacccctcacagccggtgtttgcccccatgcttcagagcaacccacgcatgctgacgtcgggcagccatccccaggccatcgtgtcatcctctacccctcagtacccttctgcagagcagcctaccccccaagccctttatgccactgttcaccagtcc

SEQ ID NO: 499914 - DNA, 902 bp, Homo sapiens
agtgtgtgcgtgtgttcccgtgtcgtgtgtagtgtttctgggacgcctggtaccgcttgttacccatgctgttcccagaccggcggttcttgtaggctcccattcttacaacttaaagtttcgtgccgtcccgaacatgccgggttgccctttgcgcgggcccgcggaattcatggttggtccctcttttgcgcgtggaataccttccggttccgccaaagggccctgacgcgcgttgtttgaccagctgcctccgctgggggccggccacacccgcacgggatgccttgtgggggcctcttcccccctaggttcgcactcaatagggggtttcttccccttctacagggctgctatactccccctgggttgccgcctttgttgacgagaacccccctgggccccaccaggattgaggccgcaaagagcctcctgctcctttatatatttcgcgcgtgggtaataatggtaaacttctgggggccacacagacgcacttgttcgcggcgctaatctggcgaaaatggccccaaacgctaagtatgggacctcccgccgaagttcactgaatcaccccccagttgacattctcgtcttaatcctgtagggctcaagtctatttgcttttaacacacgcggagaatattcaaaataattgtttacgatctttgaaaacccctttctgctttctccctagctagattcgctctctatatgtggaaggtgaccctcccattacaacctgcggggtaactaatattgagaccccccccccccgcccccccttctgcaaagaccccgtcatacacctatcaattctgccgcccaaaaagaatgagatcctctacccccccaacggggttcaaaccaacccccgggcccccagattttttaaaaaaaaa

SEQ ID NO: 499915 - DNA, 109 bp, Homo sapiens
tcgaattcaagcttctaacgatgtacggggacatggcagtgggaaaaatgtaggagactgtttggaaattgattttgaacctgatgaaaataaagaatggaaagcttca

SEQ ID NO: 499916 - DNA, 438 bp, Homo sapiens
  misc_feature (25)..(25): n is a, c, g, or t
  misc_feature (69)..(69): n is a, c, g, or t
tgggcctgccaggaaattcgggccncgagtgatgactggaagaaaaacatcaaaaagtgtgcctaaccnaataagccactttttgtgatgaatgaaaatattcctgtatcctgtgtccctcccaagacagcccactagccacatgtggttaagaagtcttttaaaatggccgagcatggtggcttatgcctgtaatcccagcactatgggaggttgaggcaggtggatcacctgaggtcaggagttcgagaccagcctggccagcatggtgaaaccccttctctactaaaaatacaaaaattagtcaggcatggtgtcacttgggaggctgagagaggagaatttcttgaacccaggaggcggaggttgcagtgagccaagatcgtgccggtgtactccagcctggacgacaagagtgaaacttcgtctcaaaaaagg

SEQ ID NO: 499917 - DNA, 392 bp, Homo sapiens
  misc_feature (109)..(109): n is a, c, g, or t
  misc_feature (111)..(112): n is a, c, g, or t
  misc_feature (119)..(119): n is a, c, g, or t
  misc_feature (121)..(121): n is a, c, g, or t
  misc_feature (129)..(129): n is a, c, g, or t
acgctgataacccagagaaagtgctgcctgaccattctggaagccaacaccagcaccaaccctattttgggtatggattccagcagcgctggtcgccatatcacatggncnnacccatngntccttggngactgatccggcgatcctgccgacgcatctttccattcacatcactacgcaaactctcgaaactatcgttcaacgccgagaaccgtgcatctgtatagctattggccgccgccatactgttatccaattgcgttttactcactccatcggttgccaacatacctgcagccatcgtcaccttgcgtacattgagcgagctgcctagcgaatccatgcccaccgaactcgtttgcacctcatcactactctgagagctacccccc

SEQ ID NO: 499918 - DNA, 509 bp, Homo sapiens
ggcgcgaattcactagtgattgtgagctgagatcgcacccggtccaagcactggctttgagataagcaatattaaaaacattttcagcttcatcagatgctgactaactgacctccaaccactgttccaccagccataactacagctttggttggacaagtgactgatcccagtaactttttcctgacaaggtgactacccatcatggactggttctggctggcttacagagctcctgcacttgcatgtactttgtgtactgaaaagaccttttgccatatagggcctaattataatacatttaaatgttaagtctccaccccaaagtgaacatgggttgtatgttgcatgcatgtttgttcaatatgcatgtgtcagaaccactttcatgaatattcatagctcctcatgtaacctgttggatgtgtatgtttagtcaatccattgagcatgaagctcctatcctaaaccctccttctttgaagtggctgtctcttgtcttggctgga

SEQ ID NO: 499919 - DNA, 163 bp, Homo sapiens
gaacacacacattatggcaaggtttatttacttgatgtccagaggaacatcagggtcagaagtttgatgtacagtcctgtgaagattatagtcagattatgcttggatgaaacgtggagagcacatgggctgtgtgttcagcaggatggtcaggttgcacggt

SEQ ID NO: 499920 - DNA, 334 bp, Homo sapiens
  misc_feature (116)..(116): n is a, c, g, or t
agcctgggactctttgtgaaggtcctcctcacctctatctttctttctctctctctcaaactctccttaaagtcctcattgcctttgcactgcttctgtgaacagtctttgtctcncttttcctttggtgggaagtgcggggcagtcctggtcaagacactcatgccctggcaatgtggctcccagagaatgttgttgctaacccaccagtctcttgttgatttggagagctccagacaggcccctaactgcctcgaagcgacatttacacaccttctttactgtcacttcgcgatctcatgacctcataacacctcacaaatcctcaacacac

SEQ ID NO: 499921 - DNA, 1679 bp, Homo sapiens
atgtgctgcccgccgcggaggtttgtttgatcggcccctctgcctgccgacagatggcttggcggcctgtgcgtggttgtcaggtcacgcgtggttgtcccccacgcggcgcgcgtgtgtgttgtcatctcgtgtgctcccatcgggggggagtgggggggcgtcgcgtcaatcgagtgactgtcgcttggttggccttcgccgacatggtcgcggcggatctgtttttttgtgatcgcatgcgccccccccgctgtgttgtggtatcgtagatgtggaggtggttggctctctctccgccttgatggtggggggcgtctcgacttcgtgacatctcgtttaaacaaccgaacgggtggtttggcgtcgacccccaaccacttattggtatggccgcgtgtagtgagacgtcaccgctttgtcgtgtagtgagcaacaccgatctgagcgtagaatatagtttttttaagaagtacggctgtttttgtcgaccaccccccgctgccagattatttgtttcttagacgaggacagtgggaagaacttaattgtatttttactgtggtgttttattgcacacacacaaagtaggtcggcgttggtttagtataacaaacacatccgtggtaggtaagcatgcaagttgttgtggttgtgccgcagcgagcccccgtgagggtggttgttcttctgcgcagaacgaggtaggtggttattgtctccccccgcgaggaagaaatttttctttggtttgtatgtttatatataggttttgcgagctacgcgctcacagacagttgtttgatagagaaagaggatgtttgtgtagtcgcaccccacggcgctgttttagagtaggggagtggttgttatatacagtttttggtggcgacgcacaccacacacataccacaaatttatttttgtggagaaattcttctcccctgggagacgcgccccactttggttgttttctctcacccgacactacacgcgctgccaagataagtgatatttttttctactcaacacacctagatacttcttgggaaaagtatatatattatgtagactcgagacaaagacgtatgtttgttgttttagtatagtcgcgagcacattttttattgttggaggagacacgtataccacaccacgccacacactctctttatttagtatgtatagatatagagagagacactcatcagcagagaagagtgtatcatcttgctgtcctccgccactgcgctggctatcatatcatccacgctcgcagatacactcacacagacatgcgtggtgcaccagcgcgagcagatgattaatatttttctgcgttgttctttatctctctatataataatatggagagagagagagaaaaaattcaactgtagtctctcgatttctatatcaaacgatacaatttatatttatgtggtaccaccacaataaaaatgtttctccctacttattctctgcacgctctttttttatgacgagaacaaaatattttctcattcttttaccacctggttattctcttgtccgccagaaatatctgcacgcattcgtccccctggttgtgcgaaacacaaacagaccactttttgttttttttttaaaaaagaggggcccccaaatatttccccacaaaagatttttttttttttcta

SEQ ID NO: 499922 - DNA, 238 bp, Homo sapiens
tatccgtcactactaccgcatacctactactcaactataaacatccagaaccacaaccctactactatctcgcacctgaaacaagataacatgactaacaccctataattccatccaccctccactccctaggaggcctgcccccgctaaccggctttaagaccaaatgggcctttatcgaaaaattcaccaaaaacaatagcctcatcatccccaccgcatgagtccacaataaaag

SEQ ID NO: 499923 - DNA, 509 bp, Homo sapiens
  misc_feature (69)..(69): n is a, c, g, or t
  misc_feature (90)..(90): n is a, c, g, or t
  misc_feature (322)..(322): n is a, c, g, or t
  misc_feature (492)..(493): n is a, c, g, or t
ggtaacaaatttctggtttatttcaaatgtatacatatactcatcacttatagaggaaagaaatctagngcttctctcatcttgtcccangactataaacaaattgacatccttttttcattagagatccatctgttctgtgatttttttaccttgtgatttataaaaattaggacctaaatctataatataaacttcttggatgccagtcttactcatagctgacacattttagatcctactggaaaactaagaaatgcctcttatttcaataatccaaaacttaacatactcttagtaaattcttactttgctttattcncagaacacagaccaccagtgcatttcaggaaatagctccatctaaaaagccagtgatttgatgaaacaagaagagagctgccaattaaagctaacaggtgtgtatctgtctctataactattaaaagggatatttattccattctgagaaccctggggattgtttattcnncaatccctttttaaat

SEQ ID NO: 499924 - DNA, 190 bp, Homo sapiens
tgtgcccatgttccagatagccataaaatccgggccatccatcccaacaggagctggagtgtaaactcagaaacaggttagggacaatgtagtcagtgtgggcaccatcaatcagccattatcggttgttgtggacgaaccagcagtacaaccttcgtgccgatgctggcatcccttctgtcgtcttctc

SEQ ID NO: 499925 - DNA, 885 bp, Homo sapiens
ggagaagtgctcctgccctgtgggagaggctcagcacagaaggagtgaaggacagcacagcctatcgagctcgtggctctaggtaagtttgctgagatcctagtgctcagtctccacatgaggatgaatatgacagagcgacaagaagaaccaatggagtgccgcctactcgagcacctcctccactgacacatcagactactaatcacactggtaaagagggtgctccatgacatcatcatgcactcgacttgcttaacactctctggagaaaccgtgacgctattcgagataggctccaaaggatcaccgagtgtagagaggcgcacgtagtcctatccgccaaaaacgatgttatccagaagagggagaaatggtatagtatcttatcgtgaacgtttgttccgcaacagaatttggctctcagaaagtctgtgcatggcatacaatctttggatcacgaaagagaccaaacgtgattggcaccctcgtatccattgtgacatttacctagtcgatactgtaaggttacgacgtggaccaagatatagcgtaattactaatggcgccatgcaatatcgagcggggaccgagaagatcagatagtattcctaatgcaatctcactgtgatgagttccagacattgttcaacaccggggaagcacgcaggaatccttataagactttaccaccattcactaaaaagcgcagggtgcatacggaactagaaggagttaagctggcattattcccaccattcaaactgtataccttgaagcttgaccaatgccctacattcaccactcaaggaactcaaaagccatggggacgaatcaagggatgtcttaaagccttccagctggtgaaccctaagagtgagaaac

SEQ ID NO: 499926 - DNA, 201 bp, Homo sapiens
tagtaaagtgcctataaggtgaagcatttaatttatcattggaaaattttgtgaacttgctagatgtcactgaggcccctgttgctagtggtagaatttcagtagaggccacggaaggttaagatttcaccagagattgaggctgaggctggtcgtcgtggttcgaatgtgtagaataggcataggggatcgggtgatagg

SEQ ID NO: 499927 - DNA, 3215 bp, Homo sapiens
gtatggggagacttttcccgtgttcaagctcgcacgctgcatcacgaggaaatgacactgaccagattaaggctacaaatacaagtctcgcagccagtctcaaagtctgtaaccccaataacattttttaggtaaataaaaattgttactgggtggtcttcccttctccaggaagcagagctgaggctggtaaagttcctgcctgagattttggccttgcaaagggatctagtgaagcagttccagaacgtccagcaagttgaatacagctccatcagaggcttcctcagcaagcacagctcagatgggttgaggcagctgcttcacaacaggatcacagtctttctgtccacatggaacaaactgaggagatcgcttgagacgaacggtgagatcaacctacccaaagactactgcagcactgacttggatctggacactgagtttgagatcctcttgccacgccgacggggcctgggcctctgtgctaccgctctcgtcagctacttgattcgcctacacaatgaaattgtctacgccgtggaaaaactctccaaggaaaacaacagctattccgtggatgccgccgaggtcactgaactgcatgtcatcagttatgaagtggagcgggacctgactccactgattctctccaactgccagtaccaggtggaggagggcagagagaccgtgcaggagttcgatctggagaagattcagcggcagatcgtcagccgcttcctccagggcaagccccggctgagcctcaagggaatacccactctggtgtacagacacgactggaactatgaacatctctttatggacatcaagaacaaaatggcacaggactccctccccagctcggtcattagtgccatcagtggacagctgcagtcctacagcgatgcctgtgaagtgctgtctgtcgtagaagtcactctggggtttctgagcacagctggtggggatccaaacatgcagctgaatgtgtatactcaagacatcctgcaaatgggtgatcagacgattcacgtgttaaaggccttaaacagatgccagttaaaacacaccattgccctctggcagttcctgtctgctcataagtctgaacagctgctgcggctgcacaaagagccatttggggaaatcagttcaaggtacaaagcggatctgagcccggaaaatgctaagctcctcagcacattcctaaatcagactggcctagacgccttcctgctagagctgcacgaaatgataatcttgaaactaaagaacccccaaacccaaaccgaggagcgcttccgccctcagtggagcctgagagacactctcgtaagttacatgcaaactaaagaaagtgaaattcttcctgaaatggcatctcagttcccagaagagatactgctcgccagctgtgtctcagtgtggaaaacagctgctgtgctgaaatggaatcgagaaatgagatagaattatttcctcagctatctttggatgactttggagagaagactcctctctcctcgtctgcggcgtggacttgatcatggactggtgcctttgcattcagaaggagagctgtcagcgtagcaccgaattcaagaccaaggcgtgctacctgagctgacagctttttgaaagccgagctgtttctgaaccatgtacatacatgttctgaaactttctcatcattttatgagtactgttcattgagagatgacaatgaagattagatgaaattggaaataaaccaacattgtttacattccaggagacttgtagctcagccacacacgcagtaatgacctgtgcccgttcgcctctggcactgcccacccctctttttttttttcttctaattctgtactcacaaaagagaatctcattttcttctttcttccattcccttaaattctgagtactgtacatatatttctgggttcccacgatgatgtgaaaaactaccagactgttttttgtcttctcacaaagacaagaaaaatcagggcattttgtgagtgccttaagatcaaactaacaagatctgaccctctcccctcacagtgagccactgccccacttcagagggtaagagccaaaagcctcattgtgaaaggcactggacttggaccagggacaccatcagggccttggttttctcacgcataaaatggagagtggattaatcgccaaagattcttctgatctgacattttgaaattgtgagagaaactagatgactgtaaacttggtcacaggcctggttctggcagttctttgcggacttttttctagcattatgccaaataaacatgcagtctcagtgtgctctcgcatgtatgaatatctagtcctttctgtggttctcagccaagacataaaaactaggactcagagcacatacaaaaccagttatgtttcggaaagagggaaaagagtccccgagcccggatcttgtgctgcttttctcactgacgtgttgccttttttctttacaaaatctgctttgatacttaggacctctctggactaatttctcttcctagacagctcagcacagctattgatatgttagaggcagtatccttaatattcattctaaatgagttaacgacttaacttgaaattgggcctaaggagtgagaactacaaaaatacaaaatgcttgtccaggactcagccatgcacaccttgagcagcgccggcaggaggcacggaaggaactgtgctccgttctcctcactgtcatggtgccaccagtgtctgatgaagggcagagtgacccagactgcaggcagtaactgacttcacacagtccctggcatttagtcatctgtgattgttttatcactctggactgtgcagagccacctgccaccgagatctgcattccgactgcctatgaacgggtgtgggggccgggggctggcttgctgaagtcttcaacttgcactcggagctcctttgatacctcagagctggctgtcaggtggcagctcacacccagactcactggccacacctcagcagggggggagtcgagtgtcagtctctttctgtgaaggctttttttttcctttggcctgggaatttttcccatttttatgaaggggttttaaattgtttcattttgtgtgctgtgcttcaaagccttaactgtcaaatcttgcattatcttgtttgtacagaaatatactggcctagcagaggca

SEQ ID NO: 499928 - DNA, 5431 bp, Homo sapiens
  misc_feature (436)..(436): n is a, c, g, or t
tgatctagaggtcccatgcgcgacgcttccatcaacgtccctttcagctggaaaatcaaggactatctggaggagctgtgggtccaggctcagtacatcacagacgcagaaggactgcccaagaagttcgtggacatctttcagcagactcctctgggcaggtttcttgcccagctccatggagagccgcagcaggaacttcttcagtgttacttgaaggatttcattctcttgaccatgcgtgtgtcaacggaggaggaattaaagtttctgcagatggctctgtggtcctgcactaggaaactgaaagcggcgtcagaagcgcccgaggaagaggtttccttaccgtgggtgcaccttgcctaccagcgtttcagaagccgtctgcagaacttttccagaatcctgaccatctaccctcaggttctccacagcntgatggaagcccgttggaaccatgagctggctggatgtgagatgaccctggacgcatttgccgcaatggcctgcacggagatgctgacaagaaacaccctgaagcccagtccccaggcgtggctacagttggtgaagaatctttccatgccgctggagctcatctgctccgatgagcacatgcaaggcagcgggagcctggcccaggctgtcatcagggaagtcagagcccagtggagtcggattttctccaccgcactcttcgtggagcacgtgctcctaggaaccgagagccgcgtccccgagttacaggggctggtgaccgagcacgtcttcttactagacaagtgtcttcgagagaactctgacgtgaagacgcacgggccttttgaggccgtgatgcgcactctctgtgaatgcaaggagacagccagcaagaccctcagcaggtttgggattcagccgtgctccatctgcctgggagatgcaaaggaccccgtctgtctgccctgcgaccacgtgcactgcctgcgctgcctcagggcctggtttgcctcagagcagatgatatgcccctactgtttaactgccttgccagacgaattctctccagctgtttcccaagcgcacagggaagccattgaaaagcatgcccgcttccggcagatgtgcaacagtttcttcgtagacctggtgtccaccatttgcttcaaggacaacgctccgcctgagaaggaagtgattgagagcctgctctctctcctcttcgtccaaaaggggcgcttaagagatgctgcccagagacactgtgaacacacaaaatctctctctccattcaatgatgttgtggataagactcctgtcatccgctcagtgatactgaaactgcttttgaagtacagctttcatgatgtaaaagattatattcaggaatatttgaccctgttaaaaaagaaagcattcataactgaagataaaactgaactgtacatgctcttcatcaactgcctggaggattcaatacttgagaagaccagtgcttactccagaaatgatgaactgaaccacctagaagaggaaggtcgtttccttaaggcatattctccagcaagccggggccgagagcctgccaacgaggcctcggttgaatacctgcaagaggtggcccggatccgcctctgcctcgacagagctgcagatttcctctcggagcctgagggaggcccagagatggccaaggagaagcagtgctacctgcagcaagtcaagcagttctgtatccgggtggagaacgactggcaccgggtgtacctggtgcggaagctcagcagccagcgggggatggagttcgtgcagggcctctccaagcccggccgcccgcaccagtgggtgtttcccaaggacgttgtcaagcagcaggggctgcggcaggaccacccaggccagatggataggtacctggtgtacggcgatgaatacaaggctctccgtgatgctgtggccaaagctgtcctcgagtgcaagccactgggcattaagactgctctgaaggcctgcaagaccccccaaagccagcagtcagcctacttcctgttaacactgtttagagaggtggctattttgtacagatcccacaatgcaagcctccaccccacgccagagcaatgtgaagctgtgagcaaattcattggcgaatgcaagatcctttcacctcctgatatcagccgttttgcaacatcgctcgtggacaattctgtgccattgttgagggcggggcctagtgacagcaaccttgatggaacggtgacagaaatggccattcatgctgcagccgtccttctgtgtggacagaatgaactcttggagcccctaaagaatctggccttctccccagccaccatggcgcatgcttttcttccaaccatgcctgaagacttgctggctcaagctcggaggtggaagggtctggagcgagtccactggtacacttgtcccaacggccatccttgctccgtgggagagtgtggcaggccgatggaacagagcatctgcattgactgccatgcgccgattggaggcattgaccacaaacctcgggacggctttcatctggtcaaagacaaggcagacagaacgcagaccggccatgtgctgggcaacccgcagcggagagacgtggtgacatgtgaccgagggctgcccccagtggtcttcctccttatccggctactcactcacttggctctgcttctgggctgggcctctgtgctaccgctctcgtcagctacttgattcgcctacacaatgaaattgtctacgccgtggaaaaactctccaaggaaaacaacagctattccgtggatgccgccgaggtcactgaactgcatgtcatcagttatgaagtggagcgggacctgactccactgattctctccaactgccagtaccaggtggaggagggcagagagaccgtgcaggagttcgatctggagaagattcagcggcagatcgtcagccgcttcctccagggcaagccccggctgagcctcaagggaatacccactctggtgtacagacacgactggaactatgaacatctctttatggacatcaagaacaaaatggcacaggactccctccccagctcggtcattagtgccatcagtggacagctgcagtcctacagcgatgcctgtgaagtgctgtctgtcgtagaagtcactctggggtttctgagcacagctggtggggatccaaacatgcagctgaatgtgtatactcaagacatcctgcaaatgggtgatcagacgattcacgtgttaaaggccttaaacagatgccagttaaaacacaccattgccctctggcagttcctgtctgctcataagtctgaacagctgctgcggctgcacaaagagccatttggggaaatcagttcaaggtacaaagcggatctgagcccggaaaatgctaagctcctcagcacattcctaaatcagactggcctagacgccttcctgctagagctgcacgaaatgataatcttgaaactaaagaacccccaaacccaaaccgaggagcgcttccgccctcagtggagcctgagagacactctcgtaagttacatgcaaactaaagaaagtgaaattcttcctgaaatggcatctcagttcccagaagagatactgctcgccagctgtgtctcagtgtggaaaacagctgctgtgctgaaatggaatcgagaaatgagatagaattatttcctcagctatctttggatgactttggagagaagactcctctctcctcgtctgcggcgtggacttgatcatggactggtgcctttgcattcagaaggagagctgtcagcgtagcaccgaattcaagaccaaggcgtgctacctgagctgacagctttttgaaagccgagctgtttctgaaccatgtacatacatgttctgaaactttctcatcattttatgagtactgttcattgagagatgacaatgaagattagatgaaattggaaataaaccaacattgtttacattccaggagacttgtagctcagccacacacgcagtaatgacctgtgcccgttcgcctctggcactgcccacccctctttttttttttcttctaattctgtactcacaaaagagaatctcattttcttctttcttccattcccttaaattctgagtactgtacatatatttctgggttcccacgatgatgtgaaaaactaccagactgttttttgtcttctcacaaagacaagaaaaatcagggcattttgtgagtgccttaagatcaaactaacaagatctgaccctctcccctcacagtgagccactgccccacttcagagggtaagagccaaaagcctcattgtgaaaggcactggacttggaccagggacaccatcagggccttggttttctcacgcataaaatggagagtggattaatcgccaaagattcttctgatctgacattttgaaattgtgagagaaactagatgactgtaaacttggtcacaggcctggttctggcagttctttgcggacttttttctagcattatgccaaataaacatgcagtctcagtgtgctctcgcatgtatgaatatctagtcctttctgtggttctcagccaagacataaaaactaggactcagagcacatacaaaaccagttatgtttcggaaagagggaaaagagtccccgagcccggatcttgtgctgcttttctcactgacgtgttgccttttttctttacaaaatctgctttgatacttaggacctctctggactaatttctcttcctagacagctcagcacagctattgatatgttagaggcagtatccttaatattcattctaaatgagttaacgacttaacttgaaattgggcctaaggagtgagaactacaaaaatacaaaatgcttgtccaggactcagccatgcacaccttgagcagcgccggcaggaggcacggaaggaactgtgctccgttctcctcactgtcatggtgccaccagtgtctgatgaagggcagagtgacccagactgcaggcagtaactgacttcacacagtccctggcatttagtcatctgtgattgttttatcactctggactgtgcagagccacctgccaccgagatctgcattccgactgcctatgaacgggtgtgggggccgggggctggcttgctgaagtcttcaacttgcactcggagctcctttgatacctcagagctggctgtcaggtggcagctcacacccagactcactggccacacctcagcagggggggagtcgagtgtcagtctctttctgtgaaggctttttttttcctttggcctgggaatttttcccatttttatgaaggggttttaaattgtttcattttgtgtgctgtgcttcaaagccttaactgtcaaatcttgcattatcttgtttgtacagaaatatactggcctagcagaggca

SEQ ID NO: 499929 - DNA, 1131 bp, Homo sapiens
gcgtgggctgcgtactgccctgcgagcacagagcctcgcctttgccgatcctgacgcccgtccacaccctgcctgacagctcaccatggatgatgatatcagcctgcgctcgtcaatcgacaactgagctcctggcatgtgcaatggcctgtgcattctgctgtggcgacagatgcacccccgtggcctgtcttcccctccatacgtggtgagcgccccagtgacaccagtggctgtgatggtgggcatgggtcagaaggattcctatgtgggcgacgaggcccagagcaagagaggcatcctcaccctgaagtaccccatcgagcacggcatcgtcaccaactgggacgacatggagaaaatctggcaccacaccttctacaattgagctgcgtgtggctcccgaggagcaccccgtgctgctgaccgaggaccccctgaaccccaaggccaaccagcgagacgatgacccagatcatgtatgagaccttcaacaacaccagccatgtacgttgctatccaggctgtgctatccctgtacgcctctggccgtaaccagtggccactcgtgaatggactccagcgtgacggagatcaccacaactgtgccatcatacgaccgcggtctgccactacaccacattgcatcctgagtatggacctggctggccgggacatgacagatactcatgaacgactcctccacaccgaggcgccgagctaccgcgttcagacagccaactaggaccacacggggtacaaatcgtggcgttacccatacgggcgccaagatgagcaaaggtagaccatgaacctccgagacaaaaaatcgccacgcgtgaacaaatacgcccgtggagacagcaaccaagctcgctgaggacaaagacatcacgcgtgtcaagagaacggacccgctgcccccagggagacgactcacagccaccaacttcaggaacaagacagggacgaccaccacacccccgacactacgagacagccgggagaacaccacacgctgtaccacagaacttcgagcaccaacgacgcagtaacatcgacactaggcagaaaaaagaagcggtagaaacacagaacacgcgcaccaagacagatgacacagcaggaaat

SEQ ID NO: 499930 - DNA, 6396 bp, Homo sapiens
  misc_feature (436)..(436): n is a, c, g, or t
  misc_feature (6039)..(6039): n is a, c, g, or t
tgatctagaggtcccatgcgcgacgcttccatcaacgtccctttcagctggaaaatcaaggactatctggaggagctgtgggtccaggctcagtacatcacagacgcagaaggactgcccaagaagttcgtggacatctttcagcagactcctctgggcaggtttcttgcccagctccatggagagccgcagcaggaacttcttcagtgttacttgaaggatttcattctcttgaccatgcgtgtgtcaacggaggaggaattaaagtttctgcagatggctctgtggtcctgcactaggaaactgaaagcggcgtcagaagcgcccgaggaagaggtttccttaccgtgggtgcaccttgcctaccagcgtttcagaagccgtctgcagaacttttccagaatcctgaccatctaccctcaggttctccacagcntgatggaagcccgttggaaccatgagctggctggatgtgagatgaccctggacgcatttgccgcaatggcctgcacggagatgctgacaagaaacaccctgaagcccagtccccaggcgtggctacagttggtgaagaatctttccatgccgctggagctcatctgctccgatgagcacatgcaaggcagcgggagcctggcccaggctgtcatcagggaagtcagagcccagtggagtcggattttctccaccgcactcttcgtggagcacgtgctcctaggaaccgagagccgcgtccccgagttacaggggctggtgaccgagcacgtcttcttactagacaagtgtcttcgagagaactctgacgtgaagacgcacgggccttttgaggccgtgatgcgcactctctgtgaatgcaaggagacagccagcaagaccctcagcaggtttgggattcagccgtgctccatctgcctgggagatgcaaaggaccccgtctgtctgccctgcgaccacgtgcactgcctgcgctgcctcagggcctggtttgcctcagagcagatgatatgcccctactgtttaactgccttgccagacgaattctctccagctgtttcccaagcgcacagggaagccattgaaaagcatgcccgcttccggcagatgtgcaacagtttcttcgtagacctggtgtccaccatttgcttcaaggacaacgctccgcctgagaaggaagtgattgagagcctgctctctctcctcttcgtccaaaaggggcgcttaagagatgctgcccagagacactgtgaacacacaaaatctctctctccattcaatgatgttgtggataagactcctgtcatccgctcagtgatactgaaactgcttttgaagtacagctttcatgatgtaaaagattatattcaggaatatttgaccctgttaaaaaagaaagcattcataactgaagataaaactgaactgtacatgctcttcatcaactgcctggaggattcaatacttgagaagaccagtgcttactccagaaatgatgaactgaaccacctagaagaggaaggtcgtttccttaaggcatattctccagcaagccggggccgagagcctgccaacgaggcctcggttgaatacctgcaagaggtggcccggatccgcctctgcctcgacagagctgcagatttcctctcggagcctgagggaggcccagagatggccaaggagaagcagtgctacctgcagcaagtcaagcagttctgtatccgggtggagaacgactggcaccgggtgtacctggtgcggaagctcagcagccagcgggggatggagttcgtgcagggcctctccaagcccggccgcccgcaccagtgggtgtttcccaaggacgttgtcaagcagcaggggctgcggcaggaccacccaggccagatggataggtacctggtgtacggcgatgaatacaaggctctccgtgatgctgtggccaaagctgtcctcgagtgcaagccactgggcattaagactgctctgaaggcctgcaagaccccccaaagccagcagtcagcctacttcctgttaacactgtttagagaggtggctattttgtacagatcccacaatgcaagcctccaccccacgccagagcaatgtgaagctgtgagcaaattcattggcgaatgcaagatcctttcacctcctgatatcagccgttttgcaacatcgctcgtggacaattctgtgccattgttgagggcggggcctagtgacagcaaccttgatggaacggtgacagaaatggccattcatgctgcagccgtccttctgtgtggacagaatgaactcttggagcccctaaagaatctggccttctccccagccaccatggcgcatgcttttcttccaaccatgcctgaagacttgctggctcaagctcggaggtggaagggtctggagcgagtccactggtacacttgtcccaacggccatccttgctccgtgggagagtgtggcaggccgatggaacagagcatctgcattgactgccatgcgccgattggaggcattgaccacaaacctcgggacggctttcatctggtcaaagacaaggcagacagaacgcagaccggccatgtgctgggcaacccgcagcggagagacgtggtgacatgtgaccgagggctgcccccagtggtcttcctccttatccggctactcactcacttggctctgcttctgggagcgtcccagagttcccaggctctgataaacatcattaagcctccagtgagggatccaaaaggctttctgcagcagcacatcctgaaggacctggagcagttggccaagatgctgggacacagtgccgacgagaccatcggcgtggtccacctcgtcctgcgcaggcttctccaagagcagcaccagctctctagcagaaggcttttaaattttgacacagaattgtcaactaaagaaatgaggaacaactgggaaaaggaaatcgcagctgtgatttctcctgaactggagcatctagataaaacccttcccaccatgaataatctcatcagccaagataagcgtatcagctctaaccctgtggccaaaataatatatggtgacccagtgaccttcctgccccacctgccccggaaaagtgtggtccattgctctaagatttggagctgcaggaaaagaattacagttgagtacctccagcacattgtggaacagaaaaatggcaaagaaagagtgcccatcctctggcatttcctgcagaaggaagcagagctgaggctggtaaagttcctgcctgagattttggccttgcaaagggatctagtgaagcagttccagaacgtccagcaagttgaatacagctccatcagaggcttcctcagcaagcacagctcagatgggttgaggcagctgcttcacaacaggatcacagtctttctgtccacatggaacaaactgaggagatcgcttgagacgaacggtgagatcaacctacccaaagactactgcagcactgacttggatctggacactgagtttgagatcctcttgccacgccgacggggcctgggcctctgtgctaccgctctcgtcagctacttgattcgcctacacaatgaaattgtctacgccgtggaaaaactctccaaggaaaacaacagctattccgtggatgccgccgaggtcactgaactgcatgtcatcagttatgaagtggagcgggacctgactccactgattctctccaactgccagtaccaggtggaggagggcagagagaccgtgcaggagttcgatctggagaagattcagcggcagatcgtcagccgcttcctccagggcaagccccggctgagcctcaagggaatacccactctggtgtacagacacgactggaactatgaacatctctttatggacatcaagaacaaaatggcacaggactccctccccagctcggtcattagtgccatcagtggacagctgcagtcctacagcgatgcctgtgaagtgctgtctgtcgtagaagtcactctggggtttctgagcacagctggtggggatccaaacatgcagctgaatgtgtatactcaagacatcctgcaaatgggtgatcagacgattcacgtgttaaaggccttaaacagatgccagttaaaacacaccattgccctctggcagttcctgtctgctcataagtctgaacagctgctgcggctgcacaaagagccatttggggaaatcagttcaaggtacaaagcggatctgagcccggaaaatgctaagctcctcagcacattcctaaatcagactggcctagacgccttcctgctagagctgcacgaaatgataatcttgaaactaaagaacccccaaacccaaaccgaggagcgcttccgccctcagtggagcctgagagacactctcgtaagttacatgcaaactaaagaaagtgaaattcttcctgaaatggcatctcagttcccagaagagatactgctcgccagctgtgtctcagtgtggaaaacagctgctgtgctgaaatggaatcgagaaatgagatagaattatttcctcagctatctttggatgactttggagagaagactcctctctcctcgtctgcggcgtggacttgatcatggactggtgcctttgcattcagaaggagagctgtcagcgtagcaccgaattcaagaccaaggcgtgctacctgagctgacagctttttgaaagccgagctgtttctgaaccatgtacatacatgttctgaaactttctcatcattttatgagtactgttcattgagagatgacaatgaagattagatgaaattggaaataaaccaacattgtttacattccaggagacttgtagctcagccacacacgcagtaatgacctgtgcccgttcgcctctggcactgcccacccctctttttttttttcttctaattctgtactcacaaaagagaatctcattttcttctttcttccattcccttaaattctgagtactgtacatatatttctgggttcccacgatgatgtgaaaaactaccagactgttttttgtcttctcacaaagacaagaaaaatcagggcattttgtgagtgccttaagatcaaactaacaagatctgaccctctcccctcacagtgagccactgccccacttcagagggtaagagccaaaagcctcattgtgaaaggcactggacttggaccagggacaccatcagggccttggttttctcacgcataaaatggagagtggattaatcgccaaagattcttctgatctgacattttgaaattgtgagagaaactagatgactgtaaacttggtcacaggcctggttctggcagttctttgcggacttttttctagcattatgccaaataaacatgcagtctcagtgtgctctcgcatgtatgaatatctagtcctttctgtggttctcagccaagacataaaaactaggactcagagcacatacaaaaccagttatgtttcggaaagagggaaaagagtccccgagcccggatcttgtgctgcttttctcactgacgtgttgccttttttctttacaaaatctgctttgatacttaggacctctctggactaatttctcttcctagacagctcagcacagctattgatatgttagaggcagtatccttaatattcattctaaatgagttaacgacttaacttgaaattgggcctaaggagtgagaactacaaaaatacaaaatgcttgtccaggactcagccatgcacaccttgagcagcgccggcaggaggcacggaaggaactgtgctccgttctcctcactgtcatggtgccaccagtgtctgatgaagggcagagtgacccagactgcaggcagtaactgacttcacacagtccctggcatttagtcatctgtgattgttttatcactctggactgtgcagagccacctgccaccgagatctgcattccgactgcctatgaacgggtgtgggggccgggggctggcttgctgaagtcttcaacttgcactcggagctccttatacctancactgcttgaagtggagttacaccgactactggccacctaccaggcgggattaatgcatccttttggaaggcttttttctctgcctggaattccatttataaagtctaaatgtcaattgggctggttaaacttaattgaaactgtttttgttgcaaaatactgcctccgggcacaaatataaaacaccaaaacaaaaaaaaattggggccgtccatcctatagcttaaaacttcccttcagcggttgaacatcgcccatatgtgaaacccttttcttatataaacgcccctcctccaatcctttggtaaacgctctttcctactactactattactgcctcttctccgcggctctca

SEQ ID NO: 499931 - DNA, 2587 bp, Homo sapiens
aggtggtaaatatgtagagggagtatagggctgtgactagtatgtagagtcctgtaagtaggagagtgatattcgatctggagaagattcagcggcagatcgtcagccgcttcctccagggcaagccccggctgagcctcaagggaatacccactctggtgtacagacacgactggaactatgaacatctctttatggacatcaagaacaaaatggcacaggactccctccccagctcggtcattagtgccatcagtggacagctgcagtcctacagcgatgcctgtgaagtgctgtctgtcgtagaagtcactctggggtttctgagcacagctggtggggatccaaacatgcagctgaatgtgtatactcaagacatcctgcaaatgggtgatcagacgattcacgtgttaaaggccttaaacagatgccagttaaaacacaccattgccctctggcagttcctgtctgctcataagtctgaacagctgctgcggctgcacaaagagccatttggggaaatcagttcaaggtacaaagcggatctgagcccggaaaatgctaagctcctcagcacattcctaaatcagactggcctagacgccttcctgctagagctgcacgaaatgataatcttgaaactaaagaacccccaaacccaaaccgaggagcgcttccgccctcagtggagcctgagagacactctcgtaagttacatgcaaactaaagaaagtgaaattcttcctgaaatggcatctcagttcccagaagagatactgctcgccagctgtgtctcagtgtggaaaacagctgctgtgctgaaatggaatcgagaaatgagatagaattatttcctcagctatctttggatgactttggagagaagactcctctctcctcgtctgcggcgtggacttgatcatggactggtgcctttgcattcagaaggagagctgtcagcgtagcaccgaattcaagaccaaggcgtgctacctgagctgacagctttttgaaagccgagctgtttctgaaccatgtacatacatgttctgaaactttctcatcattttatgagtactgttcattgagagatgacaatgaagattagatgaaattggaaataaaccaacattgtttacattccaggagacttgtagctcagccacacacgcagtaatgacctgtgcccgttcgcctctggcactgcccacccctctttttttttttcttctaattctgtactcacaaaagagaatctcattttcttctttcttccattcccttaaattctgagtactgtacatatatttctgggttcccacgatgatgtgaaaaactaccagactgttttttgtcttctcacaaagacaagaaaaatcagggcattttgtgagtgccttaagatcaaactaacaagatctgaccctctcccctcacagtgagccactgccccacttcagagggtaagagccaaaagcctcattgtgaaaggcactggacttggaccagggacaccatcagggccttggttttctcacgcataaaatggagagtggattaatcgccaaagattcttctgatctgacattttgaaattgtgagagaaactagatgactgtaaacttggtcacaggcctggttctggcagttctttgcggacttttttctagcattatgccaaataaacatgcagtctcagtgtgctctcgcatgtatgaatatctagtcctttctgtggttctcagccaagacataaaaactaggactcagagcacatacaaaaccagttatgtttcggaaagagggaaaagagtccccgagcccggatcttgtgctgcttttctcactgacgtgttgccttttttctttacaaaatctgctttgatacttaggacctctctggactaatttctcttcctagacagctcagcacagctattgatatgttagaggcagtatccttaatattcattctaaatgagttaacgacttaacttgaaattgggcctaaggagtgagaactacaaaaatacaaaatgcttgtccaggactcagccatgcacaccttgagcagcgccggcaggaggcacggaaggaactgtgctccgttctcctcactgtcatggtgccaccagtgtctgatgaagggcagagtgacccagactgcaggcagtaactgacttcacacagtccctggcatttagtcatctgtgattgttttatcactctggactgtgcagagccacctgccaccgagatctgcattccgactgcctatgaacgggtgtgggggccgggggctggcttgctgaagtcttcaacttgcactcggagctcctttgatacctcagagctggctgtcaggtggcagctcacacccagactcactggccacacctcagcagggggggagtcgagtgtcagtctctttctgtgaaggctttttttttcctttggcctgggaatttttcccatttttatgaaggggttttaaattgtttcattttgtgtgctgtgcttcaaagccttaactgtcaaatcttgcattatcttgtttgtacagaaatatactggcctagcagaggca

SEQ ID NO: 499932 - DNA, 148 bp, Homo sapiens
tgctaggtaggcgagtggacatggatagatgagaatgacaacatcacagatgtcctagcattctgcgtggcccagactgccagccgattgagccatcacccgtttatgcccagtcatggtgtgcgattgtcatcccaacaatgatctg

SEQ ID NO: 499933 - DNA, 182 bp, Homo sapiens
cgtttaagttggggctgccagctgcccacaccataattggcccccgccgcattcacacagtcctgtgtgctggggatggtaacaatgaaatacctgtgccctgagtgttggacgtggggaatttctcctgtgggctcagacgtgttgtactctgtaacaactcagagatgctatcttgacgt

SEQ ID NO: 499934 - DNA, 3009 bp, Homo sapiens
cggctgcagattctgtttgtcatctgctggaaatgtccacgatggatttaattttaaaaaacttttttctttcccaatttagggaatacccactctggtgtacagacacgactggaactatgaacatctctttatggacatcaagaacaaaatggcacaggtgatcccgataaacctgatcctgtgcacggggctttctgccttctcagtgtgtttccctccgtgttaggcctactccagccttgccccgggtgtttgctgtgagcccacagtttctgcggcctcccttacagagagcaagcaagacagcaaatcagcaagttttcttgtagagtaaaagcagattgacatcttgtgggtttgattcttaggaatgatgttgatgcatggccatgcctgctgaagcgggaagtccatggaaccgatttgttcctgctctccgcatgcgggtactgataggtagacctgtgtgtctccatggcctccaggaactgcctgcacaccgtgcgcccaagtgtcagctgttagagagttggccccccgcatgtggcttgggcagtgaaggggctcggctctcttaccaggtggtgagatgccagaaacccagcccacagacatccctctcctgcttttcatttcccaggactccctccccagctcggtcattagtgccatcagtggacagctgcagtcctacagcgatgcctgtgaagtgctgtctgtcgtagaagtcactctggggtttctgagcacagctggtggggatccaaacatgcagctgaatgtgtatactcaagacatcctgcaaatgggtgatcagacgattcacgtgttaaaggccttaaacagatgccagttaaaacacaccattgccctctggcagttcctgtctgctcataagtctgaacagctgctgcggctgcacaaagagccatttggggaaatcagttcaaggtacaaagcggatctgagcccggaaaatgctaagctcctcagcacattcctaaatcagactggcctagacgccttcctgctagagctgcacgaaatgataatcttgaaactaaagaacccccaaacccaaaccgaggagcgcttccgccctcagtggagcctgagagacactctcgtaagttacatgcaaactaaagaaagtgaaattcttcctgaaatggcatctcagttcccagaagagatactgctcgccagctgtgtctcagtgtggaaaacagctgctgtgctgaaatggaatcgagaaatgagatagaattatttcctcagctatctttggatgactttggagagaagactcctctctcctcgtctgcggcgtggacttgatcatggactggtgcctttgcattcagaaggagagctgtcagcgtagcaccgaattcaagaccaaggcgtgctacctgagctgacagctttttgaaagccgagctgtttctgaaccatgtacatacatgttctgaaactttctcatcattttatgagtactgttcattgagagatgacaatgaagattagatgaaattggaaataaaccaacattgtttacattccaggagacttgtagctcagccacacacgcagtaatgacctgtgcccgttcgcctctggcactgcccacccctctttttttttttcttctaattctgtactcacaaaagagaatctcattttcttctttcttccattcccttaaattctgagtactgtacatatatttctgggttcccacgatgatgtgaaaaactaccagactgttttttgtcttctcacaaagacaagaaaaatcagggcattttgtgagtgccttaagatcaaactaacaagatctgaccctctcccctcacagtgagccactgccccacttcagagggtaagagccaaaagcctcattgtgaaaggcactggacttggaccagggacaccatcagggccttggttttctcacgcataaaatggagagtggattaatcgccaaagattcttctgatctgacattttgaaattgtgagagaaactagatgactgtaaacttggtcacaggcctggttctggcagttctttgcggacttttttctagcattatgccaaataaacatgcagtctcagtgtgctctcgcatgtatgaatatctagtcctttctgtggttctcagccaagacataaaaactaggactcagagcacatacaaaaccagttatgtttcggaaagagggaaaagagtccccgagcccggatcttgtgctgcttttctcactgacgtgttgccttttttctttacaaaatctgctttgatacttaggacctctctggactaatttctcttcctagacagctcagcacagctattgatatgttagaggcagtatccttaatattcattctaaatgagttaacgacttaacttgaaattgggcctaaggagtgagaactacaaaaatacaaaatgcttgtccaggactcagccatgcacaccttgagcagcgccggcaggaggcacggaaggaactgtgctccgttctcctcactgtcatggtgccaccagtgtctgatgaagggcagagtgacccagactgcaggcagtaactgacttcacacagtccctggcatttagtcatctgtgattgttttatcactctggactgtgcagagccacctgccaccgagatctgcattccgactgcctatgaacgggtgtgggggccgggggctggcttgctgaagtcttcaacttgcactcggagctcctttgatacctcagagctggctgtcaggtggcagctcacacccagactcactggccacacctcagcagggggggagtcgagtgtcagtctctttctgtgaaggctttttttttcctttggcctgggaatttttcccatttttatgaaggggttttaaattgtttcattttgtgtgctgtgcttcaaagccttaactgtcaaatcttgcattatcttgtttgtacagaaatatactggcctagcagaggca

SEQ ID NO: 499935 - DNA, 6224 bp, Homo sapiens
  misc_feature (436)..(436): n is a, c, g, or t
tgatctagaggtcccatgcgcgacgcttccatcaacgtccctttcagctggaaaatcaaggactatctggaggagctgtgggtccaggctcagtacatcacagacgcagaaggactgcccaagaagttcgtggacatctttcagcagactcctctgggcaggtttcttgcccagctccatggagagccgcagcaggaacttcttcagtgttacttgaaggatttcattctcttgaccatgcgtgtgtcaacggaggaggaattaaagtttctgcagatggctctgtggtcctgcactaggaaactgaaagcggcgtcagaagcgcccgaggaagaggtttccttaccgtgggtgcaccttgcctaccagcgtttcagaagccgtctgcagaacttttccagaatcctgaccatctaccctcaggttctccacagcntgatggaagcccgttggaaccatgagctggctggatgtgagatgaccctggacgcatttgccgcaatggcctgcacggagatgctgacaagaaacaccctgaagcccagtccccaggcgtggctacagttggtgaagaatctttccatgccgctggagctcatctgctccgatgagcacatgcaaggcagcgggagcctggcccaggctgtcatcagggaagtcagagcccagtggagtcggattttctccaccgcactcttcgtggagcacgtgctcctaggaaccgagagccgcgtccccgagttacaggggctggtgaccgagcacgtcttcttactagacaagtgtcttcgagagaactctgacgtgaagacgcacgggccttttgaggccgtgatgcgcactctctgtgaatgcaaggagacagccagcaagaccctcagcaggtttgggattcagccgtgctccatctgcctgggagatgcaaaggaccccgtctgtctgccctgcgaccacgtgcactgcctgcgctgcctcagggcctggtttgcctcagagcagatgatatgcccctactgtttaactgccttgccagacgaattctctccagctgtttcccaagcgcacagggaagccattgaaaagcatgcccgcttccggcagatgtgcaacagtttcttcgtagacctggtgtccaccatttgcttcaaggacaacgctccgcctgagaaggaagtgattgagagcctgctctctctcctcttcgtccaaaaggggcgcttaagagatgctgcccagagacactgtgaacacacaaaatctctctctccattcaatgatgttgtggataagactcctgtcatccgctcagtgatactgaaactgcttttgaagtacagctttcatgatgtaaaagattatattcaggaatatttgaccctgttaaaaaagaaagcattcataactgaagataaaactgaactgtacatgctcttcatcaactgcctggaggattcaatacttgagaagaccagtgcttactccagaaatgatgaactgaaccacctagaagaggaaggtcgtttccttaaggcatattctccagcaagccggggccgagagcctgccaacgaggcctcggttgaatacctgcaagaggtggcccggatccgcctctgcctcgacagagctgcagatttcctctcggagcctgagggaggcccagagatggccaaggagaagcagtgctacctgcagcaagtcaagcagttctgtatccgggtggagaacgactggcaccgggtgtacctggtgcggaagctcagcagccagcgggggatggagttcgtgcagggcctctccaagcccggccgcccgcaccagtgggtgtttcccaaggacgttgtcaagcagcaggggctgcggcaggaccacccaggccagatggataggtacctggtgtacggcgatgaatacaaggctctccgtgatgctgtggccaaagctgtcctcgagtgcaagccactgggcattaagactgctctgaaggcctgcaagaccccccaaagccagcagtcagcctacttcctgttaacactgtttagagaggtggctattttgtacagatcccacaatgcaagcctccaccccacgccagagcaatgtgaagctgtgagcaaattcattggcgaatgcaagatcctttcacctcctgatatcagccgttttgcaacatcgctcgtggacaattctgtgccattgttgagggcggggcctagtgacagcaaccttgatggaacggtgacagaaatggccattcatgctgcagccgtccttctgtgtggacagaatgaactcttggagcccctaaagaatctggccttctccccagccaccatggcgcatgcttttcttccaaccatgcctgaagacttgctggctcaagctcggaggtggaagggtctggagcgagtccactggtacacttgtcccaacggccatccttgctccgtgggagagtgtggcaggccgatggaacagagcatctgcattgactgccatgcgccgattggaggcattgaccacaaacctcgggacggctttcatctggtcaaagacaaggcagacagaacgcagaccggccatgtgctgggcaacccgcagcggagagacgtggtgacatgtgaccgagggctgcccccagtggtcttcctccttatccggctactcactcacttggctctgcttctgggagcgtcccagagttcccaggctctgataaacatcattaagcctccagtgagggatccaaaaggctttctgcagcagcacatcctgaaggacctggagcagttggccaagatgctgggacacagtgccgacgagaccatcggcgtggtccacctcgtcctgcgcaggcttctccaagagcagcaccagctctctagcagaaggcttttaaattttgacacagaattgtcaactaaagaaatgaggaacaactgggaaaaggaaatcgcagctgtgatttctcctgaactggagcatctagataaaacccttcccaccatgaataatctcatcagccaagataagcgtatcagctctaaccctgtggccaaaataatatatggtgacccagtgaccttcctgccccacctgccccggaaaagtgtggtccattgctctaagatttggagctgcaggaaaagaattacagttgagtacctccagcacattgtggaacagaaaaatggcaaagaaagagtgcccatcctctggcatttcctgcagaaggaagcagagctgaggctggtaaagttcctgcctgagattttggccttgcaaagggatctagtgaagcagttccagaacgtccagcaagttgaatacagctccatcagaggcttcctcagcaagcacagctcagatgggttgaggcagctgcttcacaacaggatcacagtctttctgtccacatggaacaaactgaggagatcgcttgagacgaacggtgagatcaacctacccaaagactactgcagcactgacttggatctggacactgagtttgagatcctcttgccacgccgacggggcctgggcctctgtgctaccgctctcgtcagctacttgattcgcctacacaatgaaattgtctacgccgtggaaaaactctccaaggaaaacaacagctattccgtggatgccgccgaggtcactgaactgcatgtcatcagttatgaagtggagcgggacctgactccactgattctctccaactgccagtaccaggtggaggagggcagagagaccgtgcaggagttcgatctggagaagattcagcggcagatcgtcagccgcttcctccagggcaagccccggctgagcctcaagggaatacccactctggtgtacagacacgactggaactatgaacatctctttatggacatcaagaacaaaatggcacaggactccctccccagctcggtcattagtgccatcagtggacagctgcagtcctacagcgatgcctgtgaagtgctgtctgtcgtagaagtcactctggggtttctgagcacagctggtggggatccaaacatgcagctgaatgtgtatactcaagacatcctgcaaatgggtgatcagacgattcacgtgttaaaggccttaaacagatgccagttaaaacacaccattgccctctggcagttcctgtctgctcataagtctgaacagctgctgcggctgcacaaagagccatttggggaaatcagttcaaggtacaaagcggatctgagcccggaaaatgctaagctcctcagcacattcctaaatcagactggcctagacgccttcctgctagagctgcacgaaatgataatcttgaaactaaagaacccccaaacccaaaccgaggagcgcttccgccctcagtggagcctgagagacactctcgtaagttacatgcaaactaaagaaagtgaaattcttcctgaaatggcatctcagttcccagaagagatactgctcgccagctgtgtctcagtgtggaaaacagctgctgtgctgaaatggaatcgagaaatgagatagaattatttcctcagctatctttggatgactttggagagaagactcctctctcctcgtctgcggcgtggacttgatcatggactggtgcctttgcattcagaaggagagctgtcagcgtagcaccgaattcaagaccaaggcgtgctacctgagctgacagctttttgaaagccgagctgtttctgaaccatgtacatacatgttctgaaactttctcatcattttatgagtactgttcattgagagatgacaatgaagattagatgaaattggaaataaaccaacattgtttacattccaggagacttgtagctcagccacacacgcagtaatgacctgtgcccgttcgcctctggcactgcccacccctctttttttttttcttctaattctgtactcacaaaagagaatctcattttcttctttcttccattcccttaaattctgagtactgtacatatatttctgggttcccacgatgatgtgaaaaactaccagactgttttttgtcttctcacaaagacaagaaaaatcagggcattttgtgagtgccttaagatcaaactaacaagatctgaccctctcccctcacagtgagccactgccccacttcagagggtaagagccaaaagcctcattgtgaaaggcactggacttggaccagggacaccatcagggccttggttttctcacgcataaaatggagagtggattaatcgccaaagattcttctgatctgacattttgaaattgtgagagaaactagatgactgtaaacttggtcacaggcctggttctggcagttctttgcggacttttttctagcattatgccaaataaacatgcagtctcagtgtgctctcgcatgtatgaatatctagtcctttctgtggttctcagccaagacataaaaactaggactcagagcacatacaaaaccagttatgtttcggaaagagggaaaagagtccccgagcccggatcttgtgctgcttttctcactgacgtgttgccttttttctttacctcagcacagctattgatatgttagaggcagtatccttaatattcattctaaatgagttaacgacttaacttgaaattgggcctaaggagtgagaactacaaaaatacaaaatgcttgtccaggactcagccatgcacaccttgagcagcgccggcaggaggcacggaaggaactgtgctccgttctcctcactgtcatggtgccaccagtgtctgatgaagggcagagtgacccagactgcaggcagtaactgacttcacacagtccctggcatttagtcatctgtgattgttttatcactctggactgtgcagagccacctgccaccgagatctgcattccgactgcctatgaacgggtgtgggggccgggggctggcttgctgaagtcttcaacttgcactcggagctcctttgatacctcagagctggctgtcaggtggcagctcacacccagactcactggccacacctcagcagggggggagtcgagtgtcagtctctttctgtgaaggctttttttttcctttggcctgggaatttttcccatttttatgaaggggttttaaattgtttcattttgtgtgctgtgcttcaaagccttaactgtcaaatcttgcattatcttgtttgtacagaaatatactggcctagcagaggca

SEQ ID NO: 499936 - DNA, 2120 bp, Homo sapiens
acttctgctcggtacccagaaaagatgccccagaccaaagagccatttggggaaatcagttcaaggtacaaagcggatctgagcccggaaaatgctaagctcctcagcacattcctaaatcagactggcctagacgccttcctgctagagctgcacgaaatgataatcttgaaactaaagaacccccaaacccaaaccgaggagcgcttccgccctcagtggagcctgagagacactctcgtaagttacatgcaaactaaagaaagtgaaattcttcctgaaatggcatctcagttcccagaagagatactgctcgccagctgtgtctcagtgtggaaaacagctgctgtgctgaaatggaatcgagaaatgagatagaattatttcctcagctatctttggatgactttggagagaagactcctctctcctcgtctgcggcgtggacttgatcatggactggtgcctttgcattcagaaggagagctgtcagcgtagcaccgaattcaagaccaaggcgtgctacctgagctgacagctttttgaaagccgagctgtttctgaaccatgtacatacatgttctgaaactttctcatcattttatgagtactgttcattgagagatgacaatgaagattagatgaaattggaaataaaccaacattgtttacattccaggagacttgtagctcagccacacacgcagtaatgacctgtgcccgttcgcctctggcactgcccacccctctttttttttttcttctaattctgtactcacaaaagagaatctcattttcttctttcttccattcccttaaattctgagtactgtacatatatttctgggttcccacgatgatgtgaaaaactaccagactgttttttgtcttctcacaaagacaagaaaaatcagggcattttgtgagtgccttaagatcaaactaacaagatctgaccctctcccctcacagtgagccactgccccacttcagagggtaagagccaaaagcctcattgtgaaaggcactggacttggaccagggacaccatcagggccttggttttctcacgcataaaatggagagtggattaatcgccaaagattcttctgatctgacattttgaaattgtgagagaaactagatgactgtaaacttggtcacaggcctggttctggcagttctttgcggacttttttctagcattatgccaaataaacatgcagtctcagtgtgctctcgcatgtatgaatatctagtcctttctgtggttctcagccaagacataaaaactaggactcagagcacatacaaaaccagttatgtttcggaaagagggaaaagagtccccgagcccggatcttgtgctgcttttctcactgacgtgttgccttttttctttacaaaatctgctttgatacttaggacctctctggactaatttctcttcctagacagctcagcacagctattgatatgttagaggcagtatccttaatattcattctaaatgagttaacgacttaacttgaaattgggcctaaggagtgagaactacaaaaatacaaaatgcttgtccaggactcagccatgcacaccttgagcagcgccggcaggaggcacggaaggaactgtgctccgttctcctcactgtcatggtgccaccagtgtctgatgaagggcagagtgacccagactgcaggcagtaactgacttcacacagtccctggcatttagtcatctgtgattgttttatcactctggactgtgcagagccacctgccaccgagatctgcattccgactgcctatgaacgggtgtgggggccgggggctggcttgctgaagtcttcaacttgcactcggagctcctttgatacctcagagctggctgtcaggtggcagctcacacccagactcactggccacacctcagcagggggggagtcgagtgtcagtctctttctgtgaaggctttttttttcctttggcctgggaatttttcccatttttatgaaggggttttaaattgtttcattttgtgtgctgtgcttcaaagccttaactgtcaaatcttgcattatcttgtttgtacagaaatatactggcctagcagaggca

SEQ ID NO: 499937 - DNA, 180 bp, Homo sapiens
tctacctcttggagaaggaagccgagcgggaacggaaccgacagctggagcgagagaaacgtcgggagcacatgtcgtggagagggacagggagagagagagagaaagggagcgggacagtggggaccgatgatcgacgatagggaaatgggaccgatgaactgaggcagtggaaatggt

SEQ ID NO: 499938 - DNA, 283 bp, Homo sapiens
gagggacccatggcagttgctcccagtgcatcccaggccacaggaagcttttttgagtggcagggaaggggatgggggggctttttccacacccagcaggggcaaccagagtttcatgtgtgccgcccacaggagccaagccttttcccctgtgtggattcatgtggccaaggttaggcctggtcccccaggaccctccccacgtgaccccagccaatcgggacagttcaaggaggaggagccccctattacacaggttggaataaaatatttaattttggta

SEQ ID NO: 499939 - DNA, 5569 bp, Homo sapiens
  misc_feature (436)..(436): n is a, c, g, or t
tgatctagaggtcccatgcgcgacgcttccatcaacgtccctttcagctggaaaatcaaggactatctggaggagctgtgggtccaggctcagtacatcacagacgcagaaggactgcccaagaagttcgtggacatctttcagcagactcctctgggcaggtttcttgcccagctccatggagagccgcagcaggaacttcttcagtgttacttgaaggatttcattctcttgaccatgcgtgtgtcaacggaggaggaattaaagtttctgcagatggctctgtggtcctgcactaggaaactgaaagcggcgtcagaagcgcccgaggaagaggtttccttaccgtgggtgcaccttgcctaccagcgtttcagaagccgtctgcagaacttttccagaatcctgaccatctaccctcaggttctccacagcntgatggaagcccgttggaaccatgagctggctggatgtgagatgaccctggacgcatttgccgcaatggcctgcacggagatgctgacaagaaacaccctgaagcccagtccccaggcgtggctacagttggtgaagaatctttccatgccgctggagctcatctgctccgatgagcacatgcaaggcagcgggagcctggcccaggctgtcatcagggaagtcagagcccagtggagtcggattttctccaccgcactcttcgtggagcacgtgctcctaggaaccgagagccgcgtccccgagttacaggggctggtgaccgagcacgtcttcttactagacaagtgtcttcgagagaactctgacgtgaagacgcacgggccttttgaggccgtgatgcgcactctctgtgaatgcaaggagacagccagcaagaccctcagcaggtttgggattcagccgtgctccatctgcctgggagatgcaaaggaccccgtctgtctgccctgcgaccacgtgcactgcctgcgctgcctcagggcctggtttgcctcagagcagatgatatgcccctactgtttaactgccttgccagacgaattctctccagctgtttcccaagcgcacagggaagccattgaaaagcatgcccgcttccggcagatgtgcaacagtttcttcgtagacctggtgtccaccatttgcttcaaggacaacgctccgcctgagaaggaagtgattgagagcctgctctctctcctcttcgtccaaaaggggcgcttaagagatgctgcccagagacactgtgaacacacaaaatctctctctccattcaatgatgttgtggataagactcctgtcatccgctcagtgatactgaaactgcttttgaagtacagctttcatgatgtaaaagattatattcaggaatatttgaccctgttaaaaaagaaagcattcataactgaagataaaactgaactgtacatgctcttcatcaactgcctggaggattcaatacttgagaagaccagtgcttactccagaaatgatgaactgaaccacctagaagaggaaggtcgtttccttaaggcatattctccagcaagccggggccgagagcctgccaacgaggcctcggttgaatacctgcaagaggtggcccggatccgcctctgcctcgacagagctgcagatttcctctcggagcctgagggaggcccagagatggccaaggagaagcagtgctacctgcagcaagtcaagcagttctgtatccgggtggagaacgactggcaccgggtgtacctggtgcggaagctcagcagccagcgggggatggagttcgtgcagggcctctccaagcccggccgcccgcaccagtgggtgtttcccaaggacgttgtcaagcagcaggggctgcggcaggaccacccaggccagatggataggtacctggtgtacggcgatgaatacaaggctctccgtgatgctgtggccaaagctgtcctcgagtgcaagccactgggcattaagactgctctgaaggcctgcaagaccccccaaagccagcagtcagcctacttcctgttaacactgtttagagaggtggctattttgtacagatcccacaatgcaagcctccaccccacgccagagcaatgtgaagctgtgagcaaattcattggcgaatgcaagatcctttcacctcctgatatcagccgttttgcaacatcgctcgtggacaattctgtgccattgttgagggcggggcctagtgacagcaaccttgatggaacggtgacagaaatggccattcatgctgcagccgtccttctgtgtggacagaatgaactcttggagcccctaaagaatctggccttctccccagccaccatggcgcatgcttttcttccaaccatgcctgaagacttgctggctcaagctcggaggtggaagggtctggagcgagtccactggtacacttgtcccaacggccatccttgctccgtgggagagtgtggcaggccgatggaacagagcatctgcattgactgccatgcgccgattggaggcattgaccacaaacctcgggacggctttcatctggtcaaagacaaggcagacagaacgcagaccggccatgtgctgggcaacccgcagcggagagacgtggtgacatgtgaccgagggctgcccccagtggtcttcctccttatccggctactcactcacttggctctgcttctgggagcgtcccagagttcccaggctctgataaacatcattaagcctccagtgagggatccaaaaggctttctgcagcagcacatcctgaaggacctggagcagttggccaagatgctgggacacagtgccgacgagaccatcggcgtggtccacctcgtcctgcgcaggcttctccaagagcagcaccagctctctagcagaaggcttttaaattttgacacagaattgtcaactaaagaaatgaggaacaactgggaaaaggaaatcgcagctgtgatttctcctgaactggagcatctagataaaacccttcccaccatgaataatctcatcagccaagataagcgtatcagctctaaccctgtggccaaaataatatatggtgacccagtgaccttcctgccccacctgccccggaaaagtgtggtccattgctctaagatttggagctgcaggaaaagaattacagttgagtacctccagcacattgtggaacagaaaaatggcaaagaaagagtgcccatcctctggcatttcctgcagaaggaagcagagctgaggctggtaaagttcctgcctgagattttggccttgcaaagggatctagtgaagcagttccagaacgtccagcaagttgaatacagctccatcagaggcttcctcagcaagcacagctcagatgggttgaggcagctgcttcacaacaggatcacagtctttctgtccacatggaacaaactgaggagatcgcttgagacgaacggtgagatcaacctacccaaagactactgcagcactgacttggatctggacactgagtttgagatcctcttgccacgccgacggggcctgggcctctgtgctaccgctctcgtcagctacttgattcgcctacacaatgaaattgtctacgccgtggaaaaactctccaaggaaaacaacagctattccgtggatgccgccgaggtcactgaactgcatgtcatcagttatgaagtggagcgggacctgactccactgattctctccaactgccagtaccaggtggaggagggcagagagaccgtgcaggagttcgatctggagaagattcagcggcagatcgtcagccgcttcctccagggcaagccccggctgagcctcaagggaatacccactctggtgtacagacacgactggaactatgaacatctctttatggacatcaagaacaaaatggcacaggactccctccccagctcggtcattagtgccatcagtggacagctgcagtcctacagcgatgcctgtgaagtgctgtctgtcgtagaagtcactctggggtttctgagcacagctggtggggatccaaacatgcagctgaatgtgtatactcaagacatcctgcaaatgggtgatcagacgattcacgtgttaaaggccttaaacagatgccagttaaaacacaccattgccctctggcagttcctgtctgctcataagtctgaacagctgctgcggctgcacaaagagccatttggggaaatcagttcaaggtacaaagcggatctgagcccggaaaatgctaagctcctcagcacattcctaaatcagactggcctagacgccttcctgctagagctgcacgaaatgataatcttgaaactaaagaacccccaaacccaaaccgaggagcgcttccgccctcagtggagcctgagagacactctcgtaagttacatgcaaactaaagaaagtgaaattcttcctgaaatggcatctcagttcccagaagagatactgctcgccagctgtgtctcagtgtggaaaacagctgctgtgctgaaatggaatcgagaaatgagatagaattatttcctcagctatctttggatgactttggagagaagactcctctctcctcgtctgcggcgtggacttgatcatggactggtgcctttgcattcagaaggagagctgtcagcgtagcaccgaattcaagaccaaggcgtgctacctgagctgacagctttttgaaagccgagctgtttctgaaccatgtacatacatgttctgaaactttctcatcattttatgagtactgttcattgagagatgacaatgaagattagatgaaattggaaataaaccaacattgtttacattccaggagacttgtagctcagccacacacgcagtaatgacctgtgcccgttcgcctctggcactgcccacccctctttttttttttcttctaattctgtactcacaaaagagaatctcattttcttctttcttccattcccttaaattctgagtactgtacatatatttctgggttcccacgatgatgtgaaaaactaccagactgttttttgtcttctcacaaagacaagaaaaatcagggcattttgtgagtgccttaagatcaaactaacaagatctgaccctctcccctcacagtgagccactgccccacttcagagggtaagagccaaaagcctcattgtgaaaggcactggacttggaccagggacaccatcagggccttggttttctcacgcataaaatggagagtggattaatcgccaaagattcttctgatctgacattttgaaattgtgagagaaactagatgactgtaaacttggtcacaggcctggttctggcagttctttgcggacttttttctagcattatgccaaataaacatgcagtctcagtgtgctctcgcatgtatgaatatctagtcctttctgtggttctcagccaagacataaaaactaggactcagagcacatacaaaaccagttatgtttcggaaagagggaaaagagtccccgagcccggatcttgtgctgcttttctcactgtgggggaaggggggatcctctatcagccc

SEQ ID NO: 499940 - DNA, 247 bp, Homo sapiens
  misc_feature (160)..(160): n is a, c, g, or t
  misc_feature (169)..(169): n is a, c, g, or t
ctaggatccctttgtagccctcttccccagccagctgagcatgggcacagaagccttccctgctccatgctgtctgtgagcaggccccatgcccagcacacctagccctgcgctggggaagaggggccaaagctcagagcaggccattggcacggcatcntgatcctgncttaacttgccctgcagcacaggtgtggagacacttgtggccttgtcaggctagagggactgggtgtaggactgggta

SEQ ID NO: 499941 - DNA, 5605 bp, Homo sapiens
  misc_feature (436)..(436): n is a, c, g, or t
tgatctagaggtcccatgcgcgacgcttccatcaacgtccctttcagctggaaaatcaaggactatctggaggagctgtgggtccaggctcagtacatcacagacgcagaaggactgcccaagaagttcgtggacatctttcagcagactcctctgggcaggtttcttgcccagctccatggagagccgcagcaggaacttcttcagtgttacttgaaggatttcattctcttgaccatgcgtgtgtcaacggaggaggaattaaagtttctgcagatggctctgtggtcctgcactaggaaactgaaagcggcgtcagaagcgcccgaggaagaggtttccttaccgtgggtgcaccttgcctaccagcgtttcagaagccgtctgcagaacttttccagaatcctgaccatctaccctcaggttctccacagcntgatggaagcccgttggaaccatgagctggctggatgtgagatgaccctggacgcatttgccgcaatggcctgcacggagatgctgacaagaaacaccctgaagcccagtccccaggcgtggctacagttggtgaagaatctttccatgccgctggagctcatctgctccgatgagcacatgcaaggcagcgggagcctggcccaggctgtcatcagggaagtcagagcccagtggagtcggattttctccaccgcactcttcgtggagcacgtgctcctaggaaccgagagccgcgtccccgagttacaggggctggtgaccgagcacgtcttcttactagacaagtgtcttcgagagaactctgacgtgaagacgcacgggccttttgaggccgtgatgcgcactctctgtgaatgcaaggagacagccagcaagaccctcagcaggtttgggattcagccgtgctccatctgcctgggagatgcaaaggaccccgtctgtctgccctgcgaccacgtgcactgcctgcgctgcctcagggcctggtttgcctcagagcagatgatatgcccctactgtttaactgccttgccagacgaattctctccagctgtttcccaagcgcacagggaagccattgaaaagcatgcccgcttccggcagatgtgcaacagtttcttcgtagacctggtgtccaccatttgcttcaaggacaacgctccgcctgagaaggaagtgattgagagcctgctctctctcctcttcgtccaaaaggggcgcttaagagatgctgcccagagacactgtgaacacacaaaatctctctctccattcaatgatgttgtggataagactcctgtcatccgctcagtgatactgaaactgcttttgaagtacagctttcatgatgtaaaagattatattcaggaatatttgaccctgttaaaaaagaaagcattcataactgaagataaaactgaactgtacatgctcttcatcaactgcctggaggattcaatacttgagaagaccagtgcttactccagaaatgatgaactgaaccacctagaagaggaaggtcgtttccttaaggcatattctccagcaagccggggccgagagcctgccaacgaggcctcggttgaatacctgcaagaggtggcccggatccgcctctgcctcgacagagctgcagatttcctctcggagcctgagggaggcccagagatggccaaggagaagcagtgctacctgcagcaagtcaagcagttctgtatccgggtggagaacgactggcaccgggtgtacctggtgcggaagctcagcagccagcgggggatggagttcgtgcagggcctctccaagcccggccgcccgcaccagtgggtgtttcccaaggacgttgtcaagcagcaggggctgcggcaggaccacccaggccagatggataggtacctggtgtacggcgatgaatacaaggctctccgtgatgctgtggccaaagctgtcctcgagtgcaagccactgggcattaagactgctctgaaggcctgcaagaccccccaaagccagcagtcagcctacttcctgttaacactgtttagagaggtggctattttgtacagatcccacaatgcaagcctccaccccacgccagagcaatgtgaagctgtgagcaaattcattggcgaatgcaagatcctttcacctcctgatatcagccgttttgcaacatcgctcgtggacaattctgtgccattgttgagggcggggcctagtgacagcaaccttgatggaacggtgacagaaatggccattcatgctgcagccgtccttctgtgtggacagaatgaactcttggagcccctaaagaatctggccttctccccagccaccatggcgcatgcttttcttccaaccatgcctgaagacttgctggctcaagctcggaggtggaagggtctggagcgagtccactggtacacttgtcccaacggccatccttgctccgtgggagagtgtggcaggccgatggaacagagcatctgcattgactgccatgcgccgattggaggcattgaccacaaacctcgggacggctttcatctggtcaaagacaaggcagacagaacgcagaccggccatgtgctgggcaacccgcagcggagagacgtggtgacatgtgaccgagggctgcccccagtggtcttcctccttatccggctactcactcacttggctctgcttctgggagcgtcccagagttcccaggctctgataaacatcattaagcctccagtgagggatccaaaaggctttctgcagcagcacatcctgaaggacctggagcagttggccaagatgctgggacacagtgccgacgagaccatcggcgtggtccacctcgtcctgcgcaggcttctccaagagcagcaccagctctctagcagaaggcttttaaattttgacacagaattgtcaactaaagaaatgaggaacaactgggaaaaggaaatcgcagctgtgatttctcctgaactggagcatctagataaaacccttcccaccatgaataatctcatcagccaagataagcgtatcagctctaaccctgtggccaaaataatatatggtgacccagtgaccttcctgccccacctgccccggaaaagtgtggtccattgctctaagatttggagctgcaggaaaagaattacagttgagtacctccagcacattgtggaacagaaaaatggcaaagaaagagtgcccatcctctggcatttcctgcagaaggaagcagagctgaggctggtaaagttcctgcctgagattttggccttgcaaagggatctagtgaagcagttccagaacgtccagcaagttgaatacagctccatcagaggcttcctcagcaagcacagctcagatgggttgaggcagctgcttcacaacaggatcacagtctttctgtccacatggaacaaactgaggagatcgcttgagacgaacggtgagatcaacctacccaaagactactgcagcactgacttggatctggacactgagtttgagatcctcttgccacgccgacggggcctgggcctctgtgctaccgctctcgtcagctacttgattcgcctacacaatgaaattgtctacgccgtggaaaaactctccaaggaaaacaacagctattccgtggatgccgccgaggtcactgaactgcatgtcatcagttatgaagtggagcgggacctgactccactgattctctccaactgccagtaccaggtggaggagggcagagagaccgtgcaggagttcgatctggagaagattcagcggcagatcgtcagccgcttcctccagggcaagccccggctgagcctcaagggaatacccactctggtgtacagacacgactggaactatgaacatctctttatggacatcaagaacaaaatggcacaggactccctccccagctcggtcattagtgccatcagtggacagctgcagtcctacagcgatgcctgtgaagtgctgtctgtcgtagaagtcactctggggtttctgagcacagctggtggggatccaaacatgcagctgaatgtgtatactcaagacatcctgcaaatgggtgatcagacgattcacgtgttaaaggccttaaacagatgccagttaaaacacaccattgccctctggcagttcctgtctgctcataagtctgaacagctgctgcggctgcacaaagagccatttggggaaatcagttcaaggtacaaagcggatctgagcccggaaaatgctaagctcctcagcacattcctaaatcagactggcctagacgccttcctgctagagctgcacgaaatgataatcttgaaactaaagaacccccaaacccaaaccgaggagcgcttccgccctcagtggagcctgagagacactctcgtaagttacatgcaaactaaagaaagtgaaattcttcctgaaatggcatctcagttcccagaagagatactgctcgccagctgtgtctcagtgtggaaaacagctgctgtgctgaaatggaatcgagaaatgagatagaattatttcctcagctatctttggatgactttggagagaagactcctctctcctcgtctgcggcgtggacttgatcatggactggtgcctttgcattcagaaggagagctgtcagcgtagcaccgaattcaagaccaaggcgtgctacctgagctgacagctttttgaaagccgagctgtttctgaaccatgtacatacatgttctgaaactttctcatcattttatgagtactgttcattgagagatgacaatgaagattagatgaaattggaaataaaccaacattgtttacattccaggagacttgtagctcagccacacacgcagtaatgacctgtgcccgttcgcctctggcactgcccacccctctttttttttttcttctaattctgtactcacaaaagagaatctcattttcttctttcttccattcccttaaattctgagtactgtacatatatttctgggttcccacgatgatgtgaaaaactaccagactgttttttgtcttctcacaaagacaagaaaaatcagggcattttgtgagtgccttaagatcaaactaacaagatctgaccctctcccctcacagtgagccactgccccacttcagagggtaagagccaaaagcctcattgtgaaaggcactggacttggaccagggacaccatcagggccttggttttctcacgcataaaatggagagtggattaatcgccaaagattcttctgatctgacattttgaaattgtgagagaaactagatgactgtaaacttggtcacaggcctggttctggcagttctttgcggacttttttctagcattatgccaaataaacatgcagtctcagtgtgctctcgcatgtatgaatatctagtcctttctgtggttctcagccaagacataaaaactaggactcagagcacatacaaaaccagttatgtttcggaaagagggaaaagagtccccgagcccggatcttgtgctgcttttctcactgacgtgttgccttttttctttacaaaatctgctttgatactaatttctctcgaaaactgggccagg

SEQ ID NO: 499942 - DNA, 535 bp, Homo sapiens
  misc_feature (450)..(450): n is a, c, g, or t
cgatctagaggacccggtggagcgggggtctcagaaaggaacgaacaagaggttggccaacaactaccggtactacggagggatctcactttagggtaaaagaaaaaaagtgagtgcatgtatgtggcagtgtgtaatgctgatggccccctagggacacctcagggtgttcatgcctctgtagtaatttcaccttgaaaggggcggggctggtgatggcttaaactaactgaatgtcgatgaagcgacacgggcaattctaggccgaagccttaaaagggccggctgacttcggcttttatactttggaaagccctgagctacccggttagagagaccacataaagaggaacgggcccgggccaggcaggggggttcaggccggtgatcccaacacttggggaggccaacgtcagtagatcgaggtcaggagatcgagaccatcccggntaaaacggtgaaaccccgtctctactaaaaatacaaaaaattagccgggcgtagtggggggggcctgtaagtcccagttacttgg

SEQ ID NO: 499943 - DNA, 196 bp, Homo sapiens
gaggtcaatagtcatcgaacatctttactatctgtagctccacatacctgttagtgtcttccacatcgagcaggaccatatatgcccaatagctatcttcactcctggacaggctggcctattcctatatcacgtaagacttgatgtagataataccaacgtagggcatgacacaagtacgtacttgcgggggcag

SEQ ID NO: 499944 - DNA, 5402 bp, Homo sapiens
  misc_feature (436)..(436): n is a, c, g, or t
tgatctagaggtcccatgcgcgacgcttccatcaacgtccctttcagctggaaaatcaaggactatctggaggagctgtgggtccaggctcagtacatcacagacgcagaaggactgcccaagaagttcgtggacatctttcagcagactcctctgggcaggtttcttgcccagctccatggagagccgcagcaggaacttcttcagtgttacttgaaggatttcattctcttgaccatgcgtgtgtcaacggaggaggaattaaagtttctgcagatggctctgtggtcctgcactaggaaactgaaagcggcgtcagaagcgcccgaggaagaggtttccttaccgtgggtgcaccttgcctaccagcgtttcagaagccgtctgcagaacttttccagaatcctgaccatctaccctcaggttctccacagcntgatggaagcccgttggaaccatgagctggctggatgtgagatgaccctggacgcatttgccgcaatggcctgcacggagatgctgacaagaaacaccctgaagcccagtccccaggcgtggctacagttggtgaagaatctttccatgccgctggagctcatctgctccgatgagcacatgcaaggcagcgggagcctggcccaggctgtcatcagggaagtcagagcccagtggagtcggattttctccaccgcactcttcgtggagcacgtgctcctaggaaccgagagccgcgtccccgagttacaggggctggtgaccgagcacgtcttcttactagacaagtgtcttcgagagaactctgacgtgaagacgcacgggccttttgaggccgtgatgcgcactctctgtgaatgcaaggagacagccagcaagaccctcagcaggtttgggattcagccgtgctccatctgcctgggagatgcaaaggaccccgtctgtctgccctgcgaccacgtgcactgcctgcgctgcctcagggcctggtttgcctcagagcagatgatatgcccctactgtttaactgccttgccagacgaattctctccagctgtttcccaagcgcacagggaagccattgaaaagcatgcccgcttccggcagatgtgcaacagtttcttcgtagacctggtgtccaccatttgcttcaaggacaacgctccgcctgagaaggaagtgattgagagcctgctctctctcctcttcgtccaaaaggggcgcttaagagatgctgcccagagacactgtgaacacacaaaatctctctctccattcaatgatgttgtggataagactcctgtcatccgctcagtgatactgaaactgcttttgaagtacagctttcatgatgtaaaagattatattcaggaatatttgaccctgttaaaaaagaaagcattcataactgaagataaaactgaactgtacatgctcttcatcaactgcctggaggattcaatacttgagaagaccagtgcttactccagaaatgatgaactgaaccacctagaagaggaaggtcgtttccttaaggcatattctccagcaagccggggccgagagcctgccaacgaggcctcggttgaatacctgcaagaggtggcccggatccgcctctgcctcgacagagctgcagatttcctctcggagcctgagggaggcccagagatggccaaggagaagcagtgctacctgcagcaagtcaagcagttctgtatccgggtggagaacgactggcaccgggtgtacctggtgcggaagctcagcagccagcgggggatggagttcgtgcagggcctctccaagcccggccgcccgcaccagtgggtgtttcccaaggacgttgtcaagcagcaggggctgcggcaggaccacccaggccagatggataggtacctggtgtacggcgatgaatacaaggctctccgtgatgctgtggccaaagctgtcctcgagtgcaagccactgggcattaagactgctctgaaggcctgcaagaccccccaaagccagcagtcagcctacttcctgttaacactgtttagagaggtggctattttgtacagatcccacaatgcaagcctccaccccacgccagagcaatgtgaagctgtgagcaaattcattggcgaatgcaagatcctttcacctcctgatatcagccgttttgcaacatcgctcgtggacaattctgtgccattgttgagggcggggcctagtgacagcaaccttgatggaacggtgacagaaatggccattcatgctgcagccgtccttctgtgtggacagaatgaactcttggagcccctaaagaatctggccttctccccagccaccatggcgcatgcttttcttccaaccatgcctgaagacttgctggctcaagctcggaggtggaagggtctggagcgagtccactggtacacttgtcccaacggccatccttgctccgtgggagagtgtggcaggccgatggaacagagcatctgcattgactgccatgcgccgattggaggcattgaccacaaacctcgggacggctttcatctggtcaaagacaaggcagacagaacgcagaccggccatgtgctgggcaacccgcagcggagagacgtggtgacatgtgaccgagggctgcccccagtggtcttcctccttatccggctactcactcacttggctctgcttctgggagcgtcccagagttcccaggctctgataaacatcattaagcctccagtgagggatccaaaaggctttctgcagcagcacatcctgaaggacctggagcagttggccaagatgctgggacacagtgccgacgagaccatcggcgtggtccacctcgtcctgcgcaggcttctccaagagcagcaccagctctctagcagaaggcttttaaattttgacacagaattgtcaactaaagaaatgaggaacaactgggaaaaggaaatcgcagctgtgatttctcctgaactggagcatctagataaaacccttcccaccatgaataatctcatcagccaagataagcgtatcagctctaaccctgtggccaaaataatatatggtgacccagtgaccttcctgccccacctgccccggaaaagtgtggtccattgctctaagatttggagctgcaggaaaagaattacagttgagtacctccagcacattgtggaacagaaaaatggcaaagaaagagtgcccatcctctggcatttcctgcagaaggaagcagagctgaggctggtaaagttcctgcctgagattttggccttgcaaagggatctagtgaagcagttccagaacgtccagcaagttgaatacagctccatcagaggcttcctcagcaagcacagctcagatgggttgaggcagctgcttcacaacaggatcacagtctttctgtccacatggaacaaactgaggagatcgcttgagacgaacggtgagatcaacctacccaaagactactgcagcactgacttggatctggacactgagtttgagatcctcttgccacgccgacggggcctgggcctctgtgctaccgctctcgtcagctacttgattcgcctacacaatgaaattgtctacgccgtggaaaaactctccaaggaaaacaacagctattccgtggatgccgccgaggtcactgaactgcatgtcatcagttatgaagtggagcgggacctgactccactgattctctccaactgccagtaccaggtggaggagggcagagagaccgtgcaggagttcgatctggagaagattcagcggcagatcgtcagccgcttcctccagggcaagccccggctgagcctcaagggaatacccactctggtgtacagacacgactggaactatgaacatctctttatggacatcaagaacaaaatggcacaggactccctccccagctcggtcattagtgccatcagtggacagctgcagtcctacagcgatgcctgtgaagtgctgtctgtcgtagaagtcactctggggtttctgagcacagctggtggggatccaaacatgcagctgaatgtgtatactcaagacatcctgcaaatgggtgatcagacgattcacgtgttaaaggccttaaacagatgccagttaaaacacaccattgccctctggcagttcctgtctgctcataagtctgaacagctgctgcggctgcacaaagagccatttggggaaatcagttcaaggtacaaagcggatctgagcccggaaaatgctaagctcctcagcacattcctaaatcagactggcctagacgccttcctgctagagctgcacgaaatgataatcttgaaactaaagaacccccaaacccaaaccgaggagcgcttccgccctcagtggagcctgagagacactctcgtaagttacatgcaaactaaagaaagtgaaattcttcctgaaatggcatctcagttcccagaagagatactgctcgccagctgtgtctcagtgtggaaaacagctgctgtgctgaaatggaatcgagaaatgagatagaattatttcctcagctatctttggatgactttggagagaagactcctctctcctcgtctgcggcgtggacttgatcatggactggtgcctttgcattcagaaggagagctgtcagcgtagcaccgaattcaagaccaaggcgtgctacctgagctgacagctttttgaaagccgagctgtttctgaaccatgtacatacatgttctgaaactttctcatcattttatgagtactgttcattgagagatgacaatgaagattagatgaaattggaaataaaccaacattgtttacattccaggagacttgtagctcagccacacacgcagtaatgacctgtgcccgttcgcctctggcactgcccacccctctttttttttttcttctaattctgtactcacaaaagagaatctcattttcttctttcttccattcccttaaattctgagtactgtacatatatttctgggttcccacgatgatgtgaaaaactaccagactgttttttgtcttctcacaaagacaagaaaaatcagggcattttgtgagtgccttaagatcaaactaacaagatctgaccctctcccctcacagtgagccactgccccacttcagagggtaagagccaaaagcctcattgtgaaaggcactggacttggaccagggacaccatcagggccttggttttctcacgcataaaatggagagtggattaatcgccaaagattcttctgatctgacattttgaaattgtgagagaaactagatgactgtaaacttggtcacaggcctggttctggcagttctttgcggacttttttctagcattatgccaaataaacatgcagtctcagtgtgctctcgca

SEQ ID NO: 499945 - DNA, 253 bp, Homo sapiens
cgctacacgttagagaaagaagactccagtgtcgcctttgcatttcaggcattgtctaagttcttcctgcatttatgtggactctgcccaaggctccctaaagacataagcttcacttcttggatagtctgtaaggagaagcaaggggaggctggtgtggaggcaaggaggaataaaggcagggctggagacaaaggctccaggctggcagacacacagggtccagtaggggtttccctgccctgcggccgct

SEQ ID NO: 499946 - DNA, 228 bp, Homo sapiens
cacgagggaagctgatcagagaagtggggctgcaggtggatgactcaaggggacactcagttattgtgaggggtccccctgtggcctgtgcagccctaggggcaggggtggccatgaatgtactgagcccccagtcccttgtaggtggcaagcagggtccaatccctggccctcagggtggactgtgacccactctaggttccctgcaagctggggctctgactcaac

SEQ ID NO: 499947 - DNA, 768 bp, Homo sapiens
ctggcctgccccattcaccggccaggcccaaaggctggcccaggctcaccagctctggactgggcgtcccgtctgaggtggggatgaccaacatgccagctctgggttttagctgaggatgggcacatcaagcactgacagccagcaagctgggcacaggcgatgctcaacctctaacacatcggctgagaacctcacctgcctctccctgcctgggagccctggcaagacagctcctctcccaggcccagcacaggcaggcgctggacagccacttcctaaggggtgcgcggccgtcaaggcagaggtgggtatccctgcacctcacacctctcaggaggtcaggatccacatccgtcgcctgctttcctgggctgcccctggggcttgtgggctgagatcaaccccttgtgccctgctttcctgggctgcccctggggcttgtgggctgagatcaaccccttgtgccctgccccaggccctccctcaggcgaggccctgcccaggcaggtggttcttccctggctgttcccttccaacaggtggggcccagaccatcctatctctttggacctggagacatttccttaactgggctttgcagcagagggaagagaacagtggcagagccaggcgcgtacctcctgtgcccaggacagcacctgtaagcaagggggaagggagcctaccacccagaactcaaatggagagaaagtcaagacaatcacccctgacgtggggctgcaccaatccctgacgtcttgacac

SEQ ID NO: 499948 - DNA, 254 bp, Homo sapiens
tcgtaaaaattatggaaatgaataattttgctaccccctttgaaatttcaaacttctggaaaatatgaaaatattccttgttccttatgaatttaaattgtaaggtatgaatgtgatttgtctgtccctcttgtatcttttccaaaaaatgattctgtttcttttggaaaaaacccgagagttgaagatagtatatttctggtagtactgaatatttccttcccgtttctatccaaaatatatatttgtttcta

SEQ ID NO: 499949 - DNA, 293 bp, Homo sapiens
ctggactatcattcaaatacaaaaacttagtgcatccagaaacaaatccaccaggctaacaagtcaccccacagaacaggagaaaacctttgccacgtatacatgtgatacgcgattaatatccagaacacataactatctacaactcaacaacatacaaacaaataacctgatacacaaatgggcaactatatagactagacattctccaaagaacatacacgaatggccaatcagcccgtgcaaagatgctcaatctcatacgtaatcaggtaaatgcaactccaaaccac

SEQ ID NO: 499950 - DNA, 375 bp, Homo sapiens
aaattgaatcaccgctcacactgctgatgatttagagtgctgtccggtggagatcccacccgaacgtcttatctaatcatgaaactccctagttccttcatgtaacttccctgaaaaatttaagtgtttcataaatttgagagtttgtgacccccttcccttgcttttccaaggtagccagtaaatacttaccacccaaggcttcctaatggtccttgcccccccggtaatattcttttttcaaaaaaatccatccagccatcacttctcaaaccaattatttttcacttcaaaacagtattgacttgtataccttgtaatttgaaatattttctttgttaaaatagaatggtatcaataaatagaccattaatc

SEQ ID NO: 499951 - DNA, 458 bp, Homo sapiens
tcctagaggatccccttgagatatcctagtgtgtctgtgtgcatgcatatgcatgtgcaagtgtgggtgtggtctgtgtgcatgtgtgtgagtgtggtctatgtgcatatgtgtgtgcgtgtgtgcatgtgtgtgtgtgtgtgcatatgcgaatgtgtgtgtgtggcctgtgtgcatttgtgtgcatgtatgtagtaggtctgtgtggatagtagtgtagagtatgtgtagtagcatagtagtatatagtactgtgtgcatagtgtagcctctgcatagtgtgtaggtctatgtgtatgtgtatctgtagtgcgtgtgtgaatgtatagtgtagcatagagtgtgagtctgtgtgcatgtataatagtgggaatgtggtctgtgagagtgtgtgtgtagtgggggggactgtggtctgtgtgcatgtgtgtgagtgtgctctgtgtgaatgtgtgtag

SEQ ID NO: 499952 - DNA, 543 bp, Homo sapiens
ccaggattgggtgtatggcaagaagtacagtgcaaaggtttcaacaaagcccttccagccccccatcgaaaaaaccatttccaaaaccaaagggaaagccccgagaacccaggtggtacaccttgcccccatcccgggaggaaatgaccaaaaaccaggtcaacctgacctgcttggtcaaaggtttttaccccaacgacatccccgtggagtgggaaaacaacgggcagccggagaaaaattacaacaccacgcctcccaatgtggaatccgaggggtcctttttcctttaaaacaagctccccgtggacaaaaacaggtggcaacaagggaaaattttttcatgctccgttaagcaaaagggtttgcccaacccctttacccaaaaaaacctttccctgtttccgggtaaaaaaatgggacggccggcaaaccccccctccccgggcttttggggttgggggaaaaagtttggcaagtaccccgtgtaaaaactttccgggcccccagcatggaaaaaaagcccccagcgctgccctggga

SEQ ID NO: 499953 - DNA, 472 bp, Homo sapiens
ggcgtgaacccagtaggcggaggttgcagtgagccgagatcgcaccactgcactccagcctgggtgacagagtgagactctgtctcgaaaacaaacaaacaaacaaacaaacaaaccgtaagccccctaaagggctgtcttggctttcttcctgaaagtcccaggtgagcttcagtcaggtaaagctggatccagggctcccacactgcccttctcttctgagctttactttcctttgtgttaacatcattcttaaggacgtgagaactccagatgattacctttccatttagcaacattggcaccttggaccctggggccgtgtttccaggatagcgtctgactagatgaacatgcatcacgtgccctctgcggaatccgtcaccgaggctggggtggttaacagtcctcttgttggccaagcctgggatcctatttaaaccaagtggattgagagaagtaggggtactgg

SEQ ID NO: 499954 - DNA, 840 bp, Homo sapiens
agcgggagaagggccatgcggacggcgagggagtccagagccttgagcccggtgctcctccctcgcgcagcggtggctctgcggccgctggagtaaacactgcctttgttccctagcgcctcgtctttcgtcgccccgtgccctcacgccgccgggctctggccggcccgccctcggtccttgaaccccatttcggctcgtgccgtgcggatgcagctgccgggcctgggtttgggcattgagcgggaggaggaggaggaacggcggcgcctgggcggcatgcgatggggaactgctgctggacgcagtgcttcggactgcttcgcaaggaagcggggcggctgcagcgagtaggcggcggcggaggatccaagtattttagaacatgctcaagaggtgagcacttaacaatagagttgagaatctagtagaaaggtggttgaagggggaaaagcccaggagccaagtccataggcctcttacggagcgacaaattggtggacctaggagaaagggcatttatgattccattgccgaaaaacaaaaagatcttgataagaaacattcacaaaagacgccaagaaaggcacgagaaattggtgcagcaatatcatccttccaacaattggagaatattcaagagttcaggaccagaagatgacttcgacatctgggttggagaacatattgaagtcaccagtatgacaggttttccgaagtagttgaacatctcatcagatgctacagtttgacaccgaatacagaaaagccagtgtatttaatgaccaaaattaatcacttattggaactgagacggacatctagatctaagtgggagca

SEQ ID NO: 499955 - DNA, 138 bp, Homo sapiens
  misc_feature (42)..(42): n is a, c, g, or t
gttcgggaggggtgtttaggggtcggtagggtataattgtcntggtcctaggaggtctggtgagaatagtgttaatgtcctcagtcgatcagcaatgatccacaagtctgccgctgctgtctgatcctcgtagtagtc

SEQ ID NO: 499956 - DNA, 305 bp, Homo sapiens
cagggccccacgtgtgcagggctggcctcccagcaccaccaggcagctccgcaggcacagagccaggcagcacagccagaaagaacgccagaaattcccagtccttatccaccggcttcatctggacgctgtgttcgctgatctggaaaccaggggtggggggtggggctggagcacagcacagggcggggcagggatggcggcgggcagtggggggagcctgggtgcccagcccagactggctcctagagccagctgaagtgtcctcgttttttacacttcactaaataactcatagtagcgcc

SEQ ID NO: 499957 - DNA, 1245 bp, Homo sapiens
  misc_feature (555)..(555): n is a, c, g, or t
  misc_feature (558)..(558): n is a, c, g, or t
  misc_feature (583)..(583): n is a, c, g, or t
  misc_feature (585)..(585): n is a, c, g, or t
  misc_feature (611)..(611): n is a, c, g, or t
  misc_feature (1114)..(1114): n is a, c, g, or t
gaaaatggtagcgatggcggttgggccgagtgggtgtctggtgccggcgttaggggtacggttgttgttggcgattgtggttcataggcggtgtctgattttggggcagagattttcatcggaggcatgcagagagttaggcatttgctaggccaacttgctttgcagttgcttgtgatcttgctcgggacagttaaacgtggttaaggttggattccggatggcagagagagtcggtgtacaggaggaaggcacaattttgaaaccagaaaggctgtatgcgggagactacttcttgaagtttgtggatgaacaagtgggaaggttccctcaagtccaagctttggttaggagtgataaaccgaaactgtgcagaggactgcagaatcaagtatgtccagtggttacagatcctgtagttaacagctttggggacggacaatggggaacatggctgaagaaactgagcattctcaggatggaacacagacaggtgaagaattcctgagtgaaaagttggaacgcatataatcttgcttaattgtcctatccttngtnaccttatcaaatgaaatattacagnanctaaaataattagttgtggttccatngatcagtcttttacttgaggcattaaatatctaattaaatcgtgaaatggcagtatagtccatgatatctaaggagtggcaagcttaacaaaacccattttttataaatgtccatcctcctgcatttgttgataccactaacaaaatgctttgtaacagacttgcggttaattatgcaaatgatagtttgtgataattggtccagttttacgaacaacagatttctaaattagagaggttaacaagacagatgattactatgcctcatgtgctgtgtgctctttgaaaggaatgacagcagactacaaagcaaataagatatactgagcctcaacagattgcctgctcctcagagtctctcctatttttgtattacccagctttctttttaatacaaatgttattatagtttacaatgaatgcactgcataaaaactttgtagcttcattattgtaaaacatattcaagatcctacagtaagagtgaaacattcacaaagatntgcgttaatgaagactacacagaaaatctttctagggatttgtgtggatcagatacatacttggcaaatttttgagttttacattcttacagaaaagtccattaaaagtgatcatttgtagaccaatatag

SEQ ID NO: 499958 - DNA, 114 bp, Homo sapiens
acatctactgagctgtgttgaaaaggcagatgtctgcatacaggacgcacatgagatcttgatcttcttcaccggctagtaggtagtagtaaggtgacgtggacataagagtgc

SEQ ID NO: 499959 - DNA, 182 bp, Homo sapiens
accctcttctgtatcttagcaaatacaagaaaggagatgggtactatcatagtctctggttactcaaaagtgacacattaacagatgatgagaggataggtgcataacgcccttcagtggtgagaatcttcctctgttccttatgatagcatacatcggggtacacaccgaagggggtgcct

SEQ ID NO: 499960 - DNA, 857 bp, Homo sapiens
  misc_feature (39)..(39): n is a, c, g, or t
  misc_feature (45)..(45): n is a, c, g, or t
  misc_feature (48)..(48): n is a, c, g, or t
  misc_feature (64)..(64): n is a, c, g, or t
  misc_feature (130)..(131): n is a, c, g, or t
  misc_feature (223)..(223): n is a, c, g, or t
  misc_feature (726)..(726): n is a, c, g, or t
agagacatgtcatcagaactgtgaactaccacgtacagntgttanganaagcaactttcactgnatgttggacgaaaggtatgcgagcacgcgatttagtacaatcattggctataagatgtttgatgcnntatcctttttgtctactcttaatcagaatgaagatgattgactagcatcctgagcaaagaatacatttcacgttttgcgtatgcgttccatngatcagtcttttacttgaggcattaaatatctaattaaatcgtgaaatggcagtatagtccatgatatctaaggagtggcaagcttaacaaaacccattttttataaatgtccatcctcctgcatttgttgataccactaacaaaatgctttgtaacagacttgcggttaattatgcaaatgatagtttgtgataattggtccagttttacgaacaacagatttctaaattagagaggttaacaagacagatgattactatgcctcatgtgctgtgtgctctttgaaaggaatgacagcagactacaaagcaaataagatatactgagcctcaacagattgcctgctcctcagagtctctcctatttttgtattacccagctttctttttaatacaaatgttattatagtttacaatgaatgcactgcataaaaactttgtagcttcattattgtaaaacatattcaagatcctacagtaagagtgaaacattcacaaagatntgcgttaatgaagactacacagaaaatctttctagggatttgtgtggatcagatacatacttggcaaatttttgagttttacattcttacagaaaagtccattaaaagtgatcatttgtagaccaatatag

SEQ ID NO: 499961 - DNA, 116 bp, Homo sapiens
cagcctgtggatcctggggcatttggaagggcgcacacatcagcagcctcaccagatgtgagcatgctacccggcctgcccctccaataaaagtgtgtaaaactccaaaaaaaaaa

SEQ ID NO: 499962 - DNA, 236 bp, Homo sapiens
tttgtatttttattaaagacaggggggtttcaccgtgttagccagggtggcctcgatatcctgacctggtgatccgcccgtctcagcctcccaaagtgtggggattacaggggtgagccaccgtgtctcgccagtatcttattatttaattaagtgtatgtagaaataatgatatttaattttggcatgccaaattatttccatttacttttacatcccctttaccccaacattta

SEQ ID NO: 499963 - DNA, 265 bp, Homo sapiens
atgagatgtgcatcatagtctcaggcacattgtgaactttgggggatgctcgctccaaccgactgctgtcaccttcaccgttccagtttttaaatcctgagtcaagccaaaaaaaaaaaaaacccaaaacaaaccaaaaaaaacaattaaggccatgccattctcatctggtttcctgcccaattaaggtttggtcaaaaaggggtgtacggcaactaatgttatgcacattctcccaatgggggcatcctctaaaagtcgcacc

SEQ ID NO: 499964 - DNA, 136 bp, Homo sapiens
ccccagttggcagagaacaaagcagcagttcgtaaagctcaaagagatgttttctaactcaactggccggcttcctgtgccaaccgacgagaagaaatacggcaatataaagtcctggttcactctcaggaacgag

SEQ ID NO: 499965 - DNA, 165 bp, Homo sapiens
tagaggacccgtgacattcaggtgataggttcaggtgaggactcgttttctacaaaaaaaatataaaaattagccaggcgtggtggcatgtgcctagtggtctcagctactcaggaggctagaggtgggaggatcacctgggtccacgaggtggaggctgcagtg

SEQ ID NO: 499966 - DNA, 205 bp, Homo sapiens
  misc_feature (107)..(107): n is a, c, g, or t
tggctgcaacctctgcactgcttttatttatctacttatttttatagagttgaggtctcactatgttgcccaggctggtctcaaactcctaggctcaagttgacctncggccttggcctcccgaagtgctgagattacaggcatgagccaccgcaccacctgcctgtcttactgtgtgaggaaaaaaataaacggtgatgtgatt

SEQ ID NO: 499967 - DNA, 1954 bp, Homo sapiens
  misc_feature (14)..(14): n is a, c, g, or t
gagcctaccatgcntgaggagactgtgtttaaatgctctcttctcttggtttgttcagcctgagagacactctcgtaagttacatgcaaactaaagaaagtgaaattcttcctgaaatggcatctcagttcccagaagagatactgctcgccagctgtgtctcagtgtggaaaacagctgctgtgctgaaatggaatcgagaaatgagatagaattatttcctcagctatctttggatgactttggagagaagactcctctctcctcgtctgcggcgtggacttgatcatggactggtgcctttgcattcagaaggagagctgtcagcgtagcaccgaattcaagaccaaggcgtgctacctgagctgacagctttttgaaagccgagctgtttctgaaccatgtacatacatgttctgaaactttctcatcattttatgagtactgttcattgagagatgacaatgaagattagatgaaattggaaataaaccaacattgtttacattccaggagacttgtagctcagccacacacgcagtaatgacctgtgcccgttcgcctctggcactgcccacccctctttttttttttcttctaattctgtactcacaaaagagaatctcattttcttctttcttccattcccttaaattctgagtactgtacatatatttctgggttcccacgatgatgtgaaaaactaccagactgttttttgtcttctcacaaagacaagaaaaatcagggcattttgtgagtgccttaagatcaaactaacaagatctgaccctctcccctcacagtgagccactgccccacttcagagggtaagagccaaaagcctcattgtgaaaggcactggacttggaccagggacaccatcagggccttggttttctcacgcataaaatggagagtggattaatcgccaaagattcttctgatctgacattttgaaattgtgagagaaactagatgactgtaaacttggtcacaggcctggttctggcagttctttgcggacttttttctagcattatgccaaataaacatgcagtctcagtgtgctctcgcatgtatgaatatctagtcctttctgtggttctcagccaagacataaaaactaggactcagagcacatacaaaaccagttatgtttcggaaagagggaaaagagtccccgagcccggatcttgtgctgcttttctcactgacgtgttgccttttttctttacaaaatctgctttgatacttaggacctctctggactaatttctcttcctagacagctcagcacagctattgatatgttagaggcagtatccttaatattcattctaaatgagttaacgacttaacttgaaattgggcctaaggagtgagaactacaaaaatacaaaatgcttgtccaggactcagccatgcacaccttgagcagcgccggcaggaggcacggaaggaactgtgctccgttctcctcactgtcatggtgccaccagtgtctgatgaagggcagagtgacccagactgcaggcagtaactgacttcacacagtccctggcatttagtcatctgtgattgttttatcactctggactgtgcagagccacctgccaccgagatctgcattccgactgcctatgaacgggtgtgggggccgggggctggcttgctgaagtcttcaacttgcactcggagctcctttgatacctcagagctggctgtcaggtggcagctcacacccagactcactggccacacctcagcagggggggagtcgagtgtcagtctctttctgtgaaggctttttttttcctttggcctgggaatttttcccatttttatgaaggggttttaaattgtttcattttgtgtgctgtgcttcaaagccttaactgtcaaatcttgcattatcttgtttgtacagaaatatactggcctagcagaggca

SEQ ID NO: 499968 - DNA, 1045 bp, Homo sapiens
gctgggttgggtgtcctggtccgcgcgagaccccagcgcgcctcgtcgtcatgcctcggaaaatcgaggaaatcaaggacttcctgctcacagcccgacgaaaggatgccgaatctgtcaagatcaagaaaaatagggacaacgtgaagtgtagcagttcgatgcagcagatacctttacagcctggtcatcactgactaaagagaaggcagagaatctgaagcagtcccgtgccggccccggttgggcgggtgaatggaactgaaatgaagcctagagactagcgtgagttggtaactgtattatattaaaatactaatcgatcctactgatgagatccggaagagaagagcggcacagggtctctatagtgatgtggcctgggaggccaaagcggtgcaagcgggctggaggagggccgttcctgtttcatgctctgccttatggaggccctcggggcacaatgaggggagacacgctcatggtgaaggaacttgaaaattggggccaacaccacgcgtgattcggcacccggtccatgcccgttcgcgaaagtcctataacgaagggagaaagctcgagtcatcactgaggaagagaagaatttcaaaagcttcgctagtctccgtatgggcccgtgcaacgcccggtcttcggcatacgggcaaaaagagccagggaagcgcagaacaggatgttgaacaagaacaaaattaagccctcctggggactgggaattcagtcggccgtccacacaaaccacacaaaaacactgttgagaaggcttatctgggagcgtaaaccctcggggatcttgataaaaaggcggggggtcactaaaatatgcgaaagaatagccccagacatggggtgacgaaggctacacgaaaacgataaggattcaggcaagggcagaccgaacgcgaagcaagcgctccgatggaagacgaatgggaactagtagagacagagaccatgagagaggagaagcgacagggaggacaggacgcacagaacacgaaagaaactgcataaaaccgcatca

SEQ ID NO: 499969 - DNA, 346 bp, Homo sapiens
cctcaaggactgcaaactgtactgccactatagctttttgatgactttgagcgagcctggctaacctggccttcccccccactattaacctcgtgggagaactctttgtggtggtaaccacgttttcgtgatcaaatatcactgtcctacttacggggctcaacatactagtcccagccctataccccctctacaaatttaccccaacacaatgggggtccctcaccccccccattaacaacataaaaccctcattcacaggagaaaaccccctcaggttcatacacctatcccccattttcctcctatccctcaaccccgacatcattaccgggttttcctctta

SEQ ID NO: 499970 - DNA, 5623 bp, Homo sapiens
  misc_feature (436)..(436): n is a, c, g, or t
tgatctagaggtcccatgcgcgacgcttccatcaacgtccctttcagctggaaaatcaaggactatctggaggagctgtgggtccaggctcagtacatcacagacgcagaaggactgcccaagaagttcgtggacatctttcagcagactcctctgggcaggtttcttgcccagctccatggagagccgcagcaggaacttcttcagtgttacttgaaggatttcattctcttgaccatgcgtgtgtcaacggaggaggaattaaagtttctgcagatggctctgtggtcctgcactaggaaactgaaagcggcgtcagaagcgcccgaggaagaggtttccttaccgtgggtgcaccttgcctaccagcgtttcagaagccgtctgcagaacttttccagaatcctgaccatctaccctcaggttctccacagcntgatggaagcccgttggaaccatgagctggctggatgtgagatgaccctggacgcatttgccgcaatggcctgcacggagatgctgacaagaaacaccctgaagcccagtccccaggcgtggctacagttggtgaagaatctttccatgccgctggagctcatctgctccgatgagcacatgcaaggcagcgggagcctggcccaggctgtcatcagggaagtcagagcccagtggagtcggattttctccaccgcactcttcgtggagcacgtgctcctaggaaccgagagccgcgtccccgagttacaggggctggtgaccgagcacgtcttcttactagacaagtgtcttcgagagaactctgacgtgaagacgcacgggccttttgaggccgtgatgcgcactctctgtgaatgcaaggagacagccagcaagaccctcagcaggtttgggattcagccgtgctccatctgcctgggagatgcaaaggaccccgtctgtctgccctgcgaccacgtgcactgcctgcgctgcctcagggcctggtttgcctcagagcagatgatatgcccctactgtttaactgccttgccagacgaattctctccagctgtttcccaagcgcacagggaagccattgaaaagcatgcccgcttccggcagatgtgcaacagtttcttcgtagacctggtgtccaccatttgcttcaaggacaacgctccgcctgagaaggaagtgattgagagcctgctctctctcctcttcgtccaaaaggggcgcttaagagatgctgcccagagacactgtgaacacacaaaatctctctctccattcaatgatgttgtggataagactcctgtcatccgctcagtgatactgaaactgcttttgaagtacagctttcatgatgtaaaagattatattcaggaatatttgaccctgttaaaaaagaaagcattcataactgaagataaaactgaactgtacatgctcttcatcaactgcctggaggattcaatacttgagaagaccagtgcttactccagaaatgatgaactgaaccacctagaagaggaaggtcgtttccttaaggcatattctccagcaagccggggccgagagcctgccaacgaggcctcggttgaatacctgcaagaggtggcccggatccgcctctgcctcgacagagctgcagatttcctctcggagcctgagggaggcccagagatggccaaggagaagcagtgctacctgcagcaagtcaagcagttctgtatccgggtggagaacgactggcaccgggtgtacctggtgcggaagctcagcagccagcgggggatggagttcgtgcagggcctctccaagcccggccgcccgcaccagtgggtgtttcccaaggacgttgtcaagcagcaggggctgcggcaggaccacccaggccagatggataggtacctggtgtacggcgatgaatacaaggctctccgtgatgctgtggccaaagctgtcctcgagtgcaagccactgggcattaagactgctctgaaggcctgcaagaccccccaaagccagcagtcagcctacttcctgttaacactgtttagagaggtggctattttgtacagatcccacaatgcaagcctccaccccacgccagagcaatgtgaagctgtgagcaaattcattggcgaatgcaagatcctttcacctcctgatatcagccgttttgcaacatcgctcgtggacaattctgtgccattgttgagggcggggcctagtgacagcaaccttgatggaacggtgacagaaatggccattcatgctgcagccgtccttctgtgtggacagaatgaactcttggagcccctaaagaatctggccttctccccagccaccatggcgcatgcttttcttccaaccatgcctgaagacttgctggctcaagctcggaggtggaagggtctggagcgagtccactggtacacttgtcccaacggccatccttgctccgtgggagagtgtggcaggccgatggaacagagcatctgcattgactgccatgcgccgattggaggcattgaccacaaacctcgggacggctttcatctggtcaaagacaaggcagacagaacgcagaccggccatgtgctgggcaacccgcagcggagagacgtggtgacatgtgaccgagggctgcccccagtggtcttcctccttatccggctactcactcacttggctctgcttctgggagcgtcccagagttcccaggctctgataaacatcattaagcctccagtgagggatccaaaaggctttctgcagcagcacatcctgaaggacctggagcagttggccaagatgctgggacacagtgccgacgagaccatcggcgtggtccacctcgtcctgcgcaggcttctccaagagcagcaccagctctctagcagaaggcttttaaattttgacacagaattgtcaactaaagaaatgaggaacaactgggaaaaggaaatcgcagctgtgatttctcctgaactggagcatctagataaaacccttcccaccatgaataatctcatcagccaagataagcgtatcagctctaaccctgtggccaaaataatatatggtgacccagtgaccttcctgccccacctgccccggaaaagtgtggtccattgctctaagatttggagctgcaggaaaagaattacagttgagtacctccagcacattgtggaacagaaaaatggcaaagaaagagtgcccatcctctggcatttcctgcagaaggaagcagagctgaggctggtaaagttcctgcctgagattttggccttgcaaagggatctagtgaagcagttccagaacgtccagcaagttgaatacagctccatcagaggcttcctcagcaagcacagctcagatgggttgaggcagctgcttcacaacaggatcacagtctttctgtccacatggaacaaactgaggagatcgcttgagacgaacggtgagatcaacctacccaaagactactgcagcactgacttggatctggacactgagtttgagatcctcttgccacgccgacggggcctgggcctctgtgctaccgctctcgtcagctacttgattcgcctacacaatgaaattgtctacgccgtggaaaaactctccaaggaaaacaacagctattccgtggatgccgccgaggtcactgaactgcatgtcatcagttatgaagtggagcgggacctgactccactgattctctccaactgccagtaccaggtggaggagggcagagagaccgtgcaggagttcgatctggagaagattcagcggcagatcgtcagccgcttcctccagggcaagccccggctgagcctcaagggaatacccactctggtgtacagacacgactggaactatgaacatctctttatggacatcaagaacaaaatggcacaggactccctccccagctcggtcattagtgccatcagtggacagctgcagtcctacagcgatgcctgtgaagtgctgtctgtcgtagaagtcactctggggtttctgagcacagctggtggggatccaaacatgcagctgaatgtgtatactcaagacatcctgcaaatgggtgatcagacgattcacgtgttaaaggccttaaacagatgccagttaaaacacaccattgccctctggcagttcctgtctgctcataagtctgaacagctgctgcggctgcacaaagagccatttggggaaatcagttcaaggtacaaagcggatctgagcccggaaaatgctaagctcctcagcacattcctaaatcagactggcctagacgccttcctgctagagctgcacgaaatgataatcttgaaactaaagaacccccaaacccaaaccgaggagcgcttccgccctcagtggagcctgagagacactctcgtaagttacatgcaaactaaagaaagtgaaattcttcctgaaatggcatctcagttcccagaagagatactgctcgccagctgtgtctcagtgtggaaaacagctgctgtgctgaaatggaatcgagaaatgagatagaattatttcctcagctatctttggatgactttggagagaagactcctctctcctcgtctgcggcgtggacttgatcatggactggtgcctttgcattcagaaggagagctgtcagcgtagcaccgaattcaagaccaaggcgtgctacctgagctgacagctttttgaaagccgagctgtttctgaaccatgtacatacatgttctgaaactttctcatcattttatgagtactgttcattgagagatgacaatgaagattagatgaaattggaaataaaccaacattgtttacattccaggagacttgtagctcagccacacacgcagtaatgacctgtgcccgttcgcctctggcactgcccacccctctttttttttttcttctaattctgtactcacaaaagagaatctcattttcttctttcttccattcccttaaattctgagtactgtacatatatttctgggttcccacgatgatgtgaaaaactaccagactgttttttgtcttctcacaaagacaagaaaaatcagggcattttgtgagtgccttaagatcaaactaacaagatctgaccctctcccctcacagtgagccactgccccacttcagagggtaagagccaaaagcctcattgtgaaaggcactggacttggaccagggacaccatcagggccttggttttctcacgcataaaatggagagtggattaatcgccaaagattcttctgatctgacattttgaaattgtgagagaaactagatgactgtaaacttggtcacaggcctggttctggcagttctttgcggacttttttctagcattatgccaaataaacatgcagtctcagtgtgctctcgcatgtatgaatatctagtcctttctgtggttctcagccaagacataaaaactaggactcagagcacatacaaaaccagttatgtttcggaaagaggatccagacgatcggtgagcgcgatacttggtccggtgttgtcacagagcatgcaagcgctgattctgtacagaatatgcgtctaacacgtcaggtcctctatgcgagcaactttatctcggatcaat

SEQ ID NO: 499971 - DNA, 4834 bp, Homo sapiens
  misc_feature (436)..(436): n is a, c, g, or t
tgatctagaggtcccatgcgcgacgcttccatcaacgtccctttcagctggaaaatcaaggactatctggaggagctgtgggtccaggctcagtacatcacagacgcagaaggactgcccaagaagttcgtggacatctttcagcagactcctctgggcaggtttcttgcccagctccatggagagccgcagcaggaacttcttcagtgttacttgaaggatttcattctcttgaccatgcgtgtgtcaacggaggaggaattaaagtttctgcagatggctctgtggtcctgcactaggaaactgaaagcggcgtcagaagcgcccgaggaagaggtttccttaccgtgggtgcaccttgcctaccagcgtttcagaagccgtctgcagaacttttccagaatcctgaccatctaccctcaggttctccacagcntgatggaagcccgttggaaccatgagctggctggatgtgagatgaccctggacgcatttgccgcaatggcctgcacggagatgctgacaagaaacaccctgaagcccagtccccaggcgtggctacagttggtgaagaatctttccatgccgctggagctcatctgctccgatgagcacatgcaaggcagcgggagcctggcccaggctgtcatcagggaagtcagagcccagtggagtcggattttctccaccgcactcttcgtggagcacgtgctcctaggaaccgagagccgcgtccccgagttacaggggctggtgaccgagcacgtcttcttactagacaagtgtcttcgagagaactctgacgtgaagacgcacgggccttttgaggccgtgatgcgcactctctgtgaatgcaaggagacagccagcaagaccctcagcaggtttgggattcagccgtgctccatctgcctgggagatgcaaaggaccccgtctgtctgccctgcgaccacgtgcactgcctgcgctgcctcagggcctggtttgcctcagagcagatgatatgcccctactgtttaactgccttgccagacgaattctctccagctgtttcccaagcgcacagggaagccattgaaaagcatgcccgcttccggcagatgtgcaacagtttcttcgtagacctggtgtccaccatttgcttcaaggacaacgctccgcctgagaaggaagtgattgagagcctgctctctctcctcttcgtccaaaaggggcgcttaagagatgctgcccagagacactgtgaacacacaaaatctctctctccattcaatgatgttgtggataagactcctgtcatccgctcagtgatactgaaactgcttttgaagtacagctttcatgatgtaaaagattatattcaggaatatttgaccctgttaaaaaagaaagcattcataactgaagataaaactgaactgtacatgctcttcatcaactgcctggaggattcaatacttgagaagaccagtgcttactccagaaatgatgaactgaaccacctagaagaggaaggtcgtttccttaaggcatattctccagcaagccggggccgagagcctgccaacgaggcctcggttgaatacctgcaagaggtggcccggatccgcctctgcctcgacagagctgcagatttcctctcggagcctgagggaggcccagagatggccaaggagaagcagtgctacctgcagcaagtcaagcagttctgtatccgggtggagaacgactggcaccgggtgtacctggtgcggaagctcagcagccagcgggggatggagttcgtgcagggcctctccaagcccggccgcccgcaccagtgggtgtttcccaaggacgttgtcaagcagcaggggctgcggcaggaccacccaggccagatggataggtacctggtgtacggcgatgaatacaaggctctccgtgatgctgtggccaaagctgtcctcgagtgcaagccactgggcattaagactgctctgaaggcctgcaagaccccccaaagccagcagtcagcctacttcctgttaacactgtttagagaggtggctattttgtacagatcccacaatgcaagcctccaccccacgccagagcaatgtgaagctgtgagcaaattcattggcgaatgcaagatcctttcacctcctgatatcagccgttttgcaacatcgctcgtggacaattctgtgccattgttgagggcggggcctagtgacagcaaccttgatggaacggtgacagaaatggccattcatgctgcagccgtccttctgtgtggacagaatgaactcttggagcccctaaagaatctggccttctccccagccaccatggcgcatgcttttcttccaaccatgcctgaagacttgctggctcaagctcggaggtggaagggtctggagcgagtccactggtacacttgtcccaacggccatccttgctccgtgggagagtgtggcaggccgatggaacagagcatctgcattgactgccatgcgccgattggaggcattgaccacaaacctcgggacggctttcatctggtcaaagacaaggcagacagaacgcagaccggccatgtgctgggcaacccgcagcggagagacgtggtgacatgtgaccgagggctgcccccagtggtcttcctccttatccggctactcactcacttggctctgcttctgggagcgtcccagagttcccaggctctgataaacatcattaagcctccagtgagggatccaaaaggctttctgcagcagcacatcctgaaggacctggagcagttggccaagatgctgggacacagtgccgacgagaccatcggcgtggtccacctcgtcctgcgcaggcttctccaagagcagcaccagctctctagcagaaggcttttaaattttgacacagaattgtcaactaaagaaatgaggaacaactgggaaaaggaaatcgcagctgtgatttctcctgaactggagcatctagataaaacccttcccaccatgaataatctcatcagccaagataagcgtatcagctctaaccctgtggccaaaataatatatggtgacccagtgaccttcctgccccacctgccccggaaaagtgtggtccattgctctaagatttggagctgcaggaaaagaattacagttgagtacctccagcacattgtggaacagaaaaatggcaaagaaagagtgcccatcctctggcatttcctgcagaaggaagcagagctgaggctggtaaagttcctgcctgagattttggccttgcaaagggatctagtgaagcagttccagaacgtccagcaagttgaatacagctccatcagaggcttcctcagcaagcacagctcagatgggttgaggcagctgcttcacaacaggatcacagtctttctgtccacatggaacaaactgaggagatcgcttgagacgaacggtgagatcaacctacccaaagactactgcagcactgacttggatctggacactgagtttgagatcctcttgccacgccgacggggcctgggcctctgtgctaccgctctcgtcagctacttgattcgcctacacaatgaaattgtctacgccgtggaaaaactctccaaggaaaacaacagctattccgtggatgccgccgaggtcactgaactgcatgtcatcagttatgaagtggagcgggacctgactccactgattctctccaactgccagtaccaggtggaggagggcagagagaccgtgcaggagttcgatctggagaagattcagcggcagatcgtcagccgcttcctccagggcaagccccggctgagcctcaagggaatacccactctggtgtacagacacgactggaactatgaacatctctttatggacatcaagaacaaaatggcacaggactccctccccagctcggtcattagtgccatcagtggacagctgcagtcctacagcgatgcctgtgaagtgctgtctgtcgtagaagtcactctggggtttctgagcacagctggtggggatccaaacatgcagctgaatgtgtatactcaagacatcctgcaaatgggtgatcagacgattcacgtgttaaaggccttaaacagatgccagttaaaacacaccattgccctctggcagttcctgtctgctcataagtctgaacagctgctgcggctgcacaaagagccatttggggaaatcagttcaaggtacaaagcggatctgagcccggaaaatgctaagctcctcagcacattcctaaatcagactggcctagacgccttcctgctagagctgcacgaaatgataatcttgaaactaaagaacccccaaacccaaaccgaggagcgcttccgccctcagtggagcctgagagacactctcgtaagttacatgcaaactaaagaaagtgaaattcttcctgaaatggcatctcagttcccagaagagatactgctcgccagctgtgtctcagtgtggaaaacagctgctgtgctgaaatggaatcgagaaatgagatagaattatttcctcagctatctttggatgactttggagagaagactcctctctcctcgtctgcggcgtggacttgatcatggactggtgcctttgcattcagaaggagagctgtcagcgtagcaccgaattcaagaccaaggcgtgctacctgagctgacagctttttgaaagccgagctgtttctgaaccatgtacatacatgttctgaaactttctcatcattttatgagtactgttcattgagagatgacaatgaagattagatgaaattggaaataaaccaacattgtttacattc

SEQ ID NO: 499972 - DNA, 205 bp, Homo sapiens
agagtgatactccatctcaaaaaaataaaaattaaaaaaaaattcaaagggaaaatgagggccatgagaaggaaaaaaaaaatggcttgtcctaggaggacaaataagagtttctataactgcctattcaaagttggcaatgaagttcaaaataggaatgtttaacatgtaaaagctgtaaggttgctatatgcatctttccata

SEQ ID NO: 499973 - DNA, 133 bp, Homo sapiens
ggataagagggtgatgtggtgaaggtatagtggtcaagagtggatggtccaattctgttcttcccctcacagaggtccccttcctgacctctcagataccaaggcttcaacagacagaggtccttcttgcagc

SEQ ID NO: 499974 - DNA, 1262 bp, Homo sapiens
agcgcgcaataaccctcattaaagggaacaaaagctggagctccaccgcggtgccggccgctctagaactagtgaatcccccgggctgcaggaattcgattcccttccccacagtgagccactgccccacttcagagggtaagagccaaaagcctcattgtgaaaggcactggacttggaccagggacaccatcagggccttggttttctcacgcataaaatggagagtggattaatcgccaaagattcttctgatctgacattttgaaattgtgagagaaactagatgactgtaaacttggtcacaggcctggttctggcagttctttgcggacttttttctagcattatgccaaataaacatgcagtctcagtgtgctctcgcatgtatgaatatctagtcctttctgtggttctcagccaagacataaaaactaggactcagagcacatacaaaaccagttatgtttcggaaagagggaaaagagtccccgagcccggatcttgtgctgcttttctcactgacgtgttgccttttttctttacaaaatctgctttgatacttaggacctctctggactaatttctcttcctagacagctcagcacagctattgatatgttagaggcagtatccttaatattcattctaaatgagttaacgacttaacttgaaattgggcctaaggagtgagaactacaaaaatacaaaatgcttgtccaggactcagccatgcacaccttgagcagcgccggcaggaggcacggaaggaactgtgctccgttctcctcactgtcatggtgccaccagtgtctgatgaagggcagagtgacccagactgcaggcagtaactgacttcacacagtccctggcatttagtcatctgtgattgttttatcactctggactgtgcagagccacctgccaccgagatctgcattccgactgcctatgaacgggtgtgggggccgggggctggcttgctgaagtcttcaacttgcactcggagctcctttgatacctcagagctggctgtcaggtggcagctcacacccagactcactggccacacctcagcagggggggagtcgagtgtcagtctctttctgtgaaggctttttttttcctttggcctgggaatttttcccatttttatgaaggggttttaaattgtttcattttgtgtgctgtgcttcaaagccttaactgtcaaatcttgcattatcttgtttgtacagaaatatactggcctagcagaggca

SEQ ID NO: 499975 - DNA, 130 bp, Homo sapiens
gactggttcctaactctctccctcctcctgcccacacacatcaaaagaattttccctacacccttttctgcctttattttttgatttgtgccacttgtaactaggtgtttatggaataaaggagaatgga
